United States Patent Application Publication US 2007/0054278 A1 - sequence listing, part 18

SEQ ID NO: 93525 - DNA, 567926 bp, Homo sapiens
  misc_feature (1)...(567926): n = A,T,C or G
attttgcaaacagtaattgttggaattcaaagaggagaaactacactagactagggtggtctgaaagggcatcaagagccaaatgggatttgatctgggattgaaggatggtgaaatctagctgagtaaagaatgcgaagatcaagacagaggttggcaaactactgcttgtgggccaaattgggtctgcagattgtttttctatatctgcagaaccaaaagtggattgtacatttttaaatagttaaaaaaacaaagaataatatttcatagcactgagaagtacatgaaatataaattttagtgtccataaaaaagttttattggaacacagacactgcccattgtttatttctatggctgctttcatactacaatggcagtgttgaatagttgtgacagagaccaaatggcttgcaaagcctaatatttacttggctctttgctgacaaagcttgccaactgttggtgtaagagaataacgtgcaatgattaaggagacaatgttggcaggcctataaatgtatcaagaggccactgaaagttttgactataggaggaagcccattcacaaattgtttctgcttcctatacacatcacctgggcttgcaaatgtttgttaaaccaacaaatgaaccaggattttcagattcctaagtcacttgttgctttatatctgttgctcttgaaaagaatgaatggcttttccacaggggacattcccctttacgtttgtctgttccaccttcacgcaggtgtgctgggagcagcttgatacatattgacattgttgggcacaataacaataccttgtgtttcaggggttgtgtgagaatgtattcaggtgacttctttttggaccttttttctttgcattggatgatgtttttcttctaccttttctacaatagttcagaaatagatacaaacaggagggttcggggagattcctggaaggggatggtattgacacgaagaattagcaaaaatcatagctctctccagagggtttgtgagggctagaccattagaggaaaaaaatggttcaggcaaaataaactgcagcagaaccccaactgttaggccctctcccctgggtgttcccatcagtcctgcatggatgcatttcaaataccaactttccattctaatcttttagggcagcatgtaaccaggcctcactgagaggagaaatccaagaagagtgtagagaaacacacatgagaggaacctcacaataaaaaggaaacaaactctgggaaacatggttaagaaatatcagactcaattaataatggaggcttcaacagccttggagagatccaatacaaactaaattcaaactatatgccagtgcttctagccatatttactttttttttctttttttttttttgagatgaagtctagctctgtcactcaggctggagtgcaggggcacgatgttggctcactgcaatctctgcctcccaggttcaagcaattcttttgcctcagcctcccaagtagctgagactacaggtgtgcgccaccacacccgactaatttttgtatttttagtagagacggggcttcaccatgttggccaggctggtcttgaactcctgacctcaggtgatatgcctgcctgggcctcccaaagttctgggattatagacgtgagacacagtgcccagtccatatttacttttaattgattatgttttttttttaaaaaaaaaacttagaggaaaactctttaagaaaaacaaatcaggctaaaaactacattcttctaggtaatgaaaagtaggcaaacaacattagttttggattttttaaaaattaaaaacagcttttcttaattggttcatttgaaaaaaaatggaaacttccaatagggaaaggtagagctgagatgaagttaagggagaacgttactgaatgggaaaatatataatattttaaaaatgcaattttaaatcatgcgtaacttgtcttggagttcatcccagataagtatcagtatagtcagggatgatgacgaattctggattagaactgtgcaaaggtttgaaatagcagtaagctcaagtcttgggaatgcaaactggatgacattttggaatgtcctactatcgaaaaggagagaaatgaagcttaaccccatatgtcagtgtattctcataaacagctacctaaaagggcatagccaagatgcagttaaacatagctacagacacacgtgtggacctggacagctagatgcctgctttaggatatgaaaaatttcctaggtcacaattataacagtgcaatgatttctagaaaaagaagatcatttcctatcctggctcagaatgttaaaaaaaatgactttcccataacattttctaatggatcttccagtcacagtctcctatggaggcataatttatgtagtggatgacaaagagttttatgatatctggaattcatttaaaatctttagattggaaaaattgagatccaattaaaatcttaataaatgactctgtgttgcatataaatatattaaattaatatgtgtgcaggctgaaattggaaaagttatgagagtcagcatgttaattctatttctatcagggaactaactgtatgttataactctgagaattattgggtaatggggctgtttacaatgaggcaaaactgaatttaaatagcaaatattcacccatgacttgtcataactcatgaagtctccaccttgaggcatggtgaaatctcactagtgaaaggcctctgaggagagggaaggtggaccaggaagccaagaagagccctagggaggctgatgtagtgaaagggccaggtccaaggatctctccatgaaaggaagcaaaggctggcaggctgctctgtggcacccccacgtagtaggtgagatgcagcagtgagaatctttgattggaagtcattctcatgcacagaaggtggtaacagcttggttggtgagagactgatgagaagtgctgggtctttgttaaggtatgacccaggggctgagggttgaaaaatacagggtgagtgtatgtatccggtacactcagattgatagagtgtacctatcctctgcatactcacatatttaccctaggttttgtatcctagtctgtatcccggggaggattcatacttaccctaagttttcctatggctacactaagacaacagatgaaatgtgaagagtgacaaatgacagaaattgggcttctaacatactggacagctgaatgtagcagttaagatggcaaacccacaagtccctagattcaaacccctgttcccctagttaccagctggggatgataacatccatgtggatgttgtgaggatcaaatgagatactttctttaattgcaggatgctccattttgttattattatttttggaaatagaaactcttggctttaagtcacataatgttagagctggaaaattatgctacacctatggatttgactaagctgttcctgtagtttggccagttttaaaacaaaaaaatcctggcaacacactcctatcctcccagccccaacaaatctggctatctccattccctggtaggttcaaaacctgtttttatttccatccaaaagcttcccccccacccccagacatcgagtggtccatctaaaacagtgattgttaatactgttttgtaaatcttccagtccagatttattctagaacttgagtttgtttttagattgttataaatgtgcctttatttctagctgtttgacataacttttggatgttaataaaaaaaataacaccttgggaagtatggacatgggtggatagaaatgtaattgagaaagccatatccaagtagattgagggaattagtaaaggcctcatcacggcatacccaagtcataacatgttaaaagtttgctccgttggtgttcatcctcctgagacacccaaggctgatggcaattatcctattcatcttctcccacaagtctgtctttagcggaagatttttttctttacataaagagctatcatataaaaagtgctcatagtgccagaaattgaggtaaatgcaatttgcaaacattattatctcatttaattctcttgaggatagataatattagataaggtaaggattaaagagaggttaagaaacttgatcaaggacacccagcagggaagtacttagcagggctgttcactagggcctgctgtttctctttccagatgtacagactttctagagagaacgatgtgctctgcccaccctcacccctttgctctgctgttctgccagggacatgcaggagacggaggccttcctcttaaccgcaagaggccttccttttttactaatattcctcagcacagaccctttacgggtgtcgggctgggggacggtcaggtgtttctctttctccttcctgagatctttgcttccaatttggctaaggccctttccatgttatagtatcatgtatctcttattcttgtctttctcacttaactgtgagcccaccttgatgttagatattctgaaagtcattctcctatccctgaaaggtcttcaataaagatttttcctccacttagtggaaggtgaataaagtttattcttccatttagtagtggctcaataaaaaagtttgtggaatcaatcaagggatgagtaaatgaatgaaatactgaattttcctggcctatgaaggaccatgagctaaagcagcggtttaaagtatatagtcccaaacaaagaattcttactaaaaacacaccggatctgtaaggcagaggagggaggggcgggaggaagaagtcgaagagcagggtgtggtattccagggagactgaagacaggagcttcccatgggacaggcagttcatccacaggctcagcttctgcaacctccttcctgtggttactcctgctctctaagaattctgcatgttctcatcaagaaaataccaaattccttgaaagcctggattctgccttgtggtttgtgagccaatctcatgacaccaccagcccacagtgcttttcctgattccatggaggcaaactagacggagcttctagcaagtgaaacttcttttgggtagatatttgggggccgcttttaaaatttttctgacagaccaagtggtaaaaatctgtgtgtgtacacggaatgctctctcccttctgcaatgcgtttactctccttgtagaaataactgcttctcttagccggctcttgcttggagcagggaagagcaaagtcctatcatgtacacatacacagtttataaacatatactgtacaatcaacatgtacatatataatacaatatacacatgtgtgcatcctgtatctgtatactgtatatcatgcatatacaatttcataaacaagcttgtaccaggaaaaggcaataatttatatattatacacacatacatgtatatgtaaaatatgtacacacacacaaaatataccatacagagtgtaaggttcatgacgtctttctttcgttgatatttgtgctcacttattagcggtaaattattaattttagataagcccatcacagagtgaaggctcaatccttgaacagcccagggagaacttcgttgctacttttgaaaagccctttgatgtgcccaaagtctccagaagggcgatgccaaacccactcaactttgacaaagtgtgaaacgtctgtaaaaaggagttctctgatgtgtgagaggagacggaaccgagaagaaaaggccgtactctgccccccgcgggacccaggtccccgcctgctgcagagcgcactctgcgcacgtcgagccgcgaaaggttcacagaagaaaacaagagaaagaagtagcaggcactgaggagccgccggcgccggcgcccaggacggcacgtgacccgggggcggggccgcgcgggccgcgggccagtggatggggacgggggcggggccgcggctcggggggcggggtctgtggcggcgcagcttacaccgcggtccccttatttggatctgcgggaatgtgggctggagaggtcctgccgtggtaccagcctccagcctgcccccaggactgcccctgacccaggcgcgcccgctgctcggtggcaggagggccggcggagcgccatggcctgcatcctgaaggtaacgacttggatctgtggctcggacgcgtggttggccagccccttgctgctcagaggcacggagtcagccgcggtcccaccgcatcctcatctcagttgtcttttcctggcattgattttctttttgttcctttggcaaatgcatatggagggagattctgaaacatgcagctggcacagcttcttttcccaccattcctgcctcctgctcgcgcctgcattgaaggagctgcagactgttggctccaggggagagcagggctgtgtgccgaataatggggatggtagggagaggaggggtgttcccgcgggtcccgcggctctgtggagcctgaggcctttcaggggccacggggaggggtggagtggctaggcgtgagttgctggtggtgaggggcatagcgctttaaatggagggaagagtgagcggaggtgggctctactgtgcatttgatcatgtgaagacagaaacttctgagtttacaggtagtcccttaggaatgagttttctatgagatctgctagctctgtttgcccttagctctactttggaaaagttcacacgaggatgtatatgttagtagagaacctctcactctctttatgctcataaatttgaatagacaaaatgattttatgctctgccagagtgcgctcagccatcccttctttgttgagttttctttctccaagaccggattcttagcctcacctgagcatctttctgggttcacagacttgtggcctcaggtgggagaacttggtgtgagggcctcacttaaaaagaactttccatcccactggtagaggcctcccctgccctcgtttttttttttgcactacctttctacaagaacataacctggatgcatgaatcaaaaacatgaacagcatgaaagtttcctgggccttgactggagaatgcagagacctagttgtccaagcctgggggaactgtgtgacgatggaaaataccaggaaacaattcgttgttgttgtgttattgtgaagtagcatttatttctctataagatgatattaagtcatctactgtgttctggttacctgaatcgtcttctaacgtgcctggtgtcaatgatgaaaataagagactaacctcgtagaagttgtttccccttctttgcgtaaaggagatcagaagtttcctgtgagctttctgaacttcctctttttgtttcagaacattttccaggacatgaggaaataatacatcagtattacagtatggggtatttgaccgggaggctcttagcacaaggactgaaatatgaatatgagtcatctttactattcattgtgttatttgctgaaagggacattgaggagcatgatatttattgctggccatctttttctgttttggtttctcccctgccttgtcctatacatgtggtaaacatctttaatgcacatcccaaactacacatgaatctggtccaatctttctcttctagcacttcacactgctttcagacatttgggacatatctgtccaccttatcttccctccactgaaactaatgtgggctttagactcagaaagatatgtctggatgctggctctgcccactgctacctctgtgatgttggacaagttacttaaatgtctctgggccttagtttcttcaatataagatcaaagtagtggcacctgcttcacaaggttgctgtgggaatgaaataagatagggtatgaaaaatactttgtggcacaggcatttaatatgtgccatttttttcctctaacatataataataagtgcagtttggttgatccttactatatcctcagtctgtttcttataactattattttttataaaatacaaaatgttttttattctttaatctttacataaaaccctgaaagataagtatcattgttttaaaccccattttacagatgagaaagttgacgctccctagtttaagagatttgcccaaggccacacagggttaatgacagagtgatcctggatttagacccagatatgtcaaccttccmtatactttactgctgttccagtactttcccaggtgatgacttttaagatggcctaataccattcagttccaaccacctttgagcacctttgagcaatccccttctctggtcatggtctagacagtctgggctggatcttttttctttgttgtctttgaaaagctacacatggagcagtgcagaatacaggtttcagtccagagacctgagttcagtgcaagcytggcttcttgcatatgattttagacagctgctgcaacctggagcctcagttttcccttgttgaagtgttcatagaattataaccattgcgttacagggtttttatgaggataaaactatggacttttttttttttaatgaaatattttctgccatttgctgaccctggacttggtgttggcatatgtagaaaaggaaagattttcctctgccctcttagtttctgtgcctggtcctgatagctaaactgacaaaaggcatattaacagaggaaaaacatacacattttatttgatgttaatgtttttatgtgtaccacagagggcttcctatataagaaataaagacccgaagaaggggagaggcctgagagtttataaagcattttaatagagaaggataaattgtggaaatgtgacaagacaaaggaaaaagggggtttgggctggggcagtcgattgtgagaaagtgggaaatgtatggggaaaactaatggaaaataggtgagtgtttttactagagatttattttggtgttgactctccatctttgatcataagaatgttctcctcttcctggcacagggaagggacatttctcatgggaaattttatgccttgcttttaggtagaaatggggaggtcagaaagcccttcctgtatctgctttttctcaattgcctttagctcaaaataatcaatatgccaaagtgatatattttggggtagcctgttctgattccttttacatcacaagatgcataaaccattgaccccattctcaaatggcttatggtttagtaaggatgatagaaaagtaaatgagtgcttaggttacaatgtgaagaataaaactacataggtccatggagggcatagtagaagcatggaaggagagagcaattacccctgtcattgggtagttcagacaggcttcccactgatgatattggagttgtgttttgaagactaaataggatttactatgacggagctcgtgttttagaaagataagttttgaggcagtgccaactttgttctgtgggctaagactttaatcttctcaatgaattttgcagtagattttactatccatttttacaaatgagaaaactgagatagagagatattgattaaagtatcattattgcctacacaatagtgaccctcactaagaagagacccccatgctgtggcagctaattttggtcttttaggggatatggaactatcccctcaaggtgctgtgcatgctgagggcccattctgccaatgcatagcgctagttctcgtaacagaacgatgatcacttcataatcatttaatttaggaattcagacttcacattgcctggactttaaagccagaaatatgtgacttttaattatggctccactccttattgattatagagccataacaagtttcttgatttcactacctcagtttccaaaatgggaatcatgcattcctcaatgggttattctaaaggttaaatgagataatctgtatattagttatattgcagggggaaaaaagaaactctgaatcttagcaggttcatttcttgccatgctcctggttaggcagctctcctgtgtagctctaccattgaataaagaatcaactcaaggaccagtctctttattattattatttttttttgagacagagtctcactctgttgcccaggctggagtgcagtggcgtgatcttggttcgctgcaacctctgcctcctggattcaagcaattctcgtgcctcagcctcccaaatagctgggactacagctatgcacccctatgcctggctaattttttgtatttttagtagagacggggtttcaccatgttggccaggctggtattgaactcctggcctcaagtgatctgtgtgccttggcctcccaaagtgctgggattacaggcatgagccatcgtgcctggcctaggaccagtctcttttcattaagcagctctgatgtcttcttgggccccagagcccttgtcagattctctgttttcagcagctccaggagacagattacagggaagatctcgtggggttgtttaaaaagtctctcaaatttgatagacaggaaaactctttgctttaatttgtatttatttgatcattagtgaagttaagcttttaaatttgtattagtcatttgtctttcttcttttataaattatagatactttaaaattttatgcaagaaaatctatccatattttcttttatgatttctacccttggtcagcaggtacattttcagcacagtgtcttgtacactttcatttttaaaaaatataggtgaattgtattaacttttatattggaagtggacattgagtggacatgtagacacaagatccttgagaatcatttctgccttcgagaagattatggttttgccaggttgatgaggcttatgaacatgaagcagttagctgatacgatagatgcatgactaagccacaattaccttctctccagtgacctgtcctcatatatttatcttgattgataggtaattagatgaatgatgataccaagttaggaacttggcgtcttctcatttcctcttcctcyccctgccccagatctaatccttctccacagtgcatcagttctgtctcaggaaaacctctcaactctgccccttactttccatccttactccccctgccttgttcaactcccactttagagtcacatctgtggtcaggccatcccctgcctcagcaggcttcctctgtgctcctgtggtcttagttcttgtccctgtagtagcaggtattaccatgtactgtcaataaactgctttcatgcccagctcttctttgactatcaaatgttagggagccgcggccttccagtgtttactgagcatctgtaattgagttctgttcttaccctaagtgagattatagactcagtgagaaggcaaataattaaactagtaattaaaagtatgcgaggagtttgaaaattacacctcatggtatgggagtatatgggtggggtgttgacggttactgaactgaatgtaaaaggcagaaaaggctttgttttattcaacttggtatttctaagaactagcttggctctcagtaggtgatccttaagtgtttgctgaatgtrtcagtggtgttattaatttttttttatgtcagttatagacacaggtccaacctgtcttctgaaaacagctgagcatttcaaggatrtggcatggattttttactctaatgtatagcaggcagattagagcttgttgattagtttgctccttaaattttttcttagtatgtttcttgtaggtaggtctgttaccattcctcatataaaatctggggccaatttaagatctggggttggggggatggggagatgagagaactggactagaaggagggaaaaagagaagtgtaggcgtggtttaacttttgtcatgatcattttggttccccagattaacagaaacagataaaccaaaaaaaaaaaaaaacaatcaaaaaccaaacacccacaaccaaatgattgtgtggttctcaaacgatgaggtctcaaagcatttgaaaacagtatggcttcactgagactggaaagccacagggacttcacaggtacacagatgataaatctgaaaccgtaggataaccctggcaagtagacaagtcacttcatttaataaatctgctatgacatttcttattgctgcccaggaaatgctgaattctcagcagctgcctggcctaatttccagtcttacagtgactgagcagatgcttttgctacgtatatcagcacattgtggggaatgagtggcttgggtaaaagtagtgctctttggatggattgataacaacagcaacaataggtgccatttattgaacagccagagtgctcaggctggcttctgtgctaagtaaacttttattacaaatgaagacactgaagttcagaaaacctaagtaaattgtccgatgtcctgtggtcagtaagtgatggaggtggggttcaccctgacttcgtgtggttgtaaagcagggstgttcaaactttwggcttccttgggccacattggaagaagaattgtctgggccacacataaaatacactaacacgaatgacagctggtgagctaaaaaaaaaaaaaaaaaaaagcaaatcgcaaaagaaatctcataatgttttaagaatgtttacaaatttgtgttgggccrcattcaaagctgtcctgcgctgcgggttggacaagctatagagcttgtcttttaccttcagtgccaattwagwaaatatttatagggattctgaatttatttcaccatcttctaccccagacaatatccagtctagacaacttcctaatctggtggcctgatggggaccacttttagctgtgtcgtttttatttgttcctttaagtttcctttgtgacagaagaactagaggaactagaggggctgcaaagactgaggagataagaaggctttaattctgtttaattctgaatagatctttgaccctgggcaagttatgtgaacctatgtgtcctttttgggggtgggagtgagggagagttggatttaccctgaacgcaagcttcagggcccttccaaggttctgggaagagacactagcattttggtatttataattttatattcattttatcaaggaatcccacaaatcgtatacatttcaggctccccaacatagatctgtcccttgggtggtgttggagaaccaaagagataatgcttgtgaatgcactttgcaaagcagagtgcactgcataggcatgaagtggaaatggcaaaaaacgttattagtattattagtactgataatagctggaatcgaggaaacctttgttgaaggactagtgggagaaagaaggggtttaggtctgaggaaaacagggaagcctattaagctttctagtaaacgactgagcgaagttatgaaagcttctccccaggagaaaaatttctgtttgtaagaatttaacacacacttatgcctgagggctgggagttgaatgaggttcttttctgtttcctggctttagggaacagtggaggaaggcatttttctaattggagggagtagatttacaagtgctacctggatcccattaccaaaagctgcagttagctcctggttattaaaaggctcattattcagtttatggattatcsagaccccatttgcctccagccattctgatgtacacgttttatgccttttactgccaattagcgccttcacctgagcagagaaaaaagggggtgctaaaccccaaatttgttaatttctctccttgttagcagctctgtaaaggtttgtcagcaggagagtgggcctaggaaaaggttcaaatgaggtgaagggattatctgcgctttctctattgctgtttctctcaattcaaaaattgagactaggctctggttctgactgtaaactgatttaaagtcactaagtcagagaccttggcctgggatattaagagactttaataaacagcagccctagggtaggtgacattctttgagaagccccttaccccacactccatatctccaggcctctctttcatttcctgtgtgatgtggaggtgtgggggccaacaacatctggtacttgagagagtgagggagaatttactcctaaacagatttgtcggaggccagaaaaagaggatacttgggtcgttttcgtgttttttgtttttttttttaaaggtgtgtktctctgtgcacacatagcaaatataaatatacatgcacattcattcaatcttatcttaatatttactcagatttgaaaactatcgcaygtaaaatccttttctggaagggacttctctctgatttcaaaggctatttggtttcttagtgaatttattggctgtgcatttactasacacgaagtaaaaacttctttggtcagctatggaaacgatttgcatcttgctctgagaagatcatgatcacaagggaattggaagtaaaatgtgtatattctgggttggaaatgagtcctgatctgggattaaaacctggttgcaatactcatcttagattttgagaactagaatgagcaaatgactgtcgtgagttgatccctctatttgggactagtgggatatgcacttgcggtgagcagggctgtgattcctggtgctgtttgctgcgcggctggccgcgacaatgggctggactcgaaagaaagagaagtgaaagtctctctttgtgaagmgtttgccttatcagagaaagtggtaccagagaagagacacgagaactgctctctagggtgtgggcagtaagaagactgtggggtgcagaggtcagagctagaccgactctgagtcccatcctggctttgtgattaataygaataaaacaataatacccttatttcatggtctgtagcagtgctgtccagcagaaatataatgtaggctttttatgcaattgtacatttcctaagagccattattttaaaaaagcaaaaaagaaacatgtagaatttaataatgtgttttatttaacttggtatatccaaaatactttcatttcaaaatgtactcaatataaaaattaatgagatatttatatctttttttttacaaacagttcttaaaactcggtgtacgttttacacttatagcatctctcagtttgaattctaaatttttcatcagaaatatttgatttrtattttgattttactaatttaaagtaaaaaagtaggttcactcgtctaagttgaattgtgcttagascttttccagtagctgaatggaacattatttttaaaaggtaaattaattaaaatgaaatgaaattttaaaaatgtggtttgttggttatgccagccatgtttcartgctcaaaagccacatgtggctagtggctactgtattggacagcatgctccttcaggtattcatcttcactatcagaagagaccactagactcagacaatgagagtagcgtaaggggctgcagaaaggattggctgctgggtcaggttcagatggggaggacacacctgttggctggactcctggcagccaaaggctggcgactgatgagcaagtaatgagtgcctgactcagggacacatctgagcstttgatgagcccttgaaattttatctgaaaatgcagtcctcagtttcaccatatcctgagcctaattttaccccagatgttgtgcagctgtgagttttcccaagggagtgctgctttgtggtatgtgtgagttggctctttggtctcagtgtggtagtgtgaactcctggaggctttgagggcagacacagacttgaagcacttttatttgagttgtttcattgctccaggagrgtattacacatatgggagcaatttaaatgtccagaacaaaccacatgtcttcttttaagtccagagagcaaggtgattgcagtttctttgttcggtttgcttattttttactgcttatttctgtgtgcataaattcagcgacatgctaatagacatatggccaatggtgcttagagaaaatctgtttgtaaacctgaatctctgttttgcctacacatttgcattgtattcctgccctgctccaactcgttgtcctagaccatccagtgttagcatttttctcatgagatgaacatttcgttataataatgacagtagctgtcatttgctgagggctttctgcatgtcaggcagcctactaggtagtttacagatatttattgtctcacaacaaccttcagcatgggcaggattggtttcatttgacagatgacaaaactctggcttgacaactttaccagcatgagagtgctagactagggtcagcaaactacctcctctagaacaagccyggcttgctgcctatttacatgcagctcctgagtaagaatggcttttgtgtttttaaatggttgaaaaaaaaatcaaaagaagaataagagttgacaggtgaaaatgatatgaaattcaaatttttcacccataaataaagttttattgaaacacagccatgcttattcaccatatctgctttcatggcacaaaggcagatttgagaagttgagatgggtactgtatggtctataaggcccaaaatatttactacccatctctttacaggtaaagtttgccaacccttgtgctaggctgttgagttctttcagtggactttaagaaccacagtgaagagcagtgtggttctttcatgtctggccagcaccaggcctcatgcctcacactctgaatggtggggatatttactgagcatagagctaaatacggtacrtggaagaggagactgaagcttagagaggccaagtgactgcccaaagtctcatagtggggctggaattcagacccaaagtctgaactcctaacagttatgttgacctcagtgctggaaaacttgaactacatcaggaccactggaagggacggttgtactagagtttgctaggccttaccactgtttctgattcttccagtctggggtatgactcaagaatttgtatctctaacaagccaccaggtgatactagcactgcacatctgggaaccgcactttgattarmcctaccatatgacatccagctcaatgaacagttgttgagttatggaaattgcagagcatggattcaaacccatgcattccccaaaagaaattgactagaaatttaaatcaatttagcaatttaagtgcagtgtactccagtcaactttcttggcattgtaataatttgatttctgccttcattgttttcattaaactcaagatttcttctgatgctatgaggctcaggccactatgcacactgaaaaacttttgcctttgcacgagctaggggctgggactaaaattaacccctcactggtggcaccacttgtgtctggaaaaatcagtttgtgattatttctaaaccaaggaattttgttcctgctgattrcatatcaaatcctttctcacactttggaccccccacttctttgctggctaacagggagaattaggggtgcaggaaacagctttcacagttagattatgctggctttggttacaaaagttaatgcattagtgctagagttcactatcttaattactgggttagtctcatatttaaaaagtcattatttaaggattaggaatggggaaatcgaagactggtgaaagacgatagttttttttcgtgttgatgattcatagccttgttttagacttttataagtaataaaaagcactggatactgctgatttagtctcttcctagaggctcatatttgtgtaaagaaggaaattactctgtaagttttcccttttgctttttcctggctctctctttctgtgcctttgtctatattgaagcctatttttctgatgttccttcttcatctccagccttcatgccccttcccaatacaggtgttgcagggatcgttagctagaatgtctaaggaaccatactatcaacccaagagaagggaagcttggtgaactcttaaaaccaagtagatgaaaccttcttgcagagtcccgggatataagccattccattaggaatccttccctgggaaatatgaatcattgctatgcctgatataaaatcactgrcatggtgttcatgacagctcaccatgtcatccctcacacctttgccatggcctggaggctgactacactactacttgtgtttgttcttttattgctgaccttgtcaaccaggtcattctttctctcttcctatttctaagagaaaattcattccccagaaccagcaagtacctgaaccattgccactttatatgtgctgccttatttatttttcatctcattctttggctgggagtaaaagaacctttctctcctaccctggtttatgttgcctgattatctgttcgtcggctggtttgatgtttatttaattctgccatgctgcttaaccttagaagcctggttttgtggcttgatttgagccaagatttctgcatgtgacttctaacttgtgggtaaattaaggtttgtttttctctcacccatctttgacccatgatattaaaacgttatttgaagaaaggacatccaacccatataccactctaggtttctgtgttaaaactattgaaatccactatacattatttcagatttatgtaggttaaagggatctgggtttgaccttttccccacttatcttcagcaaatagagacatgtgaagaggaagtttatttatcaagcacttatagagaatctaagtactgtgggtaagaggaggggtagagagaatggagataaaagattcactgaacatctaattttttttctaggggaatttagggtgtgtatgaatagtaataataattgtaacaatagcttacatttactgagtgcttacctgtactgtgttggggctttatattygtggattatctcattttatccccacaggctcatgaggtacatccacctaggtgaggaaatgaaggcttggagaggctaagtcacctctcaaaggtcatactactagtagaagaggggttatactttgaatccaggtgtttggctgaagtaaaatacatttcctagagtatattactcagatcatacatagataaacctatttgtaacttgcccatgataataataactttaatgatacaataacatcagcaaacattttctggacacttactatatgataggcactgtatttaattcatacacatgatttattttaaagtttaacaatcctattagaaatctattttatctgaggaaactgaggctcggagagaacttaagttctttgtctgaggtcatgtggccagtkagtggaacacctgtgggrtcatattatttgtataattgttattgttattagctaacagttactatgtgcagtaaggactaggcattgttctcagcactttacatttattaattcacttaatcctcattttacaggwaaggaaactgaggcacatagtggttaaagttacaaaactattctgtggcagtggtaagatttgaacccaggcagtttgaccctggcatctataacagatgcgcstatgaccacagactttgtttcctttgccactttggtggtctgtctcctagagcagagaatcactagtactattacaaaccattccagtaacaaattaacctacttaaaaggagcttgcggaaatgaaaatataacttgaattttgacttgaaataaactgaactttaaaaatcctttgaggctttttaaaaaatgtatttgaagaatttccaatcagatcaacttaggaaggcccacttaggtcaaatcagacatggaggaattaattttcttgtggagctggtgttgagcctaagtccatcgtgctgcctgggtggggaatgccaggcagctttccttctttgctttccctgttctctcctcaatcactcatctctctagataaggccacagaacagccagagtgatcttttaaaaagtaaataagatcatggcagcctatttgtttgttgatctgtcagtcaaaaaactaaaaggatcacaaaaaaaactaaagggatcacaactgttttgcttatcgctgtgtatctatcatctagcacaatgcagtcaacaaaagaatgattaaatgaattaattttaggcaaaaaaattagcatgtgcaaagatccggtggcatgaaggaacaggacattttgggaaacagtgaaaagttgtgkatggctggcattgagctggctttgggagctggaagagataatacagttgggtcagatcataaggatcatgtagattctgtcaaggagtgtagatttgatcctctagaaatggggaaacactaaaggattttgttttttttgaggtggagtctcgctctgtcacccaggctggagtgcagtggcacaatcttggttcactgcaagctccacctcccgggttcacaccattctcctgcctcagcytcccaagtagctgggactacaggcacctgccactacgcccggctaattttattttattttatttatttatttatttattttttagaagagacggggtttcactgygttagccaggatgatctcaatctcctgacctcgtgatctgcccgccttggcctcccaaaatgctgggattacaggcataagccaccgcacccggccacactgaaggatttttaaacagagtccttgggttggctctggccattgtattttgtatttggaaattatttgtctcaatgatgattttgctacaatgattgcacacgggtaatttcaaacagaactttaaaagttaaaatatgctaaagatataagtgtgcttgtttatgacagagcttggagttgtatgtatcaaaagggtcaagccaatgacaacataactaaacattttatacaaataagttattagttgtacaggttgttaaattttccatttgatgaagggaatcaagtttgagcattatctcttgggtcatttagacgatacattgtggatttatggctccttttggtagagtcaactcttgacattcggttgacagtattgcccttaaggaggatgctaggtggtccttccctcagagtcactatatagcagctgtctgtgagtcctgccttggaaagacaatattattctttcagcagctattatttattgagcacctacaatgtggcagatgaactaatcatcttaccttatgtgagtaaactttatagcatctctttgaggtagatgtgtccccattttataaatggagacactggctcagagaaggtaagagtaagttagagtgcacttacatacacctgggtgtgcactgagagtgtatttatatacacctagaagttaagaataacttatctgagccacggtttctccattgtaagtgctagtggggccagggaataaaattcagatctgtctgacccaaaataccttgcttttaaccatctggtcttctacctctgtagaggagagaatcatttaggaaggagcctatggaaataattttgatctgaattaaactgattatcttttaaaagttaaggagttcttagaacttttctttgatgttaagaacttttaaactagattatacttaagaagacaatttatttcacttgcttagttcaggtcagacctggtggaattagtctcactgataagcagatacttgaacagaatcttgatgaataagcatgagcattaacttcagactaactkgccggatggctgtgcctcctggtctacccacctactgctctccctgccacaagttcctcttcttcatttgtcactcttttatctgttcttggcacagcaaccagaaggaattttaaaagatgcacgtaagatgatctcattccctttcttatctggtcagtggcttcctttttcatttggaatatattacratctttgaatcatgactccacaggcctacaggatccctttccagtctcctccaaggcactcagcctcttattattttctagctactctagggtcttttcaggccctgaatctgaaacatgacatttgtggaaaatgatgggaagtactttatggctaaagcttagtctggactttgggggctggtgggacattaggtagactaagggtttggacttgaccttgtaggtaatggaacacttttgagacatttttagcacaaaactaaacgtaatggagccactgagctgaggagtagaatattcttctattgtctttttagagtgctcagagtccctgcattgccactggtcattgccctttgtacttggaaatgacttgttccaattatgacagccttgcaattgcgcaggcygaatgtttatcagaaaactgtaagttaaaacatggcaatgacatctctctccttgtgtgtcatatttaaggcacatgttctctgaaatcaagaagctgggctaggatcttgcactggccccagaccatattctgttgtgaccatgcttcagtgagaatgtgtcacgtgtaaaatgaagataagcaagaatatcagtctgtttgaaagtgctaataaaagtaaaatattcttggcaaataaagctwttaatgtaggtgttgaaattttcatttagtcagagcagtcctaaatttaaatgtaaccttttgagcccttagatcattgagttaagactctttctcatgyggatgaacagtaaatgcttgttatctgaagatgtaaattgggaggagtaagggacttctgccccattgtgcattaatgcctactgtttgtttccctgacttagaatgtggctccatatttttgccctcaaggcagctattgatggagtcatcctatgctccaaaccttgagctaagcaccacatatagtcatgtgccacatgacgacgtttcagtccagtcaatggcagactgcctatatgacagtggtcccataagatgataatatcacatttttactgtatcttttctgtgtttagatatgtttagatacacagatacttaccattgtgttacagttattatacctatagyatatagcacagtaatgtgctgtrtgggtttgtagcctaagagcaattggctataccatgtagcctaggtatgtagtaggctacaccatctaggtgtatgtaagtgcactctatgatgctcacacaactacacttacggatgtggttctcagaacatatccctatcattgagccattcatgactgtatgtatatgtcagttaaagcttataacaacactgtgaatctgttttttcatcctgctgtgagtttggattgtttatgaggaaatgcgggcttagagaatttaattgcttaaagtcagagagttaggagatccttcagttttgactgatgtcaacctccgtgctcttaaccccagctctgtccaagtcataagacyrtcctatagacaggccagaatggtacaagtggaaacacaggaagagatcttctttcctatagaccttaaataaaaatgtctcttggatcatcttgtctgaaagcccatctttttgggtttatttctctgattagagagatactttgttttgcctaatacrtatttttagaaagtagtacagrcatcagtcttttgtaaactctttgagatttaaataaggaagtttgctgtttgaaggactttgtggctaatcccttggtaaagaagtatcttataattgactatgaatgccttagtagctattctgtttcataacttgactttcaaaaaataataatggcaaaagatgacattttttgataagcaccaggtgcttttagaagcaatttttatgggagtttctaatctaatcatcacagcaacccttcaaaatgggtgctattattgtgtccatttgacagagaagtaaactgaggtgacagtggctagatgcagggatggcttcgtggcatgtgacctgcatgatcacacaggaccccatgcttagaagggccccatgcttggtgtaatattctgcaattattgtcgtagaagacttcataattttgaacaagggccctgcatttttattttgcatggggcctcataaattatgtggttggtcctgcctagccaaattgtccaaggccattccatggtgagcagcagagttgaggttcaaacccagactgcctggcgtccagcgtgactgcctggcctccagagtgattgcctggcctccagggtgtgctcttccattgtgtcctcctgcttcccatattcccatgttcttaagcactgtcctccatcttgtttttctctggacgtgtctttagaggcagaggcaggtggtttgactcatgtctgttgaattctaaagattcagaatttatttgttgaactgaatgtttgttacatacaatttcctaattaagtttgtgggagtgcagtagtaaagatttgaagatatgggaagaattgcatatcctggctatagtgaaaaatcatagtctaaaaataaatgggaataaagtggaaacactgtaacatgtttgctttgtacagctttaatggaaaaaggaaaggaaagaatacatatgaaaagaaggcagtcccttggcactgcctgtctcaatgctgtgtgctgtggactggggacacttaattaccacgtacaattttatggactgttcatgagaagcttctttttaacttttcatggattgcagtaaaggaaaatatagaaagatagaagaggattttcatcacgttggcaagaactgttcctccatgatctatggctagagcctgaaactgcccaagttccatctctcagcattttctgagaactttctgtgaagagaagttcagaggccagtaaaacaagtgtggtcaygaaaggaatcagaacatgactcccccaaatctgcctctttgacataaaattatttttgagctgaaggaaattaagaagcagtaaacaggggaaaagctctctctatcctccccattttctgcctgaagacaggatataaatcctcctctactggagacaactctagactcatcagctgagagacaacgccagaggaatctgcaaactaacctcacttcatcagttttctcctrtatatttaccttcccacagtttcccatccttggaagcccaaaacctcacttctttgtcctgycttttcttgacaactttattgttctttgttgaacatgccacataagccagatgccacataagccagagttctaagctgctgctgtgggttacctttcattgaggtttctcctgtgtgatgtacactgcatgcattcataagttgtttgttttacttctgttaatctgtcttttattacgggagttcatcccaactaagaacttatgaggcttgggggaaaagttatttttcctccctgacagtcactgcagggcaactgacgttctgacagagggaggcatctgccacaggaacacgaggaaagcagctgatagagtcaggaggagtctagargggtcaggggaattgtccatgtagagaagagggacagagtgttcatctatggagggaacagtaaggacaaaatcacggaggcgagggagatcacggtcaagatgaactgcagtatttggccctgggggaagtgttagaaaggtaggtggggaccaaatgctattgtgctaagttaaggagtgtggatttatatatcccaaggcattagggatggtgatcataatagctagcatttattgagagcttcccaagtgctaggcatgatttagtcccataatatccttattctccaacactcctttggggttagttactaatctcattttacaaagaagaaaactgagggacagagacttttaataacttacctaaggtcacacaactagtatgtttcagagccgggattgtgaactgggaagtctggctccagaacctgtgttcttgatggcaattttatactgattccagtgatggaagaattttaagtagaggaaacgtgtatatgatttacatttccaaagattgttctaatggaagtgtggcctgctaggtgcaaggagatgagcatctctggttttgccaccacagaaactatgaagacatgttctttaaaaatgacttctcctctcttcccttggtatatgggtgcaatcaattcttgctttaaataccttctccctgctctttctatctctgaacagattcctcacccccaccccccaccgttccttactcactgagctttatgctacttgaccatcactcaacatcactcaccaacctagccttctttcttcttcctcttggtactgctctctagattataaacatccatgtgatttctggtcacctgtatgtatacytattaggtgatacgatatgtacactcagtggtcattattaatacatgaaatggctgaggactctagaggcatgaatggagttagagtcctttctgtgatatatatacccctgggatctggggggcaggcagcaaacctctttggaccttagagacaaactgggcatagtaatcatatctgctgtactggttgttgtcagaaacaaaatgaaataagatgatatactttgtataaataatgtttatacaaagtataacattatactttgttatatggctacattgtctctagtgtaagcaattttatttacaatttgtactctacttgttttgatatcatttatggcaactttatgtattatagcatttcaaacctggagggatctaggcagactgtggttgattagttgatgtttagaaagactggttaattcactgccaraatgcagatggggtggttggggaggataactgttttctccaggcagtgggtcagactgttcccaaagtgtgatcttacccatatcacttaacctctctgggcatctgttacctcctggaaaatgaaggcaaagctgcctacttgtagggctgatcatgaagaagattgagatgttttctgtaaagtgcttggcacttagcaagtgttctataaatactattattattttcattcctgaaaaggaaggagttagtattctagtgttgagtgtcaaaagactgggggaaggagtgtgggaggggtttatacactttccttcccatcctctcagttgtcctccctcatctccactccctccatctccaatcttttctcccctcarggctgaatgaaattgaatgtcttgtaaacgtgtgcagcctttgccaccgggccctcggacatgcccttttaacattctgacataatggatgaaaacatgaacagctgacagtcattggttaaatctccaaacttttcattccctcacctgtggggatggtgccctctgcctggtgaacccagcccaggcagagattgcaggagctggctctgctggtggtgggcctggttacctaggcaacgtttacctgtgctgatgacaaagggcctgtcactgcctcctgatgcatgcagaagaatattaagtttgcggggagatggaaagaaacaattttctcttgaaatgaggtagatgcaggtgttaatttctttggagtgaattttctgttttcagagaggcaagggtagagcttaaacacaaacttctggctgaaaatatttagtttgcgaacctggcaagcctcttaagaaaaaaaacaatcctggtgccgggactgttaggcttcctgtcttttcagcagcttattgcatttgttttactgctttgaaggattggaagtctctgaaggccatttctttaatgacttggaatattaatgtaaaaacttgcttgttggacaatacagtgaatactatagctttgcctctaattggcttttcagtccttcacgctgtaaagcccccttcttttaagacattttctttattttgaaatatattttatatttataaattttatttataaaatatctttattttataaataaattaataatgaaggaaagtgcaccaaacaattaaatagcccaatgatttatcatgaagtgaatatattgatgattgctgccgttaacaaggtgaggacagaacatcgtaggtgtcccagaaacagtccttctccccactttcaacccttcccgtctttcactctcccaaaggagattgctgtcttggctttccaaagcaaataaacgaagttcttactagaggttttgttccctaagtgttcatttctaaacactctagtttagttttgtttcttttgaatttcatgtagaggaagtcatakagcttttttttttttttttttgagacagagtctcgcttttttacccaggctggagcacagtggcgtgatctcggctcactgcaatctccgcctcscgggttcaagcgattctcctgcctcagcctcccaagtagctaggactacaggcatgtgccaccacgcccggctaatttttgtatttttagtggagacacggtttcgccatgttggccaggctggkcttgaactactgacctcaggtgacccacccaccttggcctcccaaagtgctgggattacaggcgtgaaccactgcgcccagccagagcattgttttatgtrtggcttctgatatggtttggctgtgtcctcactcaaatcttatcttgaattgaagttcctataatccccatgtgtcataggagggacctggtgggaggtgattaaatcatgggggtggttacctccatgctgttctcgtgatagtgagtgagttctcatgagatcttatgattttataaggggctttccccctactttgctctgcacttctcttcgctgctgccatgtgaagaaggacatgcttgctcccccttctgccatgattgtaaatttcctgaggcttccccagccatactgaactgtaagacaattaagcstctttccttaataaattacccagtcttgggtatgtctttattagtgcatgagaacagactaatacagcttctttttttcagtgttatgtttatgaagttcatccatgttgtggtgtatagctgtagttcattcatcttacttgctatatttcattataggaatattccactatttatctatccatttggccattgatgcatatttgagatatttccagtttttagctataaatactgatgttgtgaacattcctgtacctgtctcttggggcacatgtgcatgcatttctgttggttgtgttcctasaagtggtattgttggggcataagatatatgttatctttggccttagtagtataaaaaggttttgttatttttttttttaacaaaaagcaaaataattgctctcatacaaatacacaatgaacgtgtgtgaaagatgttatttaactcattaattaatgagggaaccagtacatgttagcagctggttcaaaggagaatggaaaggtccatgtatatgtaggcaataagagatgaggaaatgaatttattaataaaagtgaaatgggtctatccacaaggcaataatttgttgcatttccaccatacatattcacttgcgtttctatggacgggaagaatttgtatcattatcagttttctgcaacttaaatagttgtagaatagcagaaagacatagaaaggcatagtaacacagtagggtgcattagactgcacgatcacaatgcttttttttcttccctattctaaatctttcacaatttttcctgatggtagatattaccaacctgttttccaaaattagtgtatcaaattactcttccaccagaagtatcacagaagttccttttgcttctggacaacaattggtttaaacttttgccattctgttaggtakgcagtggtatctctttgtggttttaatttgcawttccttgattaagaatgaggttgaacaccttttagatatttattggctatttgaatatcttcttgtgtgaactgcctgtattagtcttttccccatttaaaaaaatgggttctcttttaccttttaggggggtaggagtgttttatatatattttatgcattaatatatattttccaatcatatgtgttgcaaatatcttcttccacattttagcttgtcttttcattcctttactggtgtcttttatgaacaaaacaattatactacagccyattttcttaattttttattttacaattaataattgttaaaatccctccttaagaagtctttcactagtttgatttcttgaaaatattttagcatattaatgtctagaaactacattattttgcctttcaaatttagatttaaaatctatttcgattttatttttctgtatgatgtaaaatagggcatcattttttaccccaatatggtatccaattttcctggcatctttcattgaaaagactgtgctttcgctactgcttggcagagacaccgaaatgttcatatgtttgagtctttttctggatatgttgctaaattctagtgatccattgatctatttgttcattttaataccaatgtcacactgtagttttttatgataagttttatgataagtctttatttctgatagagccaaacctcccaccttgctgtttctctttaaggtgatcctggccctttatacttcctttgagttttagaattagctcataaaattccacaaaaattgtggatcttatttactgagtttttatttaagactgcattgaatccttaaaaattccacttctaggtatttatccaagtgaaatgaaaacstatgtccacaaaagagtggtacatgcatatattcatagcccctttattcgtaattgctccaaactggaaacaaccagtatgtttataaaatgtaaaactactaagcaatgagaaggaatgcactgtygatacatgcaacaatgtagatgaatctccaaaacattacattaagcaaaagaagccagacatgaaagagtacgtaatacgtgattctatctatatgacgtttataaaagccccaactctacagtgatataaatcaatcagtggttgactgaagtcagggatgaagtgggcagattagtgggaagagctttacaggggcatgtgggtatsaactggggtgatgattacagagatcactaaaccacatcctaaaaatgtatatattttattgtaaataaataatactttattaagttttcttttaaagactccattaactccatagattcgtttaggaaggactaacatttttacaaattgagtcttccaacctaggaatatgttatatagctccaagtactattgcatttcaattctcacattaatattcttttgcttttatgtagaaatttttcatatttttcaaagaaatatccacttattttgaggtattgttaagtatttatgatacaatggaaattaaaaaattaaatttaattttgtttatagctggtttataaacatgtagttagtttttatttactgaaaattatatccagcaatcttgctatattgacttattaattttatctgtagattctttggatttctacatccacaatcatatcatttgctaaaaatggcacttttgcttcttcttttctagttgtgttatcttttatatctttttttacctgattgtactgactccaaaaattaatacgatgttgatatcaaagagaaagttgtcaatattttatcactgtgttaggtttgcagtagtgtttttatagatatattttaaaggaatttcccttctattcctcctttgctaagaagttttattcattaatggatgttgaattttatcaaagctaatcttgcatctattaaaattattatatgtattttctgcttaattctgctaatgtaatgaatatttgtaaaatgttgaacaaccacgcatttctggaagcaacccaattgggtcaagatggattaacatttttatatgatgttatatttagtttgctaataatttgtttaagctttttgcctctatgttcattaatgaattagacctgaaattttcctttctcataaagtccatgtcaggttttggttatcgaggttatgcttaaagtgagttaggaaatgtattctcttattgtttggaggtatttgagtatgatcagtattgttttttctttaaagttctggtagaattatctggggaagtcatcagaatctgtttttttttttttcctttgtgggaagttttaaaattatgcattaaaattttttaatggacatttttttaatgccagttttagattcacaacaaaattgagcagaaggtacagagataacccatataacccttgccccatccgtgcacagccttccctgtgaccaagatcccccatcagggtgctatatttgttacaattgatgatcctamaytgacacatcaktatcacccaaagtccatagtttatactaggattcactcttggtgttgtacatcctatgagttttggacaaatatatccaccattgtgtcacgcagaatagtggtactgccctaaaaacactctgtgcctgcctatccatccctcccttctaccgtaacccctggaaaccactgacctttctttctgtctctatagttttgccttttccggaaggtcatatagttggaatcatagagtatgtagccttttcacattggcttctttcacttactaatatgcatttaagtttcctccatgtcttttcacagcttgatagctcatttgtttttagcactgaacaatatttcattttctaggtgtaccagaatttgcttatccattcycctactgaaggccagcttggttgctccaagttttggcacttataagtacagtttctgtwttcgtaaacacagaataaacacctatatgaagatttgtgtggtaagagtgttttcaacacttcctcatgttgatcttttatattgtatgcttgttttcacttcagtcacgtctgctctttatccatttcctttcttctactttcttttgtttaaattgactgattttaaaaaatgatttcttgaagtggttagtagattctcaaattttgtcgtaatgtatttacacaatagggttccccttaagtactgtttttgctgttttagatgaaatcattttattatcattcagttaagagcagtttctaatttctaccagggattttctagccatcttttcattattgatttttggcttcattgcmttgtgaggaaagaacacgctttgaatgatttcagtgcttgaaatgtgttgagatgtgtttgatttcataacatctggcatatttttatacgtgtttgctatgtgcttgaaaataaagtatatcctctatttgttgagtgcaatgttctatatgtttatttggccaattttgctgtttatgttcttcagattttctgcattctcactgatttcttttgtctttttttgttttatatgtttctgagagagatatgttaaaattccataatatgactgtagacttgtctttttctcaattacaaaggatcttccatatacctagtaagactttctgccttacagtctatcttatctgatattaataaaaccacaccagctttctttcagttagtatttgcctggtgtgtttgtgtgtgtgtgtgtgtgtgtgtgtgtgtgtgcctatttgaatacttttagctcctgcatttctatagcattatttttagatgtgtctcttgtatacagcatatggttgagttggacagaatttgtcttttaattgcagcattgagttttcctacttttaatgtaataatacacgggtgggttgaaatttattattttattaatttgctatctttcttttagtcctgcttgttccttgttccagtttctcctctttttctcccttctgttgaattgaggatttgttgttgttgcttttaaccattccactttttatttgtctattaccttggaagttgtatattcttttattattattttggtgcttacactagagattatagtatgcatcttgactcaggtcttagaccactttaatggcatttatcactctcttgacttstgtgtcaktgttatgtattttacttctayacctttcagatgcccaagacattattattattattgctttaytcagtcataattcattttgattaatcatatatttattcttttctttgttcttcattttattttcttgtattakttatctttcatctgggagcactctctttttgcctgaagaacatcattcactatttcctttattgtaggtctgttggtaacaaattcttttgttttttgtttgaagtgctttattttactatcactcttagggatatttcctctgggcataaaattctaggctatctgttatgttctttcaatacttaaaagatattttatttacttctggctttctttatttctgttgataagttagataaaaatccaatttttgtttctttttcacccttatgctgatttttagtktttttttttttttctttgkggttttagcagttttattgtaattggcctgggtgaagttttctttttacakttcctgcttggggtttctaggattctttgtcttggctccttctgaggcctgatatctttcttcagttttggaaagttctcaggcatcattcatcttgtcaaatattgcttttccccattcagtctcttcttttccatttccatgggctatagttacatatgtgttatacctcctcactgtatcctgtagtgtcttatcctgtattttccatccttttgtctttctatactttattctagttattttcttctggcttctaattcctgcttctgctgtgtctgttcttcmtttattaagttattaattttagttaatgtatttttaggcctaaaattttcattcgactctctctgtttctgagtttctcatttttatgagttccataggatggcgtagcaaattactagagactgggtagcctagacaacagaaatgtattctctcactgttcaggaggctggaggtcaaggtatcagcagccacactccctccaaaggctctagggaagaatccaccccttgcctcttttagtttmtagtggctgttggccttcctttgcttgtagctatctctctgtccctccatttcacatggccttctcctctctgtgtctgtcttaaaatttcttctgccaatctcttataagaatacatgtgattgcattcagggttcatcttgataatttaaggtaagtcctcctctcagcacccttaattcagtcacatctttttccatataatgtattatttgctcctttgctacataaggtaatattcacaagtctcagagattaaaatgtggacatatcttttttggggccaccttttagcctgctataccattgtacgttgaaattctcaactttataattttctctttctataaataggaagactttttacaaaaagtctgtttcagataattctagtatctggaggcttgtgggtgggtttctatttctgttatttctgctggttttgtttatgtcttcttatctccttatgtgcttggttatttttaattgtgtgtgagacagtatattcgtacaattttttacagatataatttgaggtcaagattgaggtttctcaaccccagaagggatttacatttgcttctgcaagcacttggggcattagaattctggaagcatctgattttagtttcagatattgagatggcttgaagatgatccatagacctctgcaagggcctcttagttctctattctcccttcctgctaggacacagctctttgaggagcccagtccaaaacaaatgatacacctggtcagttcccccatccttagcaggacttaaacacaaatctttatttccttggctcctcaatatgtcgttaggggagaaataggcccagaatgccagcttcttttgtccagacttcttccttcccttgatcctggcctgacgcttttttttttttttttagatttgaggtgttttaaagcatttaataaatgctttttctctcttttacttatcttcaatgggaaggtgtattagtctgttttcacactactgataaagacatacctgagactgggcaatttacaaaagaaaaaggtttattggacttacagttccacagggctggggaggccttacaatcgtggtggaaggtgaaaggcatgcctcacctgcggcagacaagagaagagagcttgggcaggcaaagtcccctttttaaaaccatcagatcttgtgagacttattcactatcatgaaaacaacacgggaaagacctacctccatgattcagttacctcccactgggtccctcccacaacacgtgggaattcaagatgagatttggtggggaaacagccaaatcatatcaaaagttttatctggcatatctagtgagtcattatcagaagcagtagtctctctgaagcttttctcatctatccaccttacatttttatgattaaaaattccaaaaattacagaagtggagggaatagtccaaatattcccccatcactcaaatgcaactcttatcaagattttgtcacatttgcatggaaatattcacaacctrtaagaagagaaagttttaaagcaaggcaatatctcaactcacagccatccacttacctctaatggccagcatcagagacaaagacttctgccttggttactgctgtcctgagcttctagcacaggtgtgcccctagntgatttcagtgagctattgttaaatgaatgtgaattcactgaagaaccacagactgtgggagctggaggaagtcttggcttgtcgtaatgaaccacagattacagatggagatgctgacatcctgagattaggtcacagaggtgcatgggagagttaggccaaggtctcaactcagggctctctccacttttccacacttcctcctcattttgctagctcatttaattaccactttttcttcctttctgataacactgaagtttaagagcatttcattacaagtgtgatgatacaatgtggtattaagacatgacaaggcaagttttattggccattactatttgcctcaagtgagtggcaaagcctttgaccactcgaggcatatattaatagccctataaaatacatcctggattgctagtgctattaccgtctggctattacatttaaaaaaatattgtacaaataccacttcaaataattttcttactcttttttttaaactggaacrattagctttttttatgagagacaattcttcacatgatggagaaaatagaattgtcaggtaacatggaaagagtataagctttggagtcgtaccaaactgtgtgcagrtatttgctctgctatttatcatcactgtgacattaggcacttttcttaaactctctgggtctattttcttctctgtcaaatgacaacaagaatgcttgtcttttagaattcatatgtatatgaaaacacctggcatagggccttgaacataatgagtggtcaataaatcttatatttttgttgttgttattattgtcatgataatgaaatccaatgggaaattttttcttttaattagttgatttatttgtaagactaaaaatgttgttgttataacagatccttgtcttgcagggcagtctttctttgtttcctctctagccctcatcccttggaaaaatgagctgaaccatgttggttggtgcaagaggggctgacagaagagagttttgataaatccacaagataactttggaractctttgccattttccctcctactcaatgctgctgggactttgagctcgctgaggcagtctaaggctgtgctttgacttcagtgctgtgccttgtgcttgggataattgtgttttccatttgatggcccccaatgctttgtgtaggaattggatggtgcacccatgctcctcaaatgctgaagcagtcatgtcacttggtggggtgaggtggatcatcagcaacaacatacttttcttttctttttgaattaagcacacrgaaaaatccataatctaaacatgagggacattaagttttggatggaagagagtgaattttgcaacaataacaactaaaaacccaggacasagaacaattattgaaaacaacttgctgaartatataaataaataaaagtgtcatttctgaagtatctttccttccctaggctcactgccattgtcatgggaaaagtgtgcatggcagcatttactctgaggtaataacatggatacatttcccgttgctcaagacttgtacatagagtctgaagacaaattcttcctatcttgctgagaaattaacttctatttttccattcctgtgagccagaagggtaattaccacatgctgttcagtcatgagtttatggaaagaaacacaggcttcattcagggtcttcaccaactgggtggggttgggttggtcatggagagaacttacattgtgggtttacagctgtactgcaaacatttcttcaagtctggagcaaactcagcccctctttcctgactaacttcttccctgcctaatccaatgaagacaatggttgatgagaataatagcagttattgcatattaagtattaatcagacatgttattctttaaacacacttttgctttttttttttttttttataataatcaggcatccaatgagatctgtcctctttttatcctcatttcactgagaaggaatggtggctctgaagagttaaataacttgcstaagctcacaattttagaaggtatggccaagactcaaacccagattggtctgattgtcaaagttgtgttctattcttaaccaattttctactttctttggtaccatgattatctccttgccttataaatattcttgtatgtggtattatctttgtcttattattcatagtacacaggggctttttttcttcctacttgcatttccagttccttccttattaatcagtgtgagctttttgcgattgagccctcttttctcttgccccacccgccagcccacctcctgttcaaatacagccctgcgggtgaacactatgggcgacccatgtgtgtgggctcataggaagatgcaatgtggagaagaatggaagcttctatggcagatctacattcttttttctgtcctctccctctctctacacccaatgtactttattttttggcccatttttgctcctatatgccctttcatcatcctcagaacctgtacccttggcattttgtckgtagacatttatatttcytggcattgaggctatagatctctaatacttgaattgattttcaaaattagggaaaagagctgcgattttagctatatatttgggctgtttgagttgaaaatgatgaagagtaaagtaatgtttgstgtaagaggtgggaggcaggactgtgacayggtcagctgactcttagatgtgtaataatggtctggcaccaccagtctctcactgtcttcttgaaatcacctctaaagaagagtttgatctggaaggtcaagcctagcagtgarctgaagctgttctcyctgagtgcatttattcatttattcacaaagcagttactggtctatgtgcctcaagattcctaaatctcattgagccaccaacccttttattgaaagctacaggctctttttttcacaaaaattcacagaatacataacatggttttgcatgcaatttgaagggattcacagatcctttgaagcccatctgaggactgccagccaggacccctagcttggtgcactacctttcttgtttaatcacattctaatctccaaatcaaggcctcttccattgtgaatagagatagaaactcagctcagattctttgatggaactgtgttcagccaagttgtgtttgctcatcactgaagctttaagagatggttaaagaaacaaggtaactgtgtggaattacttatgatcacaaaggcatctgtagcaaaggatcagtctttacaggagttgtcttctgagcctgggtatgaagggtctctaaactattttatgggaaatttaaatccctcgatcgaaacaaattatcataggagggaagaaaaagtaaatctcattaatggttaggtgtagtgggttaagtatttgcaaaagtcttggtcattttgaaaatggtaataccagtgcaatgagttctgaaatctgtagacatagtgtgtgtgtgtgtgtgtgtgtgtgtgtgtgtgtttctgaagaaaataaaaattttcacatctaaaataaaggctcagtttcctttggggtgccttagttcacagcagtatgacagctaaccagaaagctgccatactgtgattctgtttttatattatttaattagatgatttaaagattctctaaaaattctggtgcagcctttgtgttcctgggaggaatcttacataacttggagtcctagaatagaggaagagaacagtggtacccaggcctcgtttgctgttatggtttatgtcgcagacttgctaggtrtgacttccaacaacacaaacagaaggtgacaggttacaaaagagtagataaaattttttgctgacttttctcctggctacactctccctacttcctccccattaagagtaatgggagagttcctgaactaaagttgcattgtgtttccatgcagaaaaccaaagactccccgtaagctgagctgaggtaggcagggcatgaaaccgaagggctgcaggtttgtcatttgttgttaagagctgtggcatatttggccaaaggggctcattgtctacagccttctgtaagttattctgcaatattccattcaaaggaaaagcagccaagttctgtttccacctttctaaaggctttggtggttcctgtccattgggtgtgtgtcctgccctttgcctcactgtctcaataaagcatgtgaagaccagcttcctctccggtctggcggatctgttctcaggctgagcagagagtggcaaaggctgcatctgcgttgcttgctcctggcattgcctgcctgccagggcaccacacaagagctcgggcttacaggcacactttgggtgaagtcattcttccctgaaaactgagatgggaaatttatcctgacatgtcagaactgatgaagaaggctaagcaatggctacctgagcattagtcttgggagtgtgttctttcaagcacaggtttaggtttgcccttctattgtttcttctactaacacattatgaaggtagatttccactggaaaaaaaagaccagaatttgaaaatgtaatagagtgcatattcattattaagattataagaaagcctttgagaggatcaggcagtgagctgagaattatcactgaagtttaatttgtttattggatatctggatggaaaccagcaggactggccatgccctgttcctctttcacagccctgcttctgcccaaagggctcattcaaattctttttcattctttcagccctccacatatgyggagaactctcatattttccacattcctttcttctttggaatcctgctctaaggaaagaaataggtcttggtcacctataccttttacaccttactgtgaatgtcaggatagtgtataacctggatattgatactcctggggcatttgagtgttatcgtttactgtgagttagaagactttgacttctttaaaaaggaagtagaagccatgcttaaatgctttcaaaaacaaacctgcacagtttgtgctttgccctatttttgaatcatttgtattaatgctgtgacwttgtgagcacagtgtgtgtgagtcttgggagaagtgaggacctgcaaagttstggcttgccactaacctgcactgtggctttgggagtgtcagctccstgcatcactataaaatgagtaggttgtattaggtgatcaccagaggccstgctagacctgacagtccaaggataaagttgagtgctaaaggagcagkctgtgtagacagattgcaagtgtccaccagtggatggtcttggcacaacaaggctgcctcctcatggtctttggtcccaacaagttcaatataaaatggaggaaatgttataattttaagcwctgataccagggtttccttagggggagaattgcctttgtgtgggaaaataccgtgataagacatttggagtagattgtgaaacactgaagacattagtgtctgggaacctaagccaaaaaagagatgattaatcttttgtacacaagaaagtaaaaggaatttgtgctttgttcagccttatgcagaggtagaaaagaaaatagaggagaagagacaagagaggaaagagagagaaaatctggaaagatggcagaagactggatgctgtgtgtcctaaaagccttagtaagaaaggcttagagatattaggaactgtaatgtctaatgtgagatattaatttagtttactgtgtgttttgctctctagtttctgtgacttrcsaatctctaataactcaaaaatggtttttgagtgaattattttgtgaagactagggaaggcaatgaggatttttttttgcctagattaattggaaacagcttgtatggaaataaaatattacaggcagaggtgactagaaaacatagccccacccagaaaactgtagacgtcttagtgagaggtttgcatctccactggacatgcagtttggaggtctctagccaatgtcgtctagatcttccagggctggtcaggtgggaggttcccaaatgacatttttttttttcataataaaataattttattgatcattcttgggtgtttctcgcagagggggatttggcagggtcacaggacaatagtggagggaaggtcagcagataaacaagtgaacaaaggtctctggttttcctaggcagaggaccctgcggccttccgcagtgtttgtgtccctgggtacttgagattagggagtggtgatgactcttaacgagcatgctgccttcaagcatctgtttaacaaagcacatcttgcaccacccttaatccattcaaccctgagtggacacagcacatgtttcagagagcacagggttgggggtaaggtcacagatcaacaggatcccaaggcagaagaatttttcttagtacagaacaaaatgaaaagtctcccatgtctacctctttctacacagacacggcaaccatctgatttctcaatcttttccccacctttcccccctttctattccacaaaaccgccgttgtcatcatggccccttctcaatgagctgttgagtacacctcccagacggggtggtggccgggcagaggggctcctcacttyccagtaggggcggccgggcagaggcgcccctcacctcccggatggggaggctggccgggctgggggctgacccccccacctccctcccggacggggcggctggccgggcggggggctgacactcccacctccctcccggacagggcggctggccgggcagaggggctcctctcttcccagtaggggcggccgggcagaggcgcccctcacctcccggacggggcggctggccgggcggggggctgacccccccacctccttcctggacagggcggctggccgggcagaggggctcctcacttcccagtaggggcggccgggcagaggcgcccctcacctcccggacggggsggctggccgggcggggggctgacccccccacctccttcccggactgggcggctggccgggcggggggctaaccccccgacctcccttccggacggggcggctggccgggcggggggctaacctccccacctcccttccagatggggcggctggccgggcggggtattgacccccacctccctcccggacggggtggctgccgggcggagacgctcctcacttcccagacggtgtggctgccgcgcggaggggctcctcacttctcagacggggcggttgctgggcggaggggctcctcacttctcagatggggcggttgccaggcagagggtctcctcacttctcagacggggcggccgggcagagacgctcctcacatcccagacggggcggcagggcagaggcgctccccacatctcagacgatgggcggccgggcagagatgctcctcacttcctagatgggttgrtggcggggcagagacgctcctcactttccagactgggcagccaggcagagaggctcctcacatcccasacgatgggcggccaggcagagatgctcctcacttcccagacggggtggcggccgggcagaggctgcaatctcggcactttggggggccaaggcaggcagctgggaggtagaggttgtagcgagccgagatcacgccactgcactccagcctgggcaccattgagcactgagtgaacacaactccgtctgccatcccggcacctcgggaggccgaggctggcggatcactcgcggttaggagctggagaccagcccggccaacacagcgaaaccccgtctccaccaaaaaaaatacgaaaaccagtcaggcgtggcggcgcgcgcctgcaatcgcaggcactcggcaggctgaggcaggagaatcaggcagggaggttgcagtgagccgagatggcagcagtacagtccagcttccgctcggcatcagagggagaccgtggggagacgggagagggagggggagggggagggggagggggaggccaaatggcattgttatggggtcttatctgcaaacgcagaactccattatgttttaatgatggatgagccatttttacaaatttgcaagattctagaagaaagaacaatctggaatgtgttcttacatacttttttttggtttattttgtttttctgtttttttttttccaagatggacactcagtgtgaatgttcttatgtactgttgattgtacctctaagatgatgtaatgacctcatctcatctagctgtcaacaatggcccccttttggccagaggttatttgactgcttcagagagatctggaaaacacaatttcttagttttatctgtggccaattgtacctctgtaatggctgttttgtccaccattgttttctgggatttctgaggaaaattctgagacaagtaactcctttgtttgtggaagttagttttggaaattacaaatgaagtatctttttttttttgagatggagtttcgctcttgtcacccagctggagtgcaatggcatgatcttggctcactgcaaccccacctcccgggttcaagcaattctcctgcctcaacctcctgagtagctgggattacaggcgcctgccaccacgcccggctaattttttttttttttttttttttggtatttttagtagagacggagtctcgccatgttggccaggctggtcttgaactgctgacttcaggtgatccacccgcctcggcctcccaacgtgctgggattacagacatgagtcactgtgctcagccagacaaatgaaatttctatcctaaaacagcatgcattacctaatcccaggtggttaaaaaaatgtatatatatttaatggttgctctgaaaaaatatagacagcatgggttccaaaatattaactatagtaaggagtcccatcatggttttcatagcatcctatcctgtacttgtacttgtatgttgttgcatttataaagattgaaattcattactaatgtagttggttatcagtttctttcctagaacagggagcacctgtcctgaaccaggtccagggtagtgtacatgacacctcagcaatagagtgattttctctagttttacagtttctacagtgaacatattatttttcctaattacaaaatataaatctctttaaaatgacgcatgcataattaggtactcagtattacttttaggaaattatatttgtgcaactgaagaaaagacctacatgggaagaactagaatggaaaggaacaggttgagggatgtatataaatggtaggtttctcactttgggaggccaaggtgagcgaatcatttgaggtcaggagttcgagaccagcctggccaacgtggtgaaaccccatctgtactaaaaatacagaaattagccaggcatggtggcttatgccagcacatgcctgtgatcacagctacttgggaggctgaggcgggagaatcgcttgaaccggggaggcagaggttgcagtgagctgagattgcaccaccaaactccagcctgggcaaagagtgagaccttgtctcaaaaaaaaaaaaaaaaagaaaaagaaaaaaaaggtaggtttctgctcttggatctaagtgctcgattgtagagaagatatcataaagagagtccaaagtgtgagttcatacccacaatagccagtaattgacatggcagctttgttttgccttcacttaaaatactggcatggtgtgtattttgttgtctgtccttcagaattggattttgttttttcaaggagaaaaatagatgagactgctactataggatcccttgttagatatattacatttcaggatatatttccaggcacttcgtggtggaaatctggctctcggagcttaggcttggttttgggatattttctgcatgtcagtatatttcagtatgcctctaagtaaaccaagtagctcctcctccccctcaacacctggtatgattcatgactgatttgggtagctgtaatttttctaatgtcagttagaagggaaagaatttaaatttactacatgccaatcatattccaaagccatacttagtattaaaaccacagaaggagtcatttacatttaacaggagctgtgggtcttaagcaatgatcatttggtaatgtatgttttgattttaggttaaaaagaaccttgatattgtgggatttctggttttcagatgagtggctagtagcctgtttttagaaagacattggggatgggaacatgtatttggcttctttgagtacagaaattctgcttcttggtggaccacagtttgactttgttttcggggttaccttggtgtaacaaagcatcccttatgccttcagggctgtccttaccacccatcacctgccaattggttcctgtctatgtcagtgttttgaatcagaatatgaggtgtgaaaaatacttcattcgattttagaccactcctaccttttgggtagtattacatttgaaagtttaggatttggccttgttcacttgtttatatttttactctaaaataggtgttaaatatattttgagcatttactgttgcagggcactgtactaggtactatggaattacatacaaactggagagataggctctgctctcattaagcttgttgtatgataggaaagaaggaaaacaacaatgaaaaagctacatagccctttcattgcagagtggtcagtgctatggtgtggacagagtgtcctgagggagtctaagtggaagataagttgagggagaagtggatagagagtgtgtgtgaccttatgcaaaggcactggagtaaaaaggtgcatctgtcattgaagagaatgaaaaaaaaagttcagggacaggagctcagtgagggaaggtgagtatgcccagaccatgaagtctcctgggctacagtgaggactttggactctatgagctaggagtgttctgcccacttaaaaaaagacatgtaggggacacacattattttatttgcctgaagcttgaccacctctcctttagctcccttccgcattctggaaaatgcttctccatttctstagctccatggttaccatggaggcagccacrttgttttaagctactctgtgtcccaaccacagatgattgatccagggattttatttgattccttgggggtgttggaattggattataaagtgaagagctgttggagaccaagttctgtcaagcagcctaaagagcagagatggaagaatgaagcaagaccacagagagtatttaaagtaaaatctggctgggtgcggtggctcacacctgtaatcccagaactttgggaggccaaggtgggaggattacatgagaccaggaattccagaccagccttgccaacatggcaaaaccccgtctatactaaaaaatacaaaaattagccgggcctggtggcrtgtgcctgtaatccyagctactcaggaggctgaggcagaattgcttgaacctgggaagtggaggttgcagtgagccaagatcttgccactgcactccagcctgggtggcaaagtgagactctgtctaaaaaaataaatgaataaaaataaaataaagtaaaatcaagcagagataggatattcctgggctctccacatgctccaggcactggttccagacctttccaacatgaatcctagtcttgggttctataatataacagtattcccctaaaaagttttctgtccccactttctgtttatactagccacaattagtttctgtcactaatgtaaaattattttctctatatgtgcaggtatttgtagatatttataataattttgctttagggcaatcttcggattgtaaatgggccttaaagcttcttaattcatggaaagtcaattatcctctagtttagtttgaggatacaaagggacaggagaagttaagctcatctcatatttcccaagaatgtaaatgtgatgaaagggaactttgcagtctaagcaaaaacacttggacaagataacttacggacttgagtgtaaaaacttaagaagtgaactttcacttgtagcagttctctctgatgtgagtcttgctagtccactcaggttttatttcttttagaaggtgatgcaaacagcaatattattagcttaaacctaaaatgtggtttatttaatgtaaccatgaccaactgcattttcataattctgtctttgctgcattatcagctggcagggttattcacgctggactagctctgagcctgctaattcaaataaacagtccttgccaaccactgctgagctttgagaaggtctaggctaaagatgggcaaattaaagacaattccacactgtggtaagataatcaactactctgattacctagtaactaasctaattgggaagcagtgtagtatatgggataagagcaggctgtgtggattcagacctgtgtgggaattccacctctgctgtctacatgctagatgacttcaagcaagttccctgrtctttctgaatctcagttttcctgttgataaaatgaggtaataatagtacctacttcgtgggactattatgatttagtaaaataatatttataagacacagtaagttcttttttttattattactttaagttctgggatacatgtgcagaatgtgcaggtttattacataggtatacatgtgccatggtggtttgytgcacctgtcagcccatcatctaggttttaagccctgcatgygttagttatttgtcctaatgctctccctccccttgcccccgactccctgacgggccccggtgtgtgatgttcccctccctgtgcccatgtgttctcattgtccaaatcccccttatgaatgagaacatgcggtgttgggttttctgttccaagacacagtaagttcttaagtattagcattattatggatattattttgtaaagcagttaccataatgcctagaatttgataaatgctatttgctcttttaccttaaaaatgtacctatccatatctttgaaacttcagtaagtaaatgtcttccctgatttacctgcctttgggcagcaggttaagaatccctgacataaactgaccttctcattttatagacagaaattgcaaccccaaagagtagcaatttttcagggttgggcagagctggtctggagcttaggggtctgtctcctaattcagtgctttacccactacactgcctatttcaagtgcagatgacctagggcattctttggctgcatcaatatgtataaagagacacatgatgcttgcaaaaggtacagttagagacttttacaaacccccaaacttgtggatatggaaatgcttatatactccttatttttccccaaatcatatttctataaggattctcatttcctgtgcacattccttttttatgtgaatacagttttcctgaagtatcttcccttgcttgatggcaattttttctttttgaggtggagtctcactctgtcgcccaggccggagtgcagtggtacgatcttggctcactgcaacctctgtctcccgggttcaagcaattctcttgcctcagcctcctgagtagctgggattacaggcgtgcgccaccatgcccagctaatttttgtatttttagtagagacggggtttcaccatgttggtcaggctggtctcgatctcctgaccttgtgatccacccaccacgacctcccaaagtgctgggattaccagygtgagccactgcacctggccgatggcaartttttacaaggaacctgagtttgtagtcacttcacaggcattacaaggacaagggaggaatctccaagttttattgccagaaagatgctgggcccttgggacctacatagctattctaaacactggatacatcaaccacagaatccaagtttgcatctcagtgaaatttcacactagaacatattctttggaattcctcgtgaataattgaaacaatgattgttaagtcctttaatgctaaatatttactctataatggtcccattctactggacattggtcagactgccrtgttccattgagggtcgtatttaagagagctgtggccaaacctaagttcacataacagcatgcagtgaggatggaaaggagttctaggagttgagttatgtgagggatggtgtatttggcctgcatgggagatgaagaggagtaataaaaggcaccatcaaatattttaagtctgtcaggggaggagggattttatttactctatcatactggatatttcagagaggcatattttaggctgtttattttaaaaagttaggtgaaacttgaacaacaatagtaactataacaattaagtcttccagttattgagcatttagtgagtacagagtcctatgctaggtgccctccagggattgtaatccctgttttatagatgatgaaactgggattcaaataggtttgggaattggtccttaactggcaggtccgtrggactgtaaagcctcaggaagagcaattgcctccatcacagaaagcataagaggttgtaggaagaatagattctgtgggcacaggcctgccttgtattccactctacccggagtgcccagcactgggcctggcctctgccagtggtcagcaaatggatgtgcaatggacacatgaacagactctgcatttggtgggagctttgaattctctgactggacttgaaggaccttccaaagtcactgaccatttagatggaaataaaatatacatccccatcacttggctgttaaatataagctcgtcacagttaaagtctggcaaggctggactgggggaacagtggcagttcctgagagtgctgagggtgggattttccttacagttctattaattggatgtgtccagagtgatctcgtgtttccttgagaattgtggccacatactgccctaagtgctgctctctgcattttgtggcagttgatgggatatgatgagtttgtggggacaaaagactttaaaaggtctctgtgagaaatgactcctattgcctttgggtgagaggccaatttatcagaatagcaaatgccttatgttagtggcatactttgaacacttgccatagaatgtctcctttgatccttgatagataaagaagatataacccccattttgcagaagacactgaagctcagagaaattataggamttgctcaaggtcacatgaaattccaatctttctctgagctccagggtcagttatcacctgcctacttgataactccacttggatagctaatgggcacctcaaatccagcacgacctaaacagagstcccaactcctgctctttctctgaagagcactgatgctctctgtttcagtaaatggcatcccagggaacccaggtacattagtcctattgctgctgcaacaaattaccaccgacataaaagctgtacaaatttatgatttcacacttctggaggccagaaatctaatgtggrtcagctgggctgcawtgcttctggagtcttcagaggaaactgttgtcttgccttttccagctcctagaggcttctgatattccttggcaagtggcttgcattactctgacctctgctttcatcatcacatctccttctctgactctggccctcctttctgactctgcttccagctttcccttatagggatccctggaattacaatgaggttcacctagatattccaggacaatccccccatctcaagatctttaatttcatcacatctgcaaagtccctttggcatggaaagtaacatattcacagrttttggagattaggatgttggcattttgtgggccaatcttctgcttactacaagggatcacccgttgttctttcatccagtccatcagcaagccctgctgggatctccaccaccaccaccttacctgccaccctcactcacctgggctatttaagccaaaacatcccatctcatctccctgcttccagccttgcctccccactgtctgttctctgtatagcagcacattaaaaatgtgggtcaggccaggcatggtggctcacgcctgtaatcccagcactttgggaggctgaggcgggcagatcatgagatcaggagatcaagaccatcctggctaacacggtgaaaccccatctctactaaaaatacaaaaaattagctgggcatggtgatgggygcctgtaatcccagctactctggaggctgtggcaggagaatggcatgaacctgggaggcggagctagcagtgagccgagattgcgccactgtactccagcctgggcaacagagccagactccatctcaaaaaacaaaaaaaatgtgggtcagatcacaccactgccctgcacacaaaccctccaggaggtttatatcatactcagaaaaaatgtacctgtattccttctaatagttctgggccttactgtctgcccttattggccttacatttctgagctcctctcttccactctccgcctcactcacgctgttccagccctcttgccgtttaaccatacctggaacatgcctggaatgttcttcccttagacatctgcatggctccctccctcccttctttcatgtctctgcctaaatttagctctgcagggctgtcttccatgtcaccctgcctgacctgacactgttttattttcccatccaagcacttggcacgactgaccatgtattgtgtatatagtgcttgtaagtgtatcatctacctttctccctcagagggtagttccatgagggcagataatttgcattttctcagaaactggaatgattacttgcgcatagtaagagctcaatgagtatgtagaggaaacctgaagtttaaatctaggtcttctggttctgggtagaatgtgctcttctctcccccatgcgttatcttcataggtggttaaagaaaagtatgattttgtaatatcagcgaagtgtttgttttcctaacaccttccaaaatatcagtcagcacaggtcaaacatgcccctatgtctgctcagaggcaggcaggtgaacaagtgaacrgctctctctctctcaagccaatgaagagccgtccactctctggcaaagcactgagctatttgctgagagtttcccaaggtgaaccgaagactccttgaaagcctccttcactggctatgcaccacttgtaattatgtgcacacattttgtaaccctttcatgagaggtgggatcgtgcatatagtgtttgcatatcccagaattgctccctgaccagcacagctttttgggtaagttwaatatgggggtgattatgcttgagaatgttcactggaccacaaggcacctcccatattctggagatgtgtgtgagctgcaaaaggggtacgtgagctccaggaacaggtagcatcatttccatcagctcagccagactctgttgtgcatatgcggcatgctgrggattgagacgagagctacagacacaaagctcaaacagctccagttgttgctctggaggagcttgtagtctgcgtcagtgctacttagagtggggtctgtggaccagcagtatcagcatcacctggacatttattagaaatgcagaatctcaggactcaccccagatctcttgaatccagatctgcattttaacaagatgtccagtgattcctctgcacattaatgtttaagaagttttgctggctgggcacggtggctcatgcctgtaatcccagcactttggaaggccgaggcaggtggatcacctgaggtcaggagttcgagaccagcctggccaacagggtgaaaccccgtctctactaaaaatacaaaaattagctgggcatggtggcagacgcctgtaatcccatctaccagctactcgggaggctgagacagcagaattgcttggacccgggaggcagaggttgcactgagccgagattatgccattgcactccagcctgggtgacagagcgaggctccatctcaaaaaaaaaaaaaaaaaagctttgctatagggaaagtgacaaacacataagcagataattactgtgcacaatgagattgtgttaagaatgggaagagtaggaagcacagctgcccagagaggagcgtccactctaagtgagtgtgtgagtgcattttttgtgtgtggccagtaagggggtaggtatagtgcttggtcaggaatagctggcagaatgaggtcatagctgaggtaatgtttgaaggaaggagtaaatattttaataatagtaatcatagctttcacctatcgaatactgaataatagtgtaacaaataatagtaaacacaagtagyycttagcatgctccaggcccaggcctactcattttaattttttttttttttttttttttttttgagacagggtctcactctgtcacccaggctggagtgcatgatctcggctcactgcaacctccacctcccaggttcaagcagttctcatgactcagcctcccaaatagctgggattacaagcacataccatgacgcctggctaatttttgtattttttggtagtgataggttttcaccatgctggccaggctggtctccaactcttgacctcaagtgatccrcccacctcagcttcccaaagtgttgggattacaggcatgagccaccatgcccggcctcattttaatttggaatgcatttgttttaaaacattaactcattttaatctttacatgtctaaaaatgaaaagaaaagaaaaggggcacgcagaatttagtggaactcccgactacgattgctggagtgccaggtgagccccagctgggcaattcaattcatctcgtgcctgcccttcctctttggggagactgccttgctgctgatgaaatggaggtagagagctrtgaagctgagtcccgttagcatccccgtgatgaasaaatcatgcgcattctttcaaggtgatgtgaagagatgactaaaaggttttgaaaagttccagatagaaatcttcttagatggcattgactgggctggggaggggcctgtttctgtgggtgagttgcagtcctccctacctgaccttgcgcaatgtagtctgtccctggttggggatgtgccgcactccaccgactgcatattaaaaagctgtattgacttattcctaacagggaactggctctgatttccatttcacagcagctgtcatctgctctactcttcagcaacaaacacggggtcagcctggccccaacttttttccctcttgtgatagtgttaaaaagctccctaactgtcccagtctttctttatgtggatttgatattctgtctgctacctaggcctttcagagacctccttttgatcatctatttcttcaggggtttttattgttgaaataaaacttgggggtaaaatatttgtatacaactattaatcttcattgtccaatatggtagctactagctgtatgtggctctattgagaacttgaaatgtggagcatctgaaccagatgtgctacaagagtaagatacacaccagattacaaaagacttgattaaaaaatgcaaaatatcccattactaacaagaaggtaaaatagctcattaataatttttatattawctagtgaatattttggatctattgggttaagaaaatatatcaaatttaatttcacttgtttytctttactttttgttaatgtaactactagaaaatttaaagtttcctatgtggcatgtgtttgtagcttgcattacatgtctctggggcagcctctctctaaacccatttgaccaggagcagccaacaaggtttccatctgctggaatccatatttagagtcaaaggtcagtcagtttaattccacacatgggatttttccctcaccccctcctccttacctgttccctggacctccttatcggatcttgttcaggttttgggcactgcacctattgattgatccctcagtggctgctggttggctctttgtcccaccttcaccatcatctggtctttctgggactcctcagcaggstcctctgggtgggctagccctaaatgtgagtgatcctcacagttctgacccctcctccacctctctcccctctgctcctcttccctggtttgggactcagattcacattgaaccttttttaactggcagggcaagcctctgtggtccatctggaaagaaccacaaagcatcctttgtcatcctgttttagtatctagaatacactctgaagatcagaagcagtctctctgtacaagacatgtgtttcccatcagcagacagcagactcttttgtagctgggttcaaaatctttgttgttgacygcttctggcatcttagcttttgtgaatctggggtgataccttttggtttccctgccttttctttaacaccagatctccttcatcctgatgcatttttaaacaccagtcaggatatgccatttatgttcatgctaaagtcttcactgacactcaccacaccaatctacttttattcccagttactatgttagaatcctatttagatagatggagccaattgagcgggccctgcagaaagccatattcagttagtgtaaatcttcctgctggtgttggagacagcaaggtcccctgggattctgtctggaaatcttattggattttcaagacttaagttaatatagagaccccccaagatagtatagggcctcatttctttgccttgaaagatgtttttagaggtctgtctcaagagtctcgctgataaggaagttacttcaaatatttcaagagaaacaaccacaaagagtcttctattttctcaatattttttctctccctgcccgtccatctttttagtattttttaaatgcctgccctctatatttatttccctctttctctcatgcactcattaaccttaggcccctgtttcaaatggaattaattagtaaccataaaacttggtaagtgatggccttaagggaaaagtctttctttcttctttctttctttcttttccctccctccctccctcctgcctttccttccttccttccttccttccttcctttkttccttccttcctctctctctgtctcgctctctttcatgacgaatgaatataccttgtagacataagtgaatacatttcatgatactgtacttttttcttttcttaatcaagtgaacatcttccttagtgacatatagggtactgtctcctgacttttgctctgagacgcagcactcagcagaacagagtgtgggctttggattcagagccataagtttgagtcccagctctccctttatgctgggcaaacagtgtcgctcttctgcagttccattcccatgttagtaatataggcacgaccatttctgccttgccataytgtgttcagaactaaaggtgattgtgcatgtaaagtgcctcactcccagtgggctttcaggcatccccaggtgctgcgttttattcagttaaaaaagtcaaaggaagagtctaaacacctcccaccagggtcgttgataaatatcttgtctcagccttcttgagtccagcaaggatgtgaatgtcawaccttcagtaaactagattttgtacttctagaagacttttattaggcacataagaaaatgatgctaacaaagttcaaagttgctccgtgttgcagtgatcttttaaaagggaagttttgaggtagttttgaagcagatttctggaatcatcttcaggactttcgtgagctcattgtaatgtgttatgtgaaatgcatgtcctcaaaacatgggtggttgtataaaygaggaagctggcctcatggagccaaagcagcatggaaaggcccaaataacttgctgtggggaagactgactgcctctggggtttttaatcagcatgaaaagccacccagggccccaaatcattagtagcattttaattggcagcagagtaatactgtgtctactttggcttamagatataaatttcctgctctctcataacagatggtgatgaggtgcatggtaggaagcatggcaagaactgtgttactcaaaatgtagacttaattgcaaatttgaaatggaaataaagtgaaggttctgtctttatttacaataaatttcatgtgttaaatggacttgtctaattcttctattttaccatgcgattgaataataaacatttattatgtgcttctggcatgcactgtgttaaatattttacatggattatgtcatggatctcttgccatgatcctgaggaaagtattattgctgcttttagtagcatcgaatgttggaataaagtctgcaggggcagctggtaatatgtcagcaatgtctgtcttctgagatgagacagtgataaaagggctgactgcccacctagggaggcagtctcatctctcattagtgccaggagccatagaatgtgagcctggaggctctcaccaccaggtaggtgaccctgtgcacaccctcccattgctctcatcacattagaatagcatctgcagtctttactctcacctttaaggccctgcatgacccagcttcatcttctgctattctccctatgttctttttccttcctctgcttgatgttcctatgtagcagttattcctacctgagattatgttatgtgtcaaacaggaagatcaggctgccaatcccaggtggggattatcaacctgtggaggatggcaaagagtataacaccaccaatcaygagaagtcggagcccattgaccttggcccctgcattgcctatgggcttggaatccccaaggagacctcagcatacaaggtgcttgttggaacaatgctttattcacagaaaggagaaaaggcacagcaagatcagcatctgcagcacgtgccagtctcccatggttagcagaactctccagataaagtggaagactgtacccaggctgctctactgcaggagaacaccccgttccctcctcaaggggagcagatatacaagtggactggccaaatgccatatgatgaatacacttaagcggtagcagaaagttgtgtctccagaacaaggaaaaacttctcccagtgaggaagaagaatctaggagccagtggcaactccagatgagggaagtttcctggtccaggccactgactgggcaatcctggggagggatgacaggctgagcaatggctgcttccccgacagcacatccccagaccttcatcaagatgccaggacaaaaacctcaggcatgtcacacccaacagaacaaacagctcccccaaatatggagtgcttccatagtcaccaccgaagatggaggtgttttcagcatggtcctagaatgagtctcatggctccctgcccaactgagatagcactttgtcagggccagtccaagaaagatgatcaggcctccctggttctcagccctgagccccaggtgctgggatttagtcagttaaaaaagtcaaaggaagagtctagtggatacacaggtttacagacaacagccaccctgtttgaaggtagattgcttttcctgaatacttgatgtacacacagcaagatacgttggcaatagcatggactctgccctggagagtcacccaggccatctgtcctaacccaagggctaccacctctgcaggaacacattgctcttgctgtttccccaaacctctctgccctgatcatccaatcgaggcagtgaggttatggcttgtacaaattttgcgtgtcctataacatcaccsacctgtacaggggagttgggagttcctgatgctaccagggggattttggtattgtggtgttttatgaccctctcctttcctgtggggtcccaaggaggtgaacaacctagggcagcataacttccaagttagagtaagggatgggcgtccctgtcaggcactaccactgcagggaccacagaccactccgggcacagtgttccagaaggagaaactaaaggagtggttgggtacacagattgggatgcctcagtcacagcctaatcaggtgactgcctgctcctctacccctgccaaactcaggattctccagtgtggatttcagtgccgtttccctttgtctggagtgcagtgtcaagagtccaaatggccccagtgaggtgagggtatcaccctgttaacaatccttctttacgtcccttctttaactgttgatttagtcttccattccactgttctgtggctctcttagcttatgggtggtgtgaatgtgggaggtgcagcatatgccatgggattgtgtccattgttttgtggcttgtgctatcaaagaagtgccctgatttgattggaattcagtagggtacccaaactcatggcaaagattttttttccagggcaactatggtggtaccagcattcacatrcagcacagagatgacagttctaaaccttaagtaggtgtcagctgctgtgaggcaccagaagaatccatggccgggtgttaaagatccagtgtgatccatctgccaaacgagcctgctgatacccctcacgataggtcatcattctcgtcatactgtttgggctgattggtgggaattgcactgcattcttggyttctgtgtcttctcggattacacccatggatttggcccattcctgcatttgagatgggattccatgactggttcattaaggcacccagcgtgtggcccttccaacttgttttggacaggctctgataccttaggaattccccttgtgttcttatttaagaggcactttgctgggagcatatacatgagtgataaagatttgcctatttcatgcagcaaacttgccatagtccctgttcccacacagatttttaatagttcagtcrtgtagttgccagtctcctgacgaaatggctagaccaccacccaggaattggcaaagatgtagcaaggtgtgtggggtagggtggcttgtacaccattaccaccacatgaaattcagccccgtgggctaattgttctcttccagtttcaggtaagaatggctctccatggggtgggtggctgtgggggcacagtggactccatcaactcattttgcagaagcctgggtaaactaggccatgccttcagctagaacctcttcaacatggcccaggtgactagggaagggaccagcactgtgctccctctggcagggtggccacytgctcatgtagttgaccccttggggtcctggcctggctcagtcttagatgtaacatttccatttgatgatggaaccctcctgggcttttccagttttattagtgagattggtgaggacccaagtaaggatgagcacttgaggcctcagaaccacataatgtgctttggtagtgagatgttcagtctccaccagagcccaatagcaagcaagaagctgcctatgaagggtgtgtattgggcagcagcttcaggcagcttgtgtgtccagaatcgcagaggttgcaccccgctcagaggtggttttctgctgctactgactcagcatgttgggtgctgtggacatttgaagtttcatgcaggctccaaatatcccactcagagtcagggcctgggccatggcttgttgaatagttttcactgctcattgctgagaagtgccccatttgaaggttgctgtcttttgtgccaccttgacaagggggccagaaggatacccagatggggtatgtgttgtctccagtgtctgaacagatccaccagctgctgtgcttctattttatcagtgggagagccaggggctgtaacttctatttaaccttctccgtaatactctgttgattttatgctcagatgtccctgagaaactgtacttgttgggtgggtccttgaatcttatctggatttatggcccaactggtgttagtcctcgcattggtgatcgagcgaaaagccaaggccacttgttcttcagtgggatccacaaagaagatgccatctattaaacctgacttgggcttgctgtaaatcaagccctacccattgctgacaaatggcagggtcatgaagggacccctgagggaagacggaaaaagtgtattacaagccattccacaggatgcacattgatcctggtcttcttgcccctgggaaattgagaaaaaggcattggccaagtccrtgacagcataccagtctccagaataagctgccaccgactcagaaaaacgggatgatcgccagcactcaggggccaaggcatttggcctgcaatagtccaagccagcctctggggcacggaggctgatgtagtctctcagtctccctgtgttggtgacctttttgaccaggatattaaattgtgacaaagttgtttgatgcactcctgcttgcaccaggtaatttattcttgtattaaaagagtaatgtctttctttccacaatggataggggcttgggcaattctggaaggaggaagaggaggagtgtatttggcccacatggcttaaatattgctctgggtaggtgcagtgcatattcctgcaggtgaccctggttttcagtgtcatggctaccaaaatgtcattacccatagcacatgatgcaaggggtaccatgatcattgctgccgaaatggtcttgcccataagtacatgtttatttgttttctatgggctaccatgccctccccaaaaacacacaatgccaccattccactcctcccttgtgggggcttggtataataatcactaagcaacagtgtctcatagccccatgcttgttttcatactctcccccacttccatatttcccgtccacccccacagggcacagagctgcaggtcactgtgggagcgtggagcctttggccctaccccaatcattctttttaaaaggagtcagaatataggtagcacagctcctcctctttatctgagtctagctcataattggaaccaccattttcctcactatctgagctgggtattgggaaactccagcagcagcttgccttccctccagtggggaggaggggggagtatctgaatcttcaggggggcaatccaagactcaaaatccttccaatccggtgagctcccctcttcctgttccttaatggkctgcatgaggtccttcatctctaatttagggggttctctttcctctttatgtgtggacaaaggtcttcagtggagactgyctatctgagtcttatctatcctttgtttagaagccacaaccacattgcactgcacacgagtcctgcccctctgattgtctcccttttgggcccttggaggaccacttgtagaggtctctactgctcaggtctcatccacagctacagtggcttccaccttgcagctccctccatcagatgatgggacatggcagagatgcgtctccaccacctcgctcattgtcatcccagggayagaagaagggacaaggaagtcttccattgtgggggatcctgcctcttaaaggcctctagggctgtacaagataggacagcttcatctacgtcctgtctgggggagggtcatacagccaggtgtcaatggcctttatcttaatggccataatggttttctgaaccattttccagggagccttgcttccaagaaattcccctacagtagcatacactgtgattatgcttccagtcacccaaaactaatagtggcatcagtttgtctcggtcaggtcctgttagttattctctgtgatgtaggtgaaaatatgctatagtagggggatgggttgtcaacttccccaaactacatctttctgctggagtcacttgggtctgcaaggccccctcatycatcaggcacaccaaccaggtagcttgggactctcctggcctctgcccacatctattctttaatttccttatcttgctgccagaaattgagcacatttccatggtttcatcttcagggacaccattagtcctttggcattgttggaaaatggatctcatctgcctgtggctgcagagcctcactggttggagctctgtcctaggggccttcagtctgcattggagctcctaattgttgagccatcggtgtatcagcagtmaagtggccagcagtcaagggatagttttcctgctcgtcttatatctccgccatgggttccaccccctgtctctccaccatatgacccattggcccaagtcatcccagtctaagggaagatttggtaaatctcatttgtccacctatatccagagagtggccaaaatttctgccagctggttacccgctggagagctggggacagaaacataagcccttgcttttggtgagaccgcagtaagtatctttggcaaacctgctgacttccagaaactgtgcagcaggaagatccagctgctgatctcaggggaggattccattcatgtgtaggacagcagagagcatatattgttgacttccaggaggaggatcccacagacttttgctcactgcatcttctacaggtttggagtcaccaagaaggactccatgcacaagggctggttggaaaaacactctacttacagaatgacaagaagatgagcccctcccgataaccaatgcagggtgatagcctgcatgcagccctttaggttacaggcaacgaccccaatcccagcactccatctagtcatatagataagtggagctgtccaggagccattgacacatgtttaagcagtacaaggaaattcaccgtatacccagaacagagaaatatttatccaaataaggaagaagactctgaggccaaggaatagctggacacctggcttctaaattagggaatgtcccaggcccagggcactgattaggcaatcctgtggaatggcggacaggtcacaagatggctgcttcctcagcattatacactgtatgtttatttcttttcttcccctatacattctccagaaggcaggtgctttgctcacagctgtatccttactcattgaaactgagtaatgtctggcttatagttggcactttccatataaattgttgactgaattgagaatgagtaaatgcccttcaccttttccaggcctgaagctcctagtctatgagatgagggcactggacagatgacaccggagttatcctccagctctaacattctgtcactgccatgctgtggaggggtgtcacacatcagccagtggtttaaccatgggttaggagacaggtcagagacaggattgggctttttcctgctcagttttcagatgtcccttttccctcatcttttcttccctgtgagtcccttaggtgtgagcccctctagaggtggccactgcttgtttcctgtttgtgccctcctgacaaaaggtgcagcacctgaactcctgcatgggtagtgttttaccagctctggggcaatggctcttgccttgtgtctgtgtcatgaaaagcactgtcttcagacagactgtctctttcaagaacgctcaggctaagtaacyacctgttactaaaactataacattttgccattataaaagtaatactttctggccaggtgcggtggctcacgcctgtaatcccagcactttgggaggccgaggcaggcagatcacctgaggtcaggagttcgagaccagcctggccaacatggtaaaaccctatctctactaaaaatacaaaattagccaggcgtggtggcatgcacctgtaatcccagctacttggagggctgaggcaggagaatcacttgaacccaggaggcaaaggtygcagtgagccaagatcgcaccactgaactctagcctgggcaatagagcgagactctgctcaaaaaaaaaaaaggaatactttcttcttaaaagtaaatttggaaaataataaaaaacttgctaatatgccctccatacaaatgtagcatggctaagatttagaggatttgttcctactctgttttatgtttgtttgctttattgcacaaagtagtgttttgcatttgtgttaatctatatttttttaacttagtatgtaagtatgttccatgttgttgtgtgacttgctttaaaaatgaaccaaatattgaacatctactgatatgatggaaactgaattgggtatttttacataaattagctcatttactgcagcactctagtgaggtggacattattatccctattttgcagttgaggaaacttaaggctcagactgtttcacctaytcagatcaaatagctaataaggaccaaagtcaaaattcaytggacatggggctgacttgaaaagcctgtgttcttttgggtatgcattttamtggctaccaaatatcccatctatcatgccatgttgtgacgcaaatcgaacatcaggtgaggggccccatagtggagctacctgtcacccaagataggatttctcctttcaggcaacttcttcaaagcctaattcagcacacagacatcaggtagaaaggtgattatttcctgcctggataggtttccacccatgcggctctcctatactcttaggtgtacattattgattccaggagtcatatgtgtccctatctgtgttgtgggtaaggagccccacagtcttttctcttgaaagacttggctctggctcagctgtgccttgaatctgtgattctgtcgcataccccaggcttttctgctcaggatggggcccttttgagaccaggtctttggtgcttgctcatgtgcagtctggaatcagctgcacagggctgggaagctgcaccgcccacctctaacaggctcacagcagaattcttaacacaggtgctttattttagaagtttatactcttcattgtaaatagctaataaaaagcgacagctacagcccatttataaatgcacttccagaaaccaaattcaaagggtttactaaatggcaggaacctggtcaacagctgttttaaatgcatttatttctgtcgggaggcaaatgttctacaaaatagctttgttgtcaatagtctctttgttctttgatgtacagcttacaaataaatgcatttataggaactgctaatgtgtgagggttttgatattagtgctaaatttgcaatctataatatatcatctagtcatctttgacaaactcaattktaatctaattaagtggcgtcttctgtgattctgagtagagatccctaaggtaattctatcctacttggttttcacaggagaaaaaaaaaatccctaagagtactgttcaacaaagtgtgtgtatgtgtgtgtgtgtgcataaaatattccttttagatgagcaaagccaagaagatacctagtaataaatagctttcacagttggttaaatatcagaactggggaggcatttgaccccgaaatcatatggcatctctagagcatggcaactctgggaaactgattgttgcttaaagaaagtttaaagtatttgggaagtaatttctcttttatttttactccctyaggaagatttggatttgcagcctttatcactaacttggtgagaatttttttgtaaagttgtcaaatctataggcctcagaaatggcagttctcatacaaatcccagtaacgatgctaayatcattcatccagtgycagtcaatcctaggtgcttgaaaaacatctcatttagtctttacaatagcttatgargttgatacttttgtctcagtctttaaataagaaagccaaaactcagattggtttagtgatctggtcaatattacagagccaggaagtaagaggaggaattgaaaacaaggtctgcccgcctgggagtctgtgctgttttaagtcactttactgtcccctgctctgccacactgcctgtgttttcagagaggaggcaaccactaggctaaatgactatctggcaaaaatctatgtggagttggttcttcctattatattgcatctgtctgggacacctgagtgtttgcagagattcttgccccgattttcagcaccctcagctgttagccgtgctatggatgtgatgttggggaatttctaagattgaagtggccagttgcatgtagatgagaagactttctttaatttgccctaagtagacattctgcrcagtcagtgtgttatagaaasacatttctgggaggcaggtgatccaagggatggtggtcaagaagcacagaatatatagagatgggatagaaacaaatgcaatgaaagatcaggacattttgttcaaagtagaaatttcaagtagggaatcttcctcccacctaccgtcatgaactccaaggagattatgatttaataatccttgtctttatgtgtattcttcagtctatgagtaaaacatgttactggtttctcttctctgtaagttgcagtcatgtccctgcaagggagctagtttgtatgtattgctaggggctttaagatggtgattctccaggctaggaacccttccaagagattctatcacttacycaaagccgaaacacttgtccagtttagcaggaaatatctatatgawtttgaatttcttggtttcggccatttgtggctctgaattcactgttgccctgaggaagccatctctgacccaaacactccttgttaaaccactggcatagctcaagtgacttggaaacctcactgtaactactattgcataacttcaacaacaaaccttcattctgttgtggtaaaacttcgctctatattcagccacacattaattagtacttatattttcttaaatgtacactgtgcatcatgacatgtcctcaggatatggagataaaatacttcatttttgctctcaaagacctaacagtctagtgaagaagactgcattctgaagtctctgaatgtcaaaaagtgctggttgaaaatatttcatttttttgataaacatgagaataggtaaaatcattttcagaagggcttatggaggggagacatctggtcctttacaaagacagggtcactgaacccttagtgcttttgtgaggtgacagaacacagtgtccccagagtgatgtatttccttgaaagttttttttctttgagaacatagggtggggttcttcctgaggaaaatattgatattgccagcctgctcctggtgaaaytgaaaaaaaccaggaaatttaaacaaaggcatgattcaagaccaatatttaggaggaagcactcaccacaggaccagaacctgacccatggacccttgtactctgcatcgctgcagttcccatgctcttcccagcacctccctaaaatgggtcattctatgcaaatcccaacagccttccaaatagaatgtcactgccctgattaacaagtatttgtatactttttctctaaaatgtctacttgacatatcatatctttttgtatgtttcttccagcttctatttgttctttagaacttcagtagagtgcctttttacatttaccaaacaatgcaaaggacttccaggtaagtggacccctagtaaactctccagtgggatagatgcatagctttgtaatggcagccaaaaccagtttgtaaagatctcattttccccttttttacccctgagaataaaaggaggagtttaaaaaaatctatgcactggccgggcgcagtggctcacacctgtaatcccagcactttgggaggccgaggcgggcggattacgaggtcaggagatcgagaccatcctggctaacacggtgaaaccccgtctctactaaaaatacaaaaaattagctgggcgtggtggcagacgcctgtagtcccagctactagggaggctgaggcaggagaatggcgtgaacccgggaggcggagcttgctgtgagccgagatcgcgccactgcactccagcctgggcgacagagcgagactccgtctcaatggaaaaaaaaaaaaaaaatctatgcacctacacatacatgcacaatcacacaaacataagcacacatatatgcacacttaagcacacagattcacacatacattcacaactcatacatacatatgtatatatatagcactcacatgctcttacaaatatacatataaacatatacacatataaacatacacacatagaaacacacacacatataaacacacacacacacagttgtacatggactgtttcttgggaagaaatgctcattcggcaacagtggcttctttttctctctttgtggatttgctccttggcctttatccctataggaagccaagctgaaagcttttaaactggtatagcttttgtcctgacacctatgtctgggtgacatagattctcagagagagggagagatatgaaaggaaaaaagtctctgaggaaatcgtaatctttcccgaagaagttcttgcctagtgccaggtttctgggctcagagcagattagcgaaacaagcactcagctaagagtccagggcctggtttctagttctggttgtgaccctaatcagccgggcaagtcacttatgttctctgagcctcagatttctcgcctgtgcaatgatgatctttcagattctaactctaaaattctgtgcatgtctcttttccagtgactgaggaagttcaaagtagaataggatggggatgacacatgaataagctctgaatcctcacctgtctcgaggaggaataaattcaatcytaatgccaaaacgacagaatctctttacttcctcactgctttgccaaacgctcatttagatgtatctatcaatcactggtttattcatatggtgcctctcaccgtgaaatctaggttctggaacaatataattggcctaattttggttttctgactgcagaagtggatgcttcctctgcctgtctctactctcagctcttattgttttttttggtgaaagagattaatccaatgctccgtggaagtagatatcaagaactcttgagcagagagawgttttgcattctgcctgtttgacatttacaaggtatttcattaacactgtgggcgattcaatccccttttatttttggctgcccttgctgtgcctctgaaggaaggaaggccattcttttgccaggtaaggggcaggaaaatgtgtgactccaaagctacctggagcctgatgggggttaggttggtccttgctgcccctgctggtcacatggtccctgcttactctgcttgccttttgtcttcctctttgtggactcctattgatccttgtacttcctctggcagagtgtttatcagattatattgaaattgcctgtttacttctgcctctcccacagaacagtaaaaacctcaaagactggggctctttctttctttcttttctttctttcttttttttttttttgacaggttctctctctgttttccaagctggagtacagtggtgcaatcacagctccttggactcctgggtcaagggatcctgccaccccagcctcctgagtggctgggactacaggcatgtaccaccatgcccagctaaattttaattttctaatttttttttttttttttttttttggkatagagggtcttgctaagttgccagagtgatctcaaactcctggcttaaagtaatcctcccacccaggcttccaaagtgctgggattataggcatgatccaccgtgcccaggcttgttttttattgtacacttagggacttgcctatggtaggtactcagtaaatgtttcttgaaataattaatgacttgggttgatttggatgaaagacggaatggacggagggcattttttagtagcctggagacttggtttccatgcaccatgctgggatgtccctggcagcccatctactgagctggcaccagcatgcttaccagtctcctttgtgacagtcccaatggatatttttattagccagcatgatttatttcataatgctgagttgcagcacccttcatggctagagatttttgctgtggagataagttcttagaactrtctccatttccagaawagagagggtttctctcgtctgttgcccagaaaagaagtcagtttacgtatgcatcttccctgggtcaggctaagaagtagccccagcactggcatgctagacttggagagtctaatattcttccagccaaaccctgaagcaaaccacacctcctaggtcctgcaagtccccattaagtgtgcttaagtcatttgaactcctagagaatccatgtcagaggaggagaatcagcattcaacaaaagatagcatgtagtttttttttaaaaagtgaaagactaaagcttgccttttctatagatcatcaacatgtttacttatagcaaaaaaagcatgtacagatggatttttgccatttaaatcattcattaaaatccctattttaagccaagatttataacaaagtttttggggaaataacacatacatcccctcccatctggaaatgaaaagaacaagcaaaatggatctagcatcttcattataatagcaccttagcatgtaattcagtctcctcatgacaaccattatgtaaggataaggagaggctctgcaagccacccatttctacactgccctagagttgagattcaaccaagacccctgcttcggtttaggtttcaatatacacgtgaagacagggaggaatatactcacaagacaaagtcctgtgctcattggcacctgatcaagtgctaaggcttcagatgaaaagggcaacagaatctccagggcaaagggatcagttagtggaggattctttagagaggagggaagagaccccctgctgggccttgggggatggagcatttagtcaggaagatgacatcccagtaaggggaagctacccctaaaagcaaaggtatggagatgggagggaatgcggagaggggtggagaaattccatctttgttagggcagcagtcaaggatgagtgagttagcctcttaaggaagaggctaagctgttagaataaagaggtttacaacatcagcggcttaaatcaaatagaagtgtgtttctctttcacatgacagagtagatgtggcctggcrtctagaaagcatatttgtctctgctccactgtgtcttccagggacccattcttctcttgtcttcatgctccatcacttcmtagggtgttgtctacacctgcatagccatagctaattttccattctcagcaccaaccaggggaagaggaggaaaggtagcctccttttcatgataggtgtgaagttatgcaggacactctcagggtgaatggaccacagtgtggctcctgactgggcagggaggaagaatctgctgctagagaaagaagggaagacagtcatctttgacatcatgagttgcataagatgggaataaaaactggaaaagacctwatcaccatattagaaaactctagccattctaaagacattgaagaatcctgtttggacctttttagcagtgaggagcgtccagctgtggttatctggagaatgcaataggcagaacttgctggtagaggccccgcttccytgtcttgaatgcctgsctttttttttttcttttaaattttkcatctgcttctggatcacattgctgtgagccacattgggtcaattcacatggaggattagatctgggcacaccgtatcttttatgtcttttatttctttgactttattctgctggaaagtgttggcccacagccagaaccggcagagggcaaaggagggattactttcttatcacagggaaattaaatgcctgagacagcaacatagtgatttttttaaaacaaatttttaggaaaattgaactyaccctgtttactttcatagaaggcttttgggctgtgggaaggaacctatttttgtacttaatgaaatggatcttggcagtaaagggtttaaaactaactttggatttatttaaaaagtaatatccttgccactaacttgtcttctgtctttaaaggaaagagaatttttacagtgcctatagagcatgccattcctcaccagtcatttggcagtcctattagcaaactcatttgtcaaagcctcattaggtgattgcaaaagtactctcccaggacccactttggacttcttaccaagtcgtgtgtgtgtgtgtgtgtgtgtgtgtgtgtgtcygtctgtgtgtgcatgtatttgaaatggaagtgtgggaacatgacagtgtagacaagcttacagcccccatttttcttygagtggccccctctgataaaaggttatatactggaagaggacttaaaacctttgaaaaatcaaattctcttggaatataataccaaagtgwtgttgttgtttttcttgcatctacatgttccatgaatattttccaaacaattcaatacattactcttcagcccacgcccatgctgacatcaaaaacttttgggaagaaaaattgttatcgaatagcagtgtcgcaccaagcagatggggtcactgtcccccaggataaggcatttctcatgtgcttgagaagaagactgtggatctgaaaatatgataggggctgyggcttattgaggcctcactattgagagggggcttggagttatggggaacagtgggctctagtgcaggactgctggggtcttaagcccactggaccacttcctagcttgccagccttgggccagtttatagccttttgggcctcagtcttcttatctgtgagaaagtgtaatgtcacctcccatgtcactgtgagcagtacataagtggatctgtrtaaatagcttggagcatcatgtagcatgtggaaatgctcagtaaatgaaccaggtctctcaaactctagggcccatgtttttccccttcaccactaagaaacctcatgagmagcatgggctcaggagtagcaggaggcttctggcacagaatgagaagatgggaaagcgtgctgcttggccacaatggaaggaggagaaaggtcaaggagctcggtcagtaatccccactctgaggccaaggaaagaggatggaggaaagggcaaccagaacatcaaataccacataagcaagaarccataagtttctttccaaactaacagttaagaaaacagacctaaccacttctactcagggactacatcttatttgtttttgtatccatagtgcctggcctctagttgarcttgacaaatattggagtgtgttggcctgtttcttgttcactcatttgttcagtcattcaacaaatatttaagtgcctatcatggaacagccactgctttgagagcttacaatcaatgctgaagaaaacaacrcggaaggattccccctgccttggcttcacctgggaggggagatgggcagtgagcccatgctagcttctaatgcactcaccacttcttttaataaatacaatactctccccgcttcccctaaygattctgtgaagcaaacyagtctatagttcctggtatcttcttttcttgaaaagttgacatagatgacagttgtgtcctgaagtctgatagcttctatgaatttctcaaacattggttaccaactggtttggggatcaccttgacaaactgtgtaatttagaggtgagggcctcctttattggagtcaggagacctcttggatttgtgtcttcactctgttatgagttgagtggcctcaggcatcttctgagtttctcattcctttactgaaaataataatgcttatcttaaagtagcttgttcagaacttgccttgtctcaagaatcagccagacatttataaacaaatctgaatcctgaacgtcaacccaggcttgtctaagaattctcctctttataatttttagctgctcagagtagagagcctgtcaccaaccctcacactgttattacagtttcctgtttctccttaacatttattccaccacattttgcacatatgactttagaccttgaactttcaagtctttctagaccaaaggacaacaatgctttccagagagtccagcaggaatcacactgggaaagctaaaaaagcaactcagtccttttcacccagtctatttcatccaaccccgctgcccctccttgaatcctggaaggatcatctattgcctttcaactcaaagtgtgggacgtgtactagcagcatgggcatcaccagggagcttgttggacaygtggagtctcagactccaccttagacccactgactcaatctgaatcttgacaaggttcctgtatatcatgcatgttactctttgagaagcaccagcctgttgaatacctctgggccaaaatactattcagatgtgttgttctttttcaattacgraaataattagtgacttaaaactcacttctgattcaggactgcatggctgtttaagtcgatatgtctgcgttaatgctgttgtaatgacatcacagaattgaggcatttatgaactggagagtaaattctatatgtgtttaaaaattagataaataagaayttacatgacagtttaataggggctttaaaaatttaacacggataagtcatctgctttttcaatggattttcctgaatagtgggatcacaaaagaaatttatgtgtttttctaagtttctttttcttttaatgtrgatttacaagtgattaatttaaaaatttgctctctgattagcaggtaacatttataatctggacctgtacctaagatagcttagcaaatgaacacaaatggcttactaggtctttgcttttgaaaacgtatggmcatctaaaagtagtaaaggcaatttaataaatacagacaatctgctaagcagccaaggaaaaaaggtgcctgaattatatatgtctgcatgagtggacaagacgtgcttttcaagattaatgatttaagytgttctttacgttcccagactgattaaacaaggcttaattctaaacaacactttctccttttcttgcttcttcaaaattcactgtccttctctatcccttcaggattgattgcaggggtgatccaggatggtgtctgtctaaagccttaacttctctcccttcataaarggaagattatcccttttttaattccttgttttcattgatgtcagatgagargcattcagaaggagtgttagcattcactgcactttccctgaaagtggctcaacttttgattgagatgttcttgaagattctgttagtggcatcttggcatgctcctgtcctctctgactttgacggctcctcccctcctccttcttttctccctcacactcctgtccacacttccagtcaagtgctttccagagcctgtcattcagtttcttttctctctcccaaatccatcrtcttttcccaatttgtaggattttttctttttccctcttgttcagcatttcataaagttagtcctgccaggttttaataggggttccacccccctcaccgctaaaaaaaattgatcaggacaaagtataaaatattaatttagacagttaaatatcattttgtttgttggtttagcctcaggacaaattagaacttttaatatgctgccaggaggggttgggtggttttctcatttctgaatttatttccctgtagaaccttctttgaaagtatctaggaagaccagtgtttgatgaaatgtactttccgacctcctccttgacatctctcctacatgcttctctccatctcatgctatgtctaatgactcygtgtactgctccacgtgtcacatcctcaaatacatcctaaattaaacactaccaacattagctaacttctactgatcactccccccacttctttttttttttttttttgagactagtctcactctgtctcccaggctggagtacaatggtgccatcttggcccactacgacctctgcctcctgggttcaagtgattctcctgcctcagcctcccaagtagctgagattacaggcacctgccaccatgcccagctaatttttgtatttttagtagagacagggtttccccatgttggccaggctggtctcgaactcctgacctcaggtgatccaactgcctcagcctcccaaagtgctgggattacaggcgtgagctgctgttcctggcctgatcactcacttttactgctaaggcttttaaaagtattttgcctctttgattgtctatgaaatcaagcacagatatcttaacctgagatgcaagaycatgtgtgttcttggaccaaccaacttgcaatcaatcttcccccttccccagcatttaacattcttctccatgcttgatttttctttatgacagagaactttacccctcccaatattctataccgtttacttacatattttgtttgtcgtctattttacctcaactagaacgtaagctycatgagactgggatatttgtttgttcatgctgtgtcccaagcacctacaacagtgtccagcaaatggcaggtgctcaacacgtgtttccaatacaggcggaatgaatgagggagccttctcagtttcatctctggcctgtgcttggtctttattccctactcttctcttgcctttttttcactctcttttagccctcaatcttcatctgtcatcatctctcttcacccctcagagcctaactctctaagtagcatttcttccaaggagccttctgtattcgtgacccttctctctttgtatgggtccctgtctttggaatgttgttgtttatacctgttttaccagtcagttacattctgccttgtagtagagttccttttaagctgaaaaaggataatggggtattcatgtttgcctcttacatcactgtggaatatgctcagtaaatttataattaatagaacaaacccaacattgtgcttccaggaaagtaacccccacgtgtgcctcagtctgtaccatggggactgcttgacgcatctgtttcctcagttgagcccttaagatgaatgcttgatatcctcaagaggctattaacgagaatttttatttccccaaagtttctttttccctaaaaggcatttctttgatatataacaaagctctgttataaaaatttcaactgctcatcccagtaggagagaatgttctacgaattcagatataggaaggtttccggggctatattttcttttctttttgggttttcatgttcacatttcatctacatttcccctcttgggcaaataggttgcccaatttagggcaaatttgtttggttttccttccgatatctttatttatttttctwtattatktgcttcctctcccttccctccaagagagttcagatacttmccacaatggataaacttatgctgggaaattgcaatgcttttctttttttgcaaagtacagacctcatgtacatatgaaggctgctgacactagctttccatctggccacaggaaagtgtgtcatctctttcttccattgcctgtctcctgtccccaggggcctcagtggaggccagacagtaacttttctctctttcaaaaacccacccaaatccccagaccctttctaatacagcttttccacgtattcatgtatcaccacctgaaacttgttccattctaagttaaggattaactaaatgaatgaaaattgtatttatttgggagacagaagtagcaaaggcttagaatcaggcagacttgtgtttcatcctcagattctcctatttactcattgtataaccatagttcagtcaattcccgttgccgagccttagtttctttgtctgtcaaatgggkataacaatgcttgccycatcatattcttgcaaataaggtcagataattcatgtaaagcttggagcacagtgtatggcacctggtaatcggtctctctatgatgaagatttgctgatgctgctgcttacttttctggcttatggggcttaggttctgaatctttataatctttttgtgcctgctgcatatggtcaaatcatgtttgtttgatagacagacatgtggggtttttccttaacaagccattcaaccatgtatagtgaagaattgctcatggttggtctgttttccatgtctagatattagaagagaaggctcaaacatgaggttactctctgtagtgcagtgggaaagagtatattcccagggagcctggcatcccccattaatctgtaagcagacctataagcaaaggaagggctttaggataatccccacttccccgccccaccagctttattgaggtataactgatgaataaaaattagatgtatttctggtgtacaacatgatatatatatatgcattatgaaatgattaccacaatcaaagctattaatgtatctatcagctcacatagctgtccctccaggttcatccatgttggtgcaaatgacaggatttccttcttctttaaggttaagtaatattccattgttccattgtgtatttttatcacattgtgtattcatatttctgtattcattcattgttccatggatatctaggttgtttccatatctttgcttttgtgaagaatgatgtgatgaccacagggctgcagatacctctttgagatactgatttcattcctttggatatgtacccagaggtgggattgctgggtcataatgccattctaggagttgttttgcacgttgctagatgtttcctgaatgatatgagaagattcttaaatasagggaacctccctagagccagagctcacctggttgattcctcctaggagggacatggtggtggaaagagctctgctgggaagaatggggactcagctcttctgcatrctgcagtgtgactcaggcagacactgcacatttctgggctgcgtttccttctcctcaggatgagaaagcaaacctagactgtctctaatatcttacagcactgcagatcctacccctgcctttttttttccagcctccatctgagagcctctttctgtttctggtaagggtatcttcacccgtcaccaccctggtgggctggcttttacgttgagtgctttggtgtgaaaagcaggcttcgttcaagttgacttcaactttcctctttaaccttttatcatgtgttcttgttcactctcttccttcatggtgtcaagtaaagccagtagggatgaatcaggttcactgttcttttggagatgtgaaatccatgaatggggctaggtttcattatgtctccctctgggtagacccaattccctcctaattgcctttttcctgttgatcattcacatcttctgccttggaatttctttgaagttttatcatgttctcccttcatcatgtccttccctttgtgacttcagattttctgtgggtagctgtaatttcctgcrgaacagtgtctactagattccctctgagcatggctggtgcagtggtaggattctgtgaaacgttgtcagatgtgtgagtgtgcagattgataaaacagcgtacactccctgcttcgttcccacctctgttttatgtggatgatgacaattacagcacagcacctcatatcggtgcagagatttctcctgctgtgatctaatggtggtctgtgtgcatgtggactgggaaccagaaggtggctttttctaggagatcttggctgcaggcaagcctatttctgccaagctagggattgtccgggtcttgatagagctagctgttttgtaccattgttagtagccaggctgtaattctgacatttcaactacttggactctgaaaaggtgtggttgggccccagatcatcagccaagtcttccactcagcctgcttcatgacctgacatgcttagcatttgggcccctttccaagagtgaagtaacacactgatggggagacaagaaagtgaaatagtggccccttggttctcacggggaagaggggagatgtgttcaggcctccccttcctccgccttcattggtggttcctaggtgagaatcactgggaatcaggaggatctatcagaactgggaatcaggaggaaccttcagatgttgtgggcaaacaggggggcaaggggtgacgttaaaactaggctttgtcactttcaaaagtctgcattacagtcagccatggagaaaacggcctactttctacatcacaggcgtggcttaaagatataaggccaggccatttgaaaaggtttagtccctcgtagaaaggcatacaaatcacccctcctagtttgggttcccacagaggcaggattccagtgtacatagtttatgtgggagatgatcccaggaaacttgggaaggggagtggggaatgagaaggggaggaaggaagccaataaaggatgtgctatcaagctcgccatcactgtggacagctgcagctcagttccactgggaacrtctgggaaagagtgtagcacaggtgcctctgagtgatcacacctragaggggaggttctgctggccagagaacctctggtaaggaggtgcaggggctggcagttggtcaggcccatgggcactgttacaatgaaggctgagggaaaacgggtggggcatcgattgctttgctgcaggtccyatcccggattcaccttcccagggatgctagatgggagtctagacattgtctctacagaggatgaatctggaattcagaaagatgatggaggcccactgtggagaagccggttcttgagagttgggtgagaatccaggcttcctgactcttgctgcagtgccctttccacttggctacttaaggcagaaatttaaatttgtgatgacttttgaggcatactgtacctgattcatggaacaatattgtccttcccaccatgggctctttagtctttcttggagtgaaaaattgtcaaaagattaaatcctatttgggagccagagaaaaagcaaaakaatggctgarcrtgtaaataaagtctcctaggaagatcatatttttgaaggtatttattattcatatctttttgtcattgtcgtgttgtaagtgtttacctgggcttctagctttttgcttttccaaggacactgctgatccatcctagaagaagctgacagccaccaccttracactggcttattgctgtccaggttatttaagatgcggaggaaatcttatcacagagaagcagcttctaaacatgtcctgccaggtgggtgatgaggtaaagactgcccaggcggccttgtgcacaccacatacttgtggagccactttgatgaaagggkctggattatttgcaaagtcttgtgctaggtgaaggtgggctctttcttaaattctgaaatgcccacgagtctttggtaatgtkcatagtgaagcatctgagctgagcctgaggcttyccaggaggctgtgccaaggacaaaacacactgaggatgttgaccatggcctcctgacagaatgaaaggcccccacagtttcaatttaaaccgtaaacatttaaatagaaaatgaagtgctggtgtatgactctgaacttgtgagactagctgaaaacaccattttgaccgttgggcagagatttcccatcatgggatcagccatagaccatatccactgggaacatggagaaaaggtttagaggttccaccaacattttccttaattcttagaygccttttggtggttgaattctgtccttattttcttatttcctgaagcccaaaatataagctmtataatgtggtcattcatamacctttagggatattcctattggaaaatgttgtgcaagtcttattttagagttcccagaagggaattaccggaccttaagatatgcacgttttgaagatattggatacaactggtctccagaagtgggaagaccatttttgctccttttaatagtggtgtctggtgtctctttcctcagatattcagtaatggatatgtcatgctttttcattttgcccttctgataggtggaaaatgacgtaacatccttaatttaagttacattttttggatgccattgtgaattttttttcccctatagctattgcctatttgcataccctctgaagttgcccgttcttgaaggacactgataatgttctcctcccstgccctttcctttttgttgccagaataacctaatctaaaccagaaactccatcttttyttccccagggctcmtatagacccataggcggmtagagtgtacctgtgagcctctggggagatgtctcaccgccagagagctgtccccaactcaggacctcacctgcctgtgcgtgcgaaattacacctgagatggagtggctgtgtccagctaacaaagccgtttggggaggggatttcaagcatggstattccttgttcactttaataaaacatggcatgaattcaggcaaagggacttactccttactccctcacctcagatttttctgtgttttgctgttggtataacttgtcctgtgttgctaagttttaaacatatctatattttgtttaaaacactaaccatggctttgtttgagtggcttatttttatgtcctaaggagttgacctagacagggaacagttagtcatattctgtttcaggccaatgcctctgagccccttcccttctcgtttttctctgtctgaaatgatgctcttggctggccccattttgctgtttgtccaaacgggcgcccctcagcaatgggcaactttctccattttggtgtcttatctaagaccttgcccactggcttaaagagttggcttgggttccgtcacagtgatgagttgcctgtcccgccgtctgtagtcgggagggctttttccgtgatgagaatgagctgcaaactcaggcaaacactgatcaggagagacatgaaacccaacctggcccagtcggcttaaaaatagtccagtcatttcacccctggaattttctcttgcttatgtgggtggacaattctcttggaacaccaccaagatcatgaggaggagaaaacagagcaggcaccaaccacatgaatccaacccaggctgaccccgtagccggtggtgcattggccctcacaggtttgcaccctgcatgcagggccctttctcccccacgagagggcgctctcgtcactcttaaagcaatcgtactggggaacactcaggttgtttcttagtgaagtccccgaagagcactgcatttaagctgctactttgtgtctcagcttctactttcaaggtttgttatgaatgtaaagacattctccaactcaagcaagtgtgggcaatattagtgtctggaaacgcctgttgcaaatgaagcacagccactgcttgtttgtgtttcgttagtgaaacgtgattgtaacccagggtttttgacgctcacagaagcatccgccttggtaatgctgtacatccaggctgctcttctttgtccytaacctggttgcaatgtggccgtagcatgcttgtgttgacatctgacaggagatgaggacttgacttcctgggctgatcttgcttattttggggagagcaggagtgcccgtggttagtgtggatcagcctgacaggagattttctattgagggaggatttaagactgcatgcaggcaagggaaatacaagccatatttcaccagctcaatacaccagggagcgctaccatttaacgaaaaccaccattctgacttccgggtttttaggtcatctggcagccactgggtggggtcagtttcttggcccttgattagaagttccttctgattacaaaacacctcttgattgaaatctttgcattttctttgcatttgcatttccaccaatctttttattttttattttttttgccttggaggatgtgtgtatgtgagggtgaccttctctttatttgtgggaatcggggagtgccctcctccctacaaagtcactataaagctacgggctttgctgcccttggtacagggtctagaagtggttgttgggtggtgaccagcacagtgacagtttatttcctggacctttgaacctaaattcccacaggaagaacataaaggactcagcaaatcttgccccccgacccccgtctcctccatgcgcctacactggagccatgagtactactgctaccgtcactacagccaaattattatagagaattactatgtgccaggcatgggtaatttttggttgttttaatcaactttgtttcaaacagctttagatttgcagaaaaactatgaatatagcaagagttcccccactttctcctttttttatttattttattttatttttttgagacggagtctctgtcgtccaggctggagtgcggtggcgcaatctcggctcactgcaagctccgcctcccgggttcatgccattctcctgcctcagcctcccgaatagctgggacgacaggcgcccgccactacgcctggctaatttttttttttttttaatatttttagtagagacagggtttcaccgtgttagctaggatggtctcgatctcctgacctcgtgatccacctgccttggcctcccaaagtgctgggattacaggtgtgagccaccgcgcccggcctcctatttttaacatatagtttctcctgttgttgttgttttaatcatattagcataacacatttgttacaattagtgaaggaatattgatacattattattaactgaagccaatactttattcggatttcctttattttgacctagtgtcctttttctgctccgggagcctacccaggataccgccttaccttagttgtcatgtcttcttaagatcctgctggcggtagtggtttctcagactttaaacttgtttttaatgaccttgacagttttgaggagtactgctcaggagtttagtagaaggtkcctcttttggaatttgtctaaggttttctaataattagactggggttatgggtttttgagaggaagaaggcagagakaaaatgccattcttatcacatcatattcagggtacatattattaacatgatttaacgttgtagatgttgaacgtcatcacctcgctgagacggtgtttgtcaggtttcttctcgtaaagttactgtcccctctcctttttttatactgtactatcacaagaaagtgaccacgtgtagtccacacttaaggagggggagttatattccaccctcagagagcacagtacctataaacatttttgaaatttctctgcacagaaaatttctctcttcttccccatttatttacgtattcaattgtttatttctatcaatatggactcatagagatttattccatactttgagttataatcaaatagtatactactagattttgtttgttttttttttgcctctgggagctgtttcacgtgactcctgtgtccctttgacacayccccatcattgcgggtttttgtttttgaggtgtttctttcttgctttctttgtggcactcactacaagatactccaggattatcttgtacatcttctgccctagtccttgaatcagtcatttctccaaaaagccctggccttttttttgagacggagtctcgctctctcgcccaggctggagtacagtggcgcgatcttggctcactgcaagctccgcctcccgggttcacgccattctcctgcctcagcctcccaagtagctgggaytacaggcgcccgccaccacgcccggctaattttttgtctttttagtacagacggggtttcaccgtgttagccaggatggtctcaatcttctgacctcgtgatctgcccgccttggcctcccaaagtgctgggattacaggtgtaagccacggcgcccagccagccctggctccttttattggagggtggtattagaatagggtctgggctccaggtgtgctggtgcttctggttgctgctgctttataagctctcagctgacagcaagaaaacatgwgcatgtgaaccaatctatagatgcctatctactgatctacaaatatatctgtatgtaaccattggtatctgtattatgctaaacatgtgttcacactgacgtttccagctcttaagctgttacatgtctccagctctaagccattatcacgtggatcattctagccttcccccttgcctatctgtagcctcctactccaaaaatgataaacttggctctcagcatctgtcatgcatttatttagttgttcaattccagtatacatatgtagcagtatcaaaattgttaacttatacccccatggaaaatagcctygtcaactagagtacagtgcttgtgtacggtttattttgccttagttttacagactgcatacatttccaaagccacttaaatagcacctttttcttccatccactttagtgagggttgttcacatatgtaccacagattgctttgtcacatgctgtatttcattccgggattaccctgactgcctaaatgatttttttwaagtttatatatgttaagatttgccctttgtgctgtaaatttcaatgggttttcacaaatgcataatattatgtacccaccattacagtaatgtacagaataactataccaccctaaaaattcatctattcacccatttaactatcctccatacctggaaaccatggattttaaaaaactatctacagttttgccttttccagaatgccatataattgtaataatataggatatgctattatgtctccactttccacttgaggactctgaccttagaactcatgattgcccacggtttcttggcttgtaattggtgaygctagcgtcaacccaagtctctgatgttaaaacaggaactctgaaactccccactatgctgcctattttccaatgaaatgggtccaggaagccatctgataaatattttcactaggttgtcaaaaattaayaaacatgcctctttcattaccttcggaggccatytgtggggtggttgkgagtcagcctctgcagccatgctgccagaatttgaatcctacctccttcacttcttacccatgtgatttgaacaggtggttttactttttttttctgtctttcctggcttactaaacaattcttcctttttaggaatatatgggaggagrgatctgtgcaatgcagttctacaccctggacatagcaaccgactgagtcaggccaattaacttctctagcctagcgatttgaaacccagagccggggccctctgacatgaaggcacctttatatcttcagtctgtagggcaggtcataacacctgcagccacagttcctggggtggccccaagtctggatgcttagggatttattaattttttgagcaactccagtatcttaaaaagaattcatccttctcttccttttgttgttgttctycttttattcttatttttaaaatttaagcgaggtaaaatcagcccctcttggctacaggtactttaattactacaggagatcatagtagctacctcactggtcataagggttaaataagataatgtataagacagttagcacagggaatgagggaattgtcagggaataagtacctggtaattagtagcttttactattatctaataatagttcttgatatttacttagtgctttstaatgtgaaccatacactcctgtgtgcttatctccttgacaattgggtggaaatggcatccacattttatggatgagcaaatggccatgctttggggtttgcccagggtcacaaagctggcaagggactgagccaggatccccactcaggcccttcrtcatgtcatgtatccagggttctctccaatgtgccagggtcgtgtggtttcctgggggtgtgatggagagggaggcagyttccctttcccattttagggacaagagtggagatgggaaagtactttcctggggacagaggatggaggtgaaggtggtggatttctttagttatggggagttaagttgggaatgttaggcctctagtcmtttccttttctcttttcttttctttttttgagacagagtcttgctctgtcagccaggctggagtgcagtggcacgatcttggctcaccacaatctctgcctcccaggttcaagagattctcatgcctcagcctcccaagtggctggaattacaggcatatgtcactggctaattttttgtatttttagtagagacagagtttcaccatgttgaccaggctggtctcgaactcctagcctcaagtgatctgcctgcctcggctttccaaagtgctgtygttacaggcatgagccaccgcacccggtctgggccctgagtcagtttctgacctgccttctgagctctgcatggtgcctggggtcagcctgcttctggcttcaccactctctgttctactgcatttattgtgcamacagttgattgaatgcctgtttatgtgccaaacwctgtgttagggaagatgaaaggatagatgagacccattaaggtctgccctttaaaagcttgtaatatgttggagaaaccasacatgaaaacaactargtataacacmacataatgtctgaaagataaaaacaagtgttttcagaacacaataattcacagaatacctacacatgccataaactgtgctaagggttttccatggattagctaatttaatttccccatcaaccctacaaaggaattactgtggttgttctcatttcacagatggggaaactaagcacagagatgttaaatcacttgctcaatctttataaagataggaattgtagagttaagttccagagcctgccctgttaatgatggcactaaactgccttccagagaaggtcagaatgcatagctctttgtaggattgttggtgaaacttgcagagarggtattttctgaactgatattcaaggatgagtaggaatttataggtggatagaaaaggaattgtattccaagtagaggaagsaatgtgagtggacacacagatggatgaaaatatataatgtgttcagggaatggctagtaatcccagaggtcaagagtggcaggcagtggttggctattacacttaaaaggttaaagctaatgccgtaagcattggggagctctcagaggattttaagaaggggagtctgtgtctagatacacttcaaaagggttcctgtagtagcagtgtgaaggctggtttgggcatgtgtcagaatcatttgaaagccaggagggcctgctggaaggcctcgcaatagtctaggtgagatcatgcatcggctttgggatgtggcagtagaagtgctggcttcttgtggttttgggggttggtgcttcacagagtgaagaaagaggtgtcacaagggtcattaaaatcccactggtgtgcctgttgatataggaggcacccatcttactctctaacggtgttctacaaactagccaggctgtgaactgttcattactgtttgggccaaaataaggggcttgcaccagaatataaatcaatgcattgcttccatcacggagaaaatcttggtgcacacacacacacagtctactgaagcaaaaagtgtgcttagtgacaaagttgatttggattctagtgcaagctcttatttccttgcagcccacaaacaacatgtggactttcaccagtccacaaccataaatagagtaatgctgctgtataatcaacrtatcttacttgctctatacttcaaatatcttcttctctacagctgaattttgtagatgaaaaawttattttaaagtttcaacattttaagaggtttctttttactctacaggcaagccacttatgtaaaggacccatcttttaatttttgagttttggaaacttacatgagtacttaaccttgattaataattgataactctttctgtagagatgggccrgtgacctcttsctactctccagcattgttaagtgctattgcctttcagacttcagattctttccaacctctaacacttgggccattattccttctccaaggttctcagaagtgatagagcactggagaggcaatgaaatcaatgatttctctatcacttgagtgtaaagtgtaaactaaattatcacttagcagccatgttattaaagggattcaaacattggtaaagtgtctggactaacagactttcaagattctttgcaaccccgaggttttcgatttgtyggaggtacagaactggtaagcggcagagagcggcagcacctaggtttcctgacccttgctgcttgcttccctgccgctcccctcagtccttcatcaagagctgcagaacaagttccactctccctggaggataggtgctgtgggtcttcatttaatggtgggacctctggagatttttctctctgctaatcacccaaggatgctttacatactctactgagatctaaatttatattgcagatgggccgatgctgatgtcttaaagtacktgctgggaagataatacccaatctctggagaaaagagctttacatttctttttactgagggctgttctgtaatttggctctcctaactstggcttgccccaacaatgagctacgtaattggccttaaagggacacccattgatttggacagggtctgtacatacaccagttaaacacagtgcctcatgctgggtctgtgtatttctactgggctttcttttctaaatgttatttaattccagagtttgcattagtgcttcagtcaaatattgtcaggctttggtcaaaaacccttaactgaagatcagggttggtcataaaaagttggaaatcgacatttgccaatgccaattggcagacagttggcactcaaattggggacagggccaggcaaaaaaaggtcttcaaaaactgtgctccmaaatcctctaaaatccactgtggttgcatcattgcccaaacttacagcttaatatgttggctttgctgcttaacagctgtgtgaatgggcatgttacttaacctctgtatttctccatcataaratagacataataaatttaaacccatgggttattgtgagaataaataagataatccatgtaaaagatgctcagcctagtccctggcatatggcaggtactcaagaaatgtttaatttgaatctgttgcatgcgcattctccgttgtagccagataagtctctctgcaccatgaaatgccattctatccctgcctttatgcttttgtttatgagcagaaggaaagtatgacctaatgattaataacatggcctttgctgtcaggcacacctggctgaagttttgttttctctgttgcaggacgcgggtgagttaattagctattttaagccccagtttcttcaccgtataatgggggaataatggtactgaccttacagtgttgtagtgagggtttaaatgagataaaatttgtggatgcctggttaagacaatcatgagccagcttattgagctcctattatgagttggtcctggaggtagagtggtgagcacacccagctgggtctaatggatgtataaccataaacagttacaagccttaaagtaaatatttacaaataattacaaaggggcaatgtatgtaagtgccaggtgagcagttagcaagggggcccagctaggtctaggggtcacataaaacttctcagttaccttgaataccatacaggatgtagtattaaaggttgacgtgaaggacaaagaggaggtgaccaggcccagagctggggaaagactgtccaaggcaggggaatagcatgtgtgtggactcagagaccggagagcatgcgctmtgttttgaagagctgagaaaagtcctgcgtgggtcttgtaggtgttcaatcaatggcaactgtcattattctagattccctctcagggtgctgaatcctaaagcagcttgagtgcctaccttaagtctttttctctttttaatgaagcttcctttgactaactcagaactgattccaatctactctaaaaccttatagtattttagtcagtgctatatagatcaacacttagttatatgattttaaaagttgttcttgaagttttatgtatctttcctgagtcatcaaattgattgaaaattcactgaagagccctgattttgtattatgagtctccagagggcttagcacaatgctgagtccacagtgattaacaaatatgtaatgcttgttgcagaaatatatcttccacctaaaattctgtagtgtaccctgggcagtgttgggagggtgtacacttgggacccagattcgacaacttaaccattttctrtgtgtataatcttgggcaagtcattctttttaagcctcagttaccttgaataaaaaatgaggatagtaccatagttcatttactgtaagactcattttcttttcttcacattttaacatctctaaaacttgaatgtgtcttacaataaatggcatgttatagtttaattggcagtattttttttctgtgttggtgattataaaataatggtgtgtcttaaattcagtgacattttaggtttgatgaaataaatacaacttttacattttaggatggttatgaaaattcaagctaatttacacaattcatttgtccacaattcatttacctgatgttggcatgacagtgaagaggtagctgcagacaatcaaaatcattcctgtgatccagtacaagctttgctaactgccaaagttaaaaactgttacggccgacatgcatgccagaactcaaaagccacctacctttagcctcaattcctccagatgtattttgctacttttacacattgttaagttttgtggcataatgcttaagatgttggatttgttgaggagttcccaccctcctaccctagttctaagccaattgagaaataaggtgaaaaaccaacagatgaagaatcaaaatgtcactaaattctagattgtagtgtgtagcttatatctatggttaagtgggctctgtgatactgagccccagaattacctgtgcatttagggatatgctgataggctgctgctgtgagggtgcaaaggagaatgaggatttctgtgggcagcccattccaaggagagagggaaagagctgggagctagactatacatgtcactcacagatcatgtaagtcagtcttcaggccagtaaagaaactccaatagggccctgcccaactaaagggaacttctggggtggggcagcacctggcatagagtaggcttttagtagatggtagctattagggaaaatcatggcagcttttgagaagaaaaagaagttatcccaaccttcaaaaatactctgttttttacattatgtaccccttaagcagacctttaagggcatgtatgtttgtctaggattcctaagcattattttcattaaatattgttagtccagtgattacttggttggttatgcagttctcaaatcaggtggattttaaaacattaatatctcagcaatctttaaatacactattcaaattatgtacttacagtaagtccataataatagggtgttgcaaacacaggaattgctatcataatcttaaagataaaaataatttgagtaaataaattaggaaggggaaaggctgatgttagtcaatgccaaagctgattttgtagagccagaatgaaaaaaaatatgtgattgaaaaatgtaggcatctatctgcaagactttctaaaaaaaatgcagatagtagtaataaactgcattgctggagagaggggactaaaatgtgtgtgtgtgtttttaagatttaacttttaagttcaggggtacatgtgcatatttgctatataggtaaacttgtctcaagggggtttgttgtacagattatttcatcacccaggtattaagcctagtattatataggtaaacttgtgtcatggggtttgttgtacagattgttttgttgaccaggtattaagcctagtacctgttagttattgttcctgatcctctccctcctctcaccttccttcctctgataggccccagtgtatgttgttcccttctgtgtgtctgtgtgttctcatcatttagctcctatttgtaagtgagagcttgcagtatttggttttctattactgccttagtttgctaaggataatggccttcagcttcattcatgtccctgtaaaagatatgatcttgttccttttaatggttgcatagtattccgtggtatatatgtaccatgttttctttatccagtctatcattgatgagcatttaggttgattcaatgtctttacaagtgtgaacagtgctgtaattaacatacatgtgcatgtgtcttttataatagaatgatttgtatttatttggatatatacccagtaatgagattactaggtcaaatggtatttctgtttttaggtctttgaggagtcaccagtgtcttccacagtggttgaactaatttacactcccaccaacagtgtataaccattcctttttctccacaacttcaccagcatctgttatttttgactttttaataatagacattctgactggcgtgagatggcatctcattgtggttttgatttgcatttctcaaataatcagtgatgctgagttttttttcatatgattattggctgcatgtacatcttcttttgaaaagtgtctgttcatgtcctttgtccactttctaatgggttttttttcttgtacatttgtttgtatttcttataaatgctagatattagacctttgtcagatgcatagtttgcacaaatttcctcccattctgtaggttgtctgttcactttgttgagagtttcttttgctgtgcagaagatctttagtttaattagatcctgtttgtaaacttttgcttttcttgtaattgcttttggtgtcttcgtcatgaaatctttccctgtttctatggccagaatggtgttgcctaagttggagtttttctagttttgggttttacatttaagtccttaattcatcttgagttaatttttgtatatggcggaaggaaggggtccagtttaagtattctgcttgtggctagccaattatcccagaacaacttactgaatagggaatcctttccccattgcttgtttttgtcatgttgaatatcagatagttgtaggtgtatggccttatttctgggttctccagtctttttgattggtctgttttctctttttgtaccagtactatgctgtttggttactgtagctgtgtagtacagtttgaagtccagtagcatgatgtgtccagctttgttcattttgcttaagattgccttgactatttgggctcattttttgcttccatatgaattttaaaattgttttctctagttctgtgaagaatgtcaatgctagtttaacaggaatagcattgaatctataaaatactttgggcagcatggccattttaacaatatcgattcttcctatccatgagcatggaatgtttttccatttatttgtgttatctctggtttctttgagcagtgttttgtagttctccttgtagagatctttcacctccctggttggctgagtattcttaagtattttattatttttatggcaattgtgagtaggattgcgttgcctattcggctcttggcttcactgttgttgatgtacaggaatgttagtgatttttgtgcatttattttgtaacctgagactttgctgaagttgtttatcagcttaaggagcttttgggctgagactattgggttttatagatataggatcatcttgtctacaaacagggatagtttgacttcctctcttccgattttgatgcccttttcttctttctcttgcctgattgatctggccaggacccaatactgttgaataagagtggtgagagagggcatccttgtcttgtgctggttttcaagggaaatgcttccagcttttacccattcattatggtgttggctgtgggtttgtcatagatggttcttattattttgaggtatattcatttaatacctagtttatcgagagtttttaacatgaagggatgttgaattttatggagagccttttctgcatctattgaaataatcatgttttttgtctttagttctgtttatatgatggctcacattaattgatttgcatgtgttgaaccaaccttgcatcccagggataacaagcctatttgattgtggtagataaattttttgatgtgctgctggatttggtttgtcagtattttgtagttgatattcatccaggctattggcctgaagattccttttgttgttgttgtgtgtctgccaggttttggtatcagcatgatgctggcctcatagaatgagtaagggaggagtcactctacctcaacttttgggaattgkttcagaaggaatggtaccagctcatctatgtacatctggtggaattcagctgtgaatccatctggccctgggcttttattggttggtaggctatttgttgattcaatttcggagctcattattgtctgttcagggattcagtttcttcctggttcagtcttgggagggtgtatatgtccagaaatgtatcaatttcttctagattttctagtttatgtgcatagaggtgatcataatattctctgatggttggttgtatttctgtggggtcagtggtaatattccccttgccatttctgattgtgtttattggaaycttctctcttttcttctttattagtttagctagtggtatgtctgttttattaatttttatcaaaaaacagctcctggattcattggtcttttgaatgatttttcatgtctcaattttcttctgctcagctctgattttggttatttcttgtcttctgctagctttgggattgtttgctctagattctctagttctttagttgtgatgttaggttgttaacttgagatctttctaattttttgatgtagtcatttagtgctataaatttccttcttaatactgccttagttgtgtctcagggattatgctacattgtatctttgctctcattagtttcaaagaacttcttgatttctgccttaattaatttttttacctcaaagccatttaggaacaagttattcaattttcatgtaattgtatggttttgagtgaatttcttagtcttgatttctaatttgattgtgctgtggtctgagagattgttatgatttcagttcttttgcatttgctgaggagtgttttatttctgattatgtgatcaattttagagtaagtgccatatggcaatgaaaattgtttttgtgtggagagttctgtagatgtctatcagatccatttgatctaatgctgagttctggtcctgaatatctttgttaattttctctctcactggtctgtctaatattgtcattgggtgttaaagtctcccactattattgtgtgggagtctaagtctctttgaaagtctctaataacttgctttacgaatctgagtgttcctgtgttgggtgtatatctatttaggatagttagatcttcttgttgaattgaaccctttatcatatgtaatgcccttctttgtctttttatctttgttggtttaaagtctgttttgtctgaaactgagattgcaactcttgcttttttctgcttggtagatttttctccatccctttattttgagcctatgtgtgtcattgcataagagatggtctcttgaggacagcatrtcaatgagtcttggttttctaatccagcttgccactcagtgtcttttacctggggcacttagcccatttacctttaaggttaatattgatatgtgaggatttgacactgtcaccataatgttaactggttattttgcagacttgtttatgtgattgttttatagtgtgactggtctatgtacctcagtgtgtttttgtagtgctggtaatgctttcctttccatatttagygtttccttcatgagctgttgtaaggtaggtctggtggtaatgtattccctcagcatttgcttgtttgtaaaagattatttctcctttgcttatgaagcttagttaggctggatataaaattctgggttggaatttcttttctttaagaatgttgaatattgacccccaatctcttttggcttgtagagtttctgctgagaggtctgctgttagtctgatgggcttccctttgtaggtggcctgacctttctctctagctacctttaacatttttcctttcatttcaaccttggagaatctgatgattatgtgcttggggatgatctttagtattagtaaaaagaattttactggggttctctgcattttctgaatttgartgttgccctctctagctaggttgaggaagttctcatgcatgatgtcctgaaatatgatttccagattggttgcattttccccatctctttcagggacatgaatatgtcatagatttggtctctttacataatcccatatttctcagacattttsttcattcattttcattatttttctctattcttgtctaactgtcttatttcggaaagccagtcgtcaagctctgagattattttcttcacttggtctattctgctattaatacttgtgtttgcattatgaaattcttgtagtgtgtttttcagctctgtcaggttggttactttttaaaatatatatatatactggctgttttgtctgtcagctcctgcattattttatcatgatttggagaggtgatgcagtcatttggaggaatgaaagcacactgactttttgaattttcagggttcttgcactgacttcttctcatctttgtgggtttatctaccttcaatctttgaggttgctgaccttcagattttttttttatcctatttgattatcttgagggcttgattttggtataaggtggattcaactgactagcttcatttctggaagattttagagggccaacattcagctcccaactcctgcactgtgtactctaactctgggggacttctattgggccccagctttgttctttggctccccaaggttaggaatccactgcggtgaaggggcctgaggtgtggcagctgtggcagagtgctagcaggtgtcggggtgcctgcctccatgtgggtgttcaccacagtggcagaaacaatgcagctgttgggggagctcctgctggcaactatatgtatggttgtgctggacatggtgttggcttgggggtggggtgctggcagatgcaggcctgggtgccttctctgtgccccataagcaggagtgattggtcagcatgggggaggactgttgttctctgcaaaaatgtttaaaaaagaaattgtttcaaaaatctatataaagctttggattctgtaaatccaaaattcattactggtttattactttactggccagggattatggcaccagaagagagatctgtggttctgacaataagccatgaatgtggtttgcccagtacatggtttagctttgtttctgtatcagacacgctagtttaatttacaaatggagttttgatatactcaggactgtgaataagtattggggggtggtgtctggtgaaaggcagacaaaccacagtagctcatttccttttrttgatccgagcacaaagcattgttgttgcatcttagaaattaaaatcctcatttacagaatagtgtggtgcaatctggaaagatgttgttgtggtctctcaggagtgaataatatgagtttttaaacattytccaagaaaaatttacatgatttcaaacattctaaagcataaggatgtacagtatttcttacagtagaggaaactgccaaatattttggaaaaatataagaaaggaactgtacattggtaagaatgcattttcaaagactatttattttgtttgtttttaactgaacagttattcattgagaggggtgtgtgtgtgtgtgtgtgtgtgytgaagatagtattatcccaaataatcatattatatagaggctacaactcagtcttgcaaactgctcttacttgcaactgacagctacctcccacaccctcttggcatttctctagtgaagctattgatgtaattaktgcttttagggttstgtattaaatttaaaaaacaacttcttttaattktgtgcttaayacagaaatcctaaaaaatcatagaaamacacaaaggaaaaaaatccagcattaaccactaactaagtggataactaagatcagagaagaaactaaaacaagtaactaataactaagatcagggaagaattgatggtgatagagacgtgaaaaatcctccaaaaaaatcaatgaatccaggagctgttttttttttgaaaaaattaacgaatagatagaccattagctagactaataaggaagaagagggagaagaatcaaatagacacaataaaaaatgataaaggggatatcaccactgaccccacagaaatacaaactgccatcagagaatactataaacaactcgatgcaaataaactagaaaatttagaagaaatggataaattcctggacacatacaccctaccaagactaaaccaggaaaaagccgaatccctgaatagaccaataacaagctctgaaattgaggcagtaattaatagcctaccaaaacaacaacaaaaaaaaaaaaaacaagaaaaaaaacacagaaaaacaaaacaggaccagacagattcacagattcacagctgaattctaccagaaatacaaagaggaactagtcccattccttctgaaactattccaaacagttgaaaaggagggactcctccctaactcattttatgaagccagtgtcatcctgataccaaaactgggaagagacacaacaaaaaaagaaaactacaggccaataagccaaataaacattgatacaaaaaccctccataaaatactggcaaaccaaatccagcagcacataaaaaaaaaacttatccaccacgatcaagttggctttatcgctgggatgcaaggctggttgaacatacgtaaatcaataaaygtaatccatcacataaacagaaccaaagacaaaaaccacatgattatctcaacagatgcagaaaagacctttgataaaattcaacattcttcatgttaaaaactctcaataaactaggtgttgatggaatatatctcaaaataataagagctatttatgacaaacccacagacaatatcatattgaatgggcaaaagctggaagcattccctttgaaaaccagtacaagaccaggatgtcctctctcaccactcctgttcaccatagtattggaagttctggccagagcaatcaggcaagagaaagaaataaaggtattcaaataggaagaaaggaagtgaaattgtctctatttacagatgacaagattttatatttaaaaaccccatcacctcagcccaaaaacttcttgaactgaaaagcaacttcagcaaagtctcaggatacaaaattaatgtgcaaaaatcacaagtattcctttacaccaacaataggcaagcagagagccaaatcatgaatgaactcccatttgcaattgttacaaagagaataaaatacctaggaatacaactaacaagggatgtgaagacctcttcaaggagaactacaaaccactgctcaacgaaataagagaggacacaaacgaatggaaaaacattccatcctcgtggataggaagaattaatatcatgaaaatggtcatactgcccaaagtaatttacagattcaatgctattcctatcaaactaccattgatattcttcacataattagaaaaatcgattttaaatttcatgtggaatcaaagaagaccccatatagccaagacaaccctaagcaaaaagaacaaagctggaggcatcatgccacctgacttcaaattatactacaaggctacagtaaccaaaacagcatggtactggtaccaaaacagacatactgactaatggagcagagtagagacctcagaaataacaccacacatctacaaccatctgatctttgacaaacctgataaaaataagcaatgggaaagaatctcctattcagtaaatggtgctgggaaaactggctagccatatgcagaaaactgaagctggaccccttccttacaccttatacaaaaattcactcaagatggattaaatacttaaatgtaaaactcaaaaccataaaaaccctagaagaaaacctaggcagtactattcaggacataggcatgggcaaagacttcatgactaaaatgccaaaagcaattgcaagaaaagccaaaattgacaaatggaatctaattaaactaaagagcttctgcacagcaaaagaaactattatcagagtgaacaggcaacctacagaatggtagaacatttttgcagtttacccatctgacaaaggtctaatatccagaatctacaaggaacttagacatatttacaagaaagaaacaaacaactccatcaaaaagtaggcaaaggatatgaacagacacttttcaaaagaagacatttatgtggccaacaaacatacgaagaaaagctcaacatcactgatcattagagaaatgcaaatcaaaaccacaatgagataccatctcatgccagtcagaatggctattattaaaaagccaggaaacaatagatgctggtgaggctgtggagaaataggaagacttttayactgttggtgggaatgtaaattagttcaaccattgtggaagacagtgtggtgattcctcaatgatctagaaccagaaataccatttgacccagcaatcccattactgggtatatacccagagaaatataaatcattctactacaaagatacatgcacatgtatgtttcctacagcactatttacratagcaaagacatggaaccaacccaaatgcccgtcaatgatagaatggataaagaaaatgtggtacatatacaccatggaatactatgcagccataaaaagaaatgagattatgtcctttgcaggaacatcatcctcaacaaactaacacaggaacagaaaatcaaataccacatgttctcactcataagtgggagctgaacattgtgaatacgtggacacagagagtggaacaatgtgcactaaggcttgttgtgggatgggggtgagaggagggaacttacaggataggtcaatagttgcagcaaactactatggcacacgtatacctaggtaacaaacctgcacattctgcacatgtatctcattgttttttttttttagaagaaataaaaaaatttcagtgttaatgactgtttacattttcgtgaattctttccaatatttgatatttatacatatataataaaattatatctacctacctatctgtctacctatctatctgctttctagtctccctttttcttttacttagctcagatcatgaagatttttttccatgtcaataaatatatttcttctcttttctttttcttttctttttttttttttcttttttttgagatggagtctctctctgttgcccaggctggagtgcagtggtgcagtctcagctcactgcaacctccacctcctgggttcaagcgattctcctgcctcagcctcccaagtagctgggatcacaggtgcccgccaccatacctggctaattttttgtatttttagtagatacaaggtttctccatgttggccaggctagtcttgaacacctgacctcaagtgatccatctgcctcagccttccaaagtgctgggattacaggcatgaccaactgcactcagcccaataaatatgttctataatacgctacttaatgatacctattacattatattgtatggaagttccattacttacttaatctgttcttcctggacatctgatttttctttattgtaaaatgtgacatcttaaacatctttacatattcatcttcttccacgtctttgattacatcctttgtatagctcttagtagtgtttttgctgggtcaatgtttttgtaaataaaaaaaaaatgttaaagactttagacatgtataaccaaagtgccccagcaagagattgtaatccgcttacactgcctccaggagttttttgggagtacttgttttttcctaccctctcccaccagataatatgattctttttaccatttttaacccattggataggaatatattttcatgtttttatttgcatttctttggatttttgaggctacgtattrcaaagctgttattttaaggcataccagagaacatgaaatcttattttatccatattttggttttatccatttgctttgaaccccctgartcagctgccctgatggatagttttttttttttttggtgtgggcttggccatgatggggaacttggttgaaagatgagtgaagttaaggcagttcaaggatgtcatactttttagaagtaccagacaatcagaaaaaagtacagaataggagaaacaaagaaatcaaatacttaaaaaatatattcccccaggtcaatgctttgccatgaaaaggagaaaaaacagttctttctctctaagctgcagtaccccttggtcactgttccaaagcttggggcagaccatttgtcctatactatggctacatgtggatgaagtcatttttgtgtggtcttttaagactgaaggtactaatcacaattttaacattgcttctccagaaaaatactttctgagttacgaactttggggacacaaacctattggtcatttggagatctagtttcccttttatttttctaaattaaacattaaacaagacaatctgagctttgcctttttttcttttgggtaacttgatttcccaattataaataatgattatttaatgtctgttaattctttcacagtttagggtgaattctaattagccatctccctaagatatgtggtttgtggcttgaaaagttttctaatgccttccctccctagaactaatgactcagaactgagaaagactgacacagagcttcatcttctgctggggctgcaaatgctctggagattgcccacgccctcttgcagccactgctagatgaagatgaaagcccactgcccagacggcatcagtatttcacctgctcagtattgcacagaaaagtcttggtttgacttacagcctgctcattgctggaaggtcacagcactgttttttgatggagttttgagtagtcattttttctagtgctttaaacagattaaaatgtggttttatgggtagtcatttcctagatgcttgtgaaaacaattctaatcctaattgatggtagaaactgattcggagactcagtaaagaaagacatctgtgacgttcagttcaaaatagttaattattgattgatcacccaccagcattagcttatagatacacctgaggattaaacatgactttctggaacaaaataacttttttttttcctaaacataatgtacaagctgagcttaaatgagtgaaattataaaaggagataatctcaattttgccctatataagaataaaatatcagtcaaaatatttaaagaayagagatttctgtttggtgcaattttctggttaagaggttaatggaggggaatggaaagttattgttttatggatgcagaattttagttttataaaagagttctggaggtagatggtggtaatgattgcataacaatgtgaatatatttaataccatttagctgcacatttaaaactggttaatgcctggtgcagtggcttgagcctgaaatcccagctcctcaggaggctgtggtgggagaatcacttgagcccaggagttcgagacaacagtgagctctgattgtgctactgaactctagcttaggcaacagagtaagacgttgtctattaacaaaaagtaagaagaaaagaaggttaagatagtaatttttatgttatgtgtattttactacaatttttttttaaaaaagagttaaattggaaacaaaagtcttttaagagccttttggtctgagctttgacttaataaatacaatattaaatgaaattgtgcatttactaaatatttgagggacattattctggaagccaggtctcattttctaggactggagaagacagaatgtgttttggactcaggatgtgtttgtgaaagagcttaaaatttctttaggtgattgtgcattcctgtgatatgcattttctccaaaatgtacagaaagaaaaataatttgaaccctaattaattgggttctaattggyctgtgttttaggctctaaaggatcttagatcctttagatmtttattaaatactggtaattcagtatttaattgtaactgatttttatgcaactgcgcaggagaagaagtgttcaggtgcagctttcttcccatccgtgccttccctaggccattgtgctttgtgttcttaagactcggtgaatgtttctgaaggtcagctagagtgcagaggagaattaatattaaaatgcatttaataaataagctgtcagatgattcccgaagataccataagcagcagaaagtcttctttcctctttcattcagatcgctgtgtacagagggaatgatggttaatatagtctctgttggcatctcctaacgggctttggtaatcatttctagcccagccgtgctccacggatttcatcactcttgagtgacggggccattttctcacagaatatggaccctccctgaaaaagagggagcagaaatagtcatctagcagtgtaacagttagggaatagaaagaaaatgacggattttgcagagaaggtctgcagaaactgatccagcatccctggcagtttgagtagagaatgggattttggtctttactttgaattgtcrtaattatttaatgtcaaacctatggagtgttatgaggctgtaagattttgaactctgtgcccttcagaggctctgcctcaggrcacaaacacaggaagattaaacattaattaaagtaaccacacaggagaataaacaatgtaaagaaktagaaaaagacctggcttccccaccagggtaagccattttagaaagmgagattttgtattgaacttacgagatggatgaaataggcttcactagacccaagggcatggagtaatttctcaggaaagtattctgccattgattcctggaagaaaaattagaaaaactcagtggwtgatggaccaacccagaggccctaatggtacagagagaaaggaaacatgaccatgttcaagttacaagttgtagctgaccttgatgtttatcgccagaccgtgggaggttttggaatctgactgatgtctttcttccctgtagattgttattcagtgcctmggatgtgggcctaggaacctgtatttttaaaagattatctgatgtacagccgggtatgaaaactactgatcaagatcaatagttttaattaaagtcagggtggagggagtaggagggagggaaagacagagggagaaagagggacaatgaatgagctttggattcctttgttcaaatatgatcatctgagaaagagaaattctgaactgtcagtcrgttcagagcagagctctgctggctgaattggatgtgggagatttttcttaggttcccagggccacagaaaggaagcccatgctgaataatccagatttaagccttacccattggccttggatgcctatttctgtcttccttrtctactactgtcactgtcaaccccttgtggctgttccatccccatgtgtcagctctttgtgggctggtttgcccccggaactattgctctgagttcttctgtccattccctgctcggctcagtgggctcctgagttagcctttagcatgtcacctttctggcatctccatggtaccagaacctttacttttcacgtgggctccaaccagcagcagctcccaactaggagtgtcccagcctggtggaaaggactggacacacaagatgggtcggaattgaatattaaatgaatttcaatacttggtgtacctttgtgaagtagcacattgattttgagagagcattgactttaaatctgatagatttttttgcaagcttcttttcagcaaatggcttactgtccttccatttgctgaggtcaaactccttggagtcattcttaattcctttctgtttttcacaccccatgttaaaatagtgaatcccttaacatatgtaaagaagccatctctttcccccacctccattgtcaacatctgggtctgtgtcaccaccatgtgtggcctggattattgccacagtctactaatttgtctaccagtttctgcccttgttccttgagtcttttcctaacatagtcatgtaatgatcctttaaagatatgactcaggttcctcccttttactcagaactcctgtctcttagagtgaaaaccaaagactttatagtgtcctacaaaaccctccatgacatggtgtttcccatcaggatctaccttgatcttagccaaaagcccaagaagcgatcttatcctgatctcacctcatctccaacttatttgcccttcagtcactstgctctggccataatttcctcctttactcacttggccaagcatgctsctgcctctgggcccctccctcatttcctctggctgaaagatgtttttgtaagttaggtatttgtatggttccctcacttttcttcaagtctgaccaattttgccttattagagtcagtttcagacctgcctatattaaaatggaacccctttgttaatttcatatactgttttccccttaccatgctttacttttcttcactgcacatttcatcatctgacattccactaatttattttattggtttattatttataaagtgctaacaaatactttaatccaaactctttgggggcagggcccacattttgtttactgcagatccccagtgtttaaaaagaacctagcacatactaggtgttcagaaagtatttcttaaacaaatgtattattagtaaatctgagttttaaatatagttttgtcacttcttaattatgtgacactcagtaagttacttctcagattcaagttttctaatgttaaaaataaaggtaacttccgtttcatggagttgtttttcagagtagaactaacgtttaatcttcccaactaaagtgtgagatcaaatttgcactaaaaatatgttattattattgctgttgatgccgacgggagacagggaaatactgggtggaagagggcggttcccttacaaaggctccaccctcaagcctggatatccctgtccccaagtgagaacagacattcctgttttcatgcacaaaatgttgccttttagcccaccatgccccctatcctatacccatataaaccctgaaccccagactccagaagcagatgaggagacgaacagatgagaagacgagcagatgagcagacaaatggcagaatgttgcagcagagaaggagagaagagaaagagcgcctgaatgtcagcaggagtttgtctggagatggtcagaaaatcaggtgctggatggccaaactccaggggaagatcatcttcccattccatctcctgtctagctccccatccatcctgctcagagccacctccaccacccagtaaaaccccacatgcaccatccttcaagtctgtgtgtgacccggttcttccaggatgctggacaagagctcaggatatgaaaggtgtcacgctggccctctgcccttgcaaaaaggcagagggtccactgagccagttgacacttaagccatgcgtggatggcaaggctaaaagaacacactgtaacatacacccaastgggctccgggagtcacaggctcccatccctggacgctgctgtggggccagagcccagcatcccaacccstgcacctgtcyrtstgcatgctcccactcctgtaaggggtttgagcratggtggtgactgaacagacaagccaaacccctgttgcaggtcctgtgagagtcagggaacccccctgtttcaccgttgttaatattgatagagctttaagactgaatttattcagacatggatagaatttcaatggaagtggaatccaggaactggctttaatcctgtgtgacttttctagaaagaaagtcttgattgcctctattttacttctaaaaaagtgtaggctacctgctaatggctcccagatttctgcttgaatgatctttgaataagtaaagacgttttggatgtaaattttcccattgttcttaagcaagtcattaaaattaaatataactatgaatggagagtgttttattctttcaattacatagggtttgtgaagagtcattctttgtctacttatatttaatcaacatgcaatattttatgtgccttattaccatgtgttaagaaggtaatattcacgttacctagctattttttacattagccaaaaaaatatggttatgtgcaaatattgtgaagaacatgcatgcaagtagtttgcttattaaccaggtttggtgtcagccacacacttataaagctaataattgctagctattaatattataactttagttcaaatattactgatgtctgttcttctaagactgaatgttaagattagaatttagaatttagtacaagtatgtataaatcatttcaacagaaaaaaatgaatgcaaatcaggaaccagctggaggcagatttgcatgattattttaatgctgtgacaggacgtgaacactcagaaattcgaattaggatgcttatttctcatatctacaatgagcactgagtctctcttatgatgtggccagctatcaccctgtgttatcagcaaaccctactaatagaaatttgagagtctaatatcaaacttactcttcctatttgttttctctgagccctgggttagaagactgatatgaaataagcatttttactatactgagctatacktatcatttacattattggtgttgcttagaaattactccacaggttttcaaaagataaatcatgccatttgattatcagcaaccatttgtccaatcagcacccaaatgcagtgtactctttgcactgggcagccactcttaagagagatttaagaagtaacaaggccatttttgtggataagtctagacaatagtcttttctgtagcatgaaactaatatctggtcttattgcatgatcatttttcttgcacmtgctaaatcctttagtgccattcataaaacttttcataagaatgacttcatataagtttctattctttttagagatatgattacctatctgctttcagtttacactattgcacttgtgtgtgtgttgtggggggtatcctctggtcttgtgcaattattttcattttagtyactcaaatgaattgctgattaaaaagtaaattttgatggccatgtaaattggagatgattctggcttaaagggataactaggcaggtatttttgaaaattaataagcaaggctatcactccacataaacaaagcgattttttaaggaacagaacacttgatatactggttgatgcttcagtctggtgtggtatttgaagagcataaagtcgtaacatagattttcattttaatgggagtgttgtaataccttcataattttttttttttacttctcattagtttttacaacctacgaattacctaaaacaactttagtcatttgaattttgacttgccacttattttactatgtgcaaaattgtcccatttgagaaatggaatctgtatgtatggtattggtgtctatggctagacattaggactattacagagtttgcagatgtcactatgtctaatgcagttctaatgcagatctgtttgggrttttgtttaatatatrgttatggagaagtctagaaaggaatgacaatgaagtagtagttactgtaaatcttgtggtcacgtaatgaaaatttaggagacttttctgtacaccactttagctctgctctttgtagattgactcatctagaggagattttgtacaaatttttttcagctaatttctccagttcatttgtttattgatatagtattacattattatttagttaagcaaatggtctacaccacatgacttcaagcctcmatgtcttcttttttgttgttgatttgtatactaaatttcagaaatggctttttatggggaaggttggagacaaataatgactatatacacatatatttcacatatatatgttattgaaacatatgagtgtcatatatgtgtaagtggatgtagacaagtaatgagtatatatacatatacagtcatgtgtcacttaataacagggatacattctgaaatgcatcattaggtgattatgttattgtgggaacatcaaaaagtgtacttacacaaccctaggtagtagagcctactacatcatacctaggctatatgttatagcctatgacccytaggctacaaacctgtacaacatgctactgtactggatactataggcaattgtgacacaatggtaagtatttgtgtatctaaacatatttgaacctagaacaggtacagtaaaattatggtattatagtcttatgggatcagcattgtatatgcattctgttgttgaccaaaatgtagtgcatgaatatatatatatatatatatatatgtatgttactgaatatgttatawatttgttattgaaacctacttttattattatatatatacatatacataaatacatagccccacttcttcagtcatgtgaagttacgcctactgatacgtgtattagtctatcttgtttcttcttgccacttttctctctactctgagcccattcacgtaacccattttaacaattacttatagattatttcataatttccttattttagttcatttctaatcattaactgtgttattgattaccccttatgtgaaccaaaaacatctccataggggcatttctttgagaggatcagttctgctttattaaaggtaagtcagcttatccaagtcaccagaactgagttaagaaacatatggggctgggtgcagtggctcacgcctgtaatcccagcactttgggaggccaaagcaggaggatcatttgaggtcaggagttcaagaccagcctggccaacatagtgaaaccctgtctctactgaaattacaaaaattagccgggtgtggtggcgcatgtctgtagtcacagccacttgggaggccgaggcaggagaattgcttgaacccaggaggtggaggttgcagtgagccaagatcgtgccactgcattccctcctgggcagcacacacacacacacacacacacacacacacacacacacacacgaaacatatgggcaatccaggggattctagctcttcagagtttgcccgggactaaaaatggcagtacaaaattgagcattggccctttgagatcactgggagcaaaccaaccaatgaggaccacccatgggaacagatggagttcagaactggactttaaatcggggctyactctacagagggtattgtggctggacagaggatgctcattgcatgaaaaggaatctgtttgtctgggtcagtggggaagagttctggtgtgtcagactgtcttawtttgagttaaaagttttacaggtaaagatttgctttaattttctactcatgttgtccagtcgagtatggccatgtgtgcttctgtctctgatgagaaataataatgataaagatcatgagagcagcaggtaccactctgacaacgaagtgcccttctctgtcctagttattttaaaggtagcacattttttttaatcctcgcacaaccctgtgaatccatattgctttcttccttttacagataaggaaactgaggatcagagaggaaaaccaacttgctcaaggccaccaggctagttagtgttagacccgagactcaaatctaggactgcaggacttcctatcccaggtcaacgttatctagtgcttctcgacattttgagatcagtttaaatactccttattgtgcttttcttgtggatctgcaggcactgggtctggcactgaggaatcagcgatgaccaagacttggtccctgcttggagaggttcacaacacatgcaccattttattggaacatcacattacattatgtttaatgtgacataatacgagctccagatgaggagaccttttctttattttgttcttaaaacagtgcctggaacatagtcagcactcaatgaacatctggaaaacataaaatatgtcacgaaatcctgtcatggaggaaagcactctttgctttgtctgtggtttcatctgtgcctcactctgaattttactctgggctcctcacccctgatgcatttgcccacgacctcctggcatgccttgctgcccttagcattcattctgcagaaactttatggagcacatactgtgttctgtgcatatactgccagcattgtgctggcattagggacacagagacgaacagaccagacatggtccctgccctcttggaggaacacaactgctctgtacccatgggttctgcatccatggattcaactaaccttggatcgaaagtactcagggaaaaaaatatatgtctgtactgaatacatacagaccatttttccttgtcattaagtctgaaacaatacagtataacaagtatttagcatttatatcgtgttaggtattataagtaatctagagatgatttaaagtatacaggaatatgtgtgtaggttatatgcaaatactatgccattttataacagggacttgagcatctgcagattkttgtagttttgggaggtcctggtaccaatcctccacagatatggagggaccactgttctcttatacccagttctccttcatggttcagaatttagctcagctcttcacccacacacattacactcttccacccactgccccatgtcattaataggattgattcttaagtgtgtgaatggcagtcagagcccatgcacctcaactctgacttgaccagatgccacaccctggagtttctccataaagacctcctgccgtggattctcatccacttctttgagcatatggaatgtccatggtggaaagaagcagacaggtctaaataaacccattgactactgagaaaagaattaacgtgtatgagacccccgactatgtctcaggcaatattctagggcttttcctccttcattccattctcatagtaatcctgagggaaaaaaaaagcagtattttctttgtttttctggatgaggtccactgaggttagtggggtgtccaagcttggagagctagggagtagtagacagccgagataaggaatgcaggtccgtctttgtacaaacctgcttatctccatacaaacctgccatgtattctcaaggttatgagagaaccagggagggctggagactgagctgcctggtggtgcctatttatattcatgctctggaaattgtacatgtaactcattactgtggtcatctgctttctgcagcctcgtgaggggcccttctcatgttcctctgtagatttatgagcttgtacatggcacctccattctacggcagtttttagagttccctgaggattcttataacaatcacaattatttaggttctaaattacccttgtccagtgttaagcagatgagcagtgttttcaccttctaaacaatgattcctgaggcaactgctgccataatatcacatttcgtttccaaggaaactgcatatccatcccttcctcccacccttcccacttccttaagcatgagattttttaaaactcaaaatgtgccatttcaacctcttgttactgtgaaagttttagttccggcattggttcctaggaaattacagttttccttctgatcttcttcttaatgtgttggatgcttttctgcagaaagctgtgcattctaaatggcattgaaataaattactgccttcattatgacacacaatagatgaatgtattctacttcagagtcacagcttctttagccaaaataccttggttkttttccatcctgaagttctataattgcttacttgatattccattgtgagatctcagaataaagtaaaggtaggctgtggtatatatgtgtcttttactctcaggctgtacgtgcattcaagttacctgactggatggattcagtaagtttgtaccctccagataaagtaattactgaaactaagcatccattttctatagattatgttactagtgactaaaaaatatctccagatattgtataaatcatggaattcaggcagctatgtttactacaagtggcagtgaagcatttacttactccaaaggaactctggagtactttgcaatcctgctggaaggcaggggagatgtgggtggccacacagagtcagaggatgtcaacatgcagacatctgtgtaggcatytgagttatgctgatcgaagactctcttctcactctttagtttccccactccaaacacacacacacacgcacacacacacaaacacacacaacctcagaaaaccgtggtgagcagccctgtgtctacagatacccactcctggcaatgtccatgtagctaacttccggtcaccatgtccgtcccaggattgccttgagcctctatacctccctccagcctccaggcttttgatatagagacctagacatttggattttgtttttgtttttttccagaaaatctctctgagactcaacgcttaggtaatgtggaactcagaacctgactattttttttcaaagaaaggagcagtcatgaacagcctatgaatagatataagtagatgcagaaataatctgtatgggccaggcgcggtggctcacgcctgtaagcccagcactttgggaggccgaggtgggtggatcacgaggtcaggagttcgagaccagcctggctaacatggtgaaaccccatctctactaaaaatacaaaaattagctggttgtggtggcgggtgcctgtaatcccagctactcaggaggttgaggcaggggaattgcttgaacccggaaggcggaggttgcagtgagctgagatcacaccactgcactccagcctggatgacagagcaagactccatctcaaaaaaaaacatctgtatgtatttagtaggtaagggtgaaaatgattaytatagtrtgtgtgggagtgggaggaaattagcccatgtactattggactggtgatgtttctaagggattgttgtatatgcgaaattgatcttccatttacctactcttttaagcacttgggcctggtcagttgacaaggtaaagttgacccttgaacaatatgggagttaggggcactgatccctatacagtggaaaatttgtgtttaacttttgactctcccccraaacctaactataatagactactaytgactggaagctttaccagtaayataaacaattgattaatacataaaaatgttattaagaaaaccataaagaaaataaaatgaattcattattcattaactgccagtggatcatsataaaggtcttcatcctcattgtcttcatgtagaggatgaggaaccagaagaggacaattggtcttgctgtctcagggttgtcagaggtggaagaaaatccacatattagtgggcctgcacacttcaatcccatgctgctcaagggtccaaaggaactttggagtactttgtaatcctgctggaaggcatgggagatgtgggtggccacacagggtcagaggatgtcaacatggagacccctgcataggcatttgaattatgctgtactagcttctggtgggcagcaggcctggagccagtctctctggtagagttggatggggccaagagggtataagtcttactccttcttcccataggagaatggaaagggagcttccttaagggatcctggccctgcagggctgtatggtctcacaggcaagggtgcctatctgctgggagaaaatgctttgtgtgctcatattcatgcaagtaagttcttagattattgtcttacataaagtgatttgtaccctttgcctatggttaccaccaccacccctgtgataagtccatagcttcccaaactccaggcacatagaacctttctgccttttttggatccacctctgtatgcagtggctctggacttcttggtgtccccacattggtctgggctgaacctgacaggccaatagacaagggagtgaactatggatgtactcaagttcattaagtcacaygtcattgtgcttagtgaatgtggcaatctgagacaaatacgccctttgatgaatagagagtagaatgactaataagagatcagaagccagvaaagagtaaatccaataacaacaacaagaatgtagagtttgaaatttcttaagtttaaatgagaatgttagcttattttgcaaatagctttgtctttttctgacccctcctcccaccatgtggmggtatggaggagagaaaggctcttgcagaaaagtataagcggtgcaagtggagagtgctgcagagatggagatggaggccaggtctgctggtgaagggtcttatagtccaggctaagatgttaagcataccttagaggcatgaaagaatctctgagggccattaagtggggaccgaaattctaaaagctcaattcttagcctggttgggggatcaatttctagttattggatcacagtggactgaattctgagagctcagtgtgacagataaaggaaagtttgtcagatggatactgttttctttataagaatcttctgacttttggggtagagtttaacccctcattttaaagcaactcattatgtctcgttggtatttaatgaaacgaaaataatgtagtatgtgacactcatgacatttcacctgtaaagtaatttatggtaatttgtcctagagtgttctatcataggttgataggattcaaggactatatacttgttttctaccctaatagataggagggtggagtaggatgagaggcaggctcagagataggaagaaaggattttttcatagcaatgcaaaactgttagaaaagtgcatggtactccaacctttcagcctagtgacttcttgctgccgtggagtggctgcagtttccttctttgcaagtttggagcatacgcccagatgctggaaggatttggtttacattatattgaaaaataaaacaagacaagtcaagtaaaacaaaacattagcaaataaaacccataagcaaacacaaataaaatgatttagtgaggtaatttctcacaaatttcagaatttcccacaatcgtacagaaatggttcttgcctgtggctcacatgggcttcaagaatttaatttacccgtgttgatcagatgtgtaaaataatggttccatcattggttgcaaaaacttcaggtgttggattttggaagtatttacttacagaggtctcatcattgtaaggtaaagctttttagccatccaggccaaatggtgggattgagattccatctgccattgttcttacggacatctaaaaagagcaagaaaggggtttttatatttatttgatatttatactcccatccccagaagcccatttaaaaattggtattggttctggtagcagaaaaagtggaagtgaaattagagtatagaaacttatttctcaaagtgtggtctgcagactggccacatcagcatcacttgggagcttgttaaaaattcagagttgctggccccacaccatctcactgaaccagaaactgcattttaccrtgatcctcagataatctgtctgcayattaatgtttgagaaccactgaatggggaatacctttttaggaagcatggtcatgaagaaagtggagtggttgtggagaaggtcctagctagagatggagcatgaggtcagggcatttgtttgtcttaaaaaaatttagacaagccttgagcatgtttatacttgtggagaaggagacctttgaagtaaccagacaccaaaagacaaataccatatgatctcactcttacgtggattctaaaaaaaaaaaagaattgatatcatagaaacaaaccgagtagaaccacagttactaggatactaggaattggggaggtatgggaggcgaggaggatggggagaggatggtcaacaggtacaaagttacaattaggaagactgcgttccggtgttctattgtacagaagggtgacagtggttaacagttaagatgtgatatattataaaatagctagaagataggcttttgagaatgtcctcaccatgtataaatgataaatacatgaggtgatggtcatgctaaataccatgatttgaccattatacaacatatatatgtatcaaaacatcaattgtaccccataaatatgtaaaattacaatgtgtcaactaaaaaataagaaaagaagttgaagagaaagaagaggtggctgaggtccctggggagctagagggctgagatgtggtcataggagggaaagtagactaaagtggatgaatgacacttgttctcctgaaatgagagggaaggaagagcgggtaggctgcatgtaaattagcttgtgtattgaggaaactggaaaattgagagtagtaaaaaatggtgacttatttttaccgatgatggaggtggagtcactttttgagcataaaggggcagacctggtcatgggatttcagaaaagttcagggccccttagaaaaacacactgatgggtatgggaaagaacaggtgggggtaagggggcctgagttataggttgctttggtctccmccttgtacaattcaaaacacctttcagatatgtagaatggaagaagtacccaacattgatgtatattaaattccagccctgaacatcatataattaaagaaactaatataatackgatataaaatgtgggactgttttgactgtattggtactttctttttcccaaaaaggcagagctgcttttgcatatgaactcattttcttcaaaatccattatcctcatgtgagagatgtagaattttgggcayagaaaacatgacaaattttgcctgtagtcctgaactgagattggtaccaggctctgctggcttccagctatttcatttcatgatttatcaagagctgctctctagtcgacttggaaaaagagtttttgaagagtcctgctctcacaggacatctgtgagaatgccgaaggagaaggtaaagagaggcacrcttcaatattttattatctcaacccacagccttaaaggtctcctcgattgtctctgcctacaggaaggctcagctgctttttatcattccgttggggccttgtttcaggggcttgtgttttggtaagaagatgttttgtttctgaggacagctggttaaaatgcactgccttaactggaatattcacaggtatrttcttctcggcactgtgaatcatttttcaaagcttttcatggcttctgctctttgatcaggataaatcatgccacagtgagactggaatcyactttcatagactcccaggtgtccttgttctcamccactggtctttacttctctgaagagcctgaccttaygaattaaattctttcygattgtaacattagtcagaggaattggggaactggggacttttgtttattaatccttttatcttctgcttttttgcccagaaaggtcatttttcaatttccccagaaggtaattctacttctcttagtaattctcaacaaatgctaagcttaggacatttatataaaagccagaataaacattaagtttagaagtgtcatataaaaactagaaacaagcttttgtgcttctgagtataacttaaattaggtagaaaaaatatctaataataaaagtagattctkctaccctgtgtagggtccacaaaggaaaaaatatggcctcttctttttaggagtctagatcccactttctcaaagtgccttccttcatgtgtagccaccccacttccagtctacaytggggacccccaccattagaaaatgtctttatttatttatttttaattgtcaaaagattgtatatatttgtcacacacatgttgttttgaagtgtgtacattgtggaatggctaaattgagctaattaccataagtaccaactcacattaagcctcccttctttatcttctcttagcgtccttgatttcctccacaacatttaacataactacggtatatttatttgaataaatattggtttaactgcttcctccctgccaccccagactctgagtcccatgatggcaaaagccttggtagctgtagtagatactacatatatctttgtggaaygaataataataatactagtggagaatatttgttgtgcttatgatgcaccagggactgggctaactgtgttactcatcctatcttactgatcctctgtcttagcctgcttaagttgccataacaaaataccatagactaggtggcttaaacaacagaaatgtgttttcttgcagttctggaggctagaagttcaatatcaagggtccagtgatttgatttctagtgaggactttcttcatggcctccttcttactgtatcctcacgtggtagagagagagtgaacaggttatctggtgtctcttcttacaagaaccttaatcttataggaccaggtccccacacttctgacttcatttaattttaattactttcttactcctaatatagccacactggaggtcaggactcccatagatacattttgagggaacacatagcaatccataaaacccacctaaccaccctaatgaagtaggcactatgatcatctctgttatacagatgagaccctaaggcttagaccagggagctttctcaaggtcacatgagtaagtgaacaagctggggcaaggttgtaggtcttatttactcaaatctgggttcataaagatataaagatctgaactggttacatatactttctgtttggaagaaatgtaatctgagatatagagtacgagcttaaaggactattatatatgcaaggaagaaagtttataggctaaaagagtggttctcaaaccttgcgttttaggacccttctacattcttaagaaaagtattaaggatctcaaaaagcttttgtttatgtaagttgtatctgttgatatttatagatagcattagaaattaaaactagaaatatttttaaatatttaatttatttcaaagtaataataaacccattacatgttaatacaaataatatatatttatgaaaaataattatatttcccaaaataaaaaatttaagacatttaagacattttttgcaactctgtctcaggtctgtcttaagagaagacatagatatggattctcacatctgcttctggatttactctgttgcaatatgttgtattggtaaaagtagatgaaaattcagcctcacacaaatgttattggaaaaaggaggagtatttgatcagccttttcagataattgtggacattctgttttgttactacagcaaaactccaattggtagttttctaaaggttagttgcgatgtgaaatctgaaacggaatcaatgaacttttcatattctgttactttgaaatccactggtctagcttgcactttgaatggatttttcactcatgcatgattttgtaacatcttgcattggtcatttgaaaatatcagttcactgagttaatacagatctttgagatgttgacacatttcattatacaatatccaaaaatcacattccttaatattaccactcaaatatctcatcagaaaaggctttatgtactgggaagctttcaagcccatgatggcagatgtgagttttacaaaatccgaatttttgcttgaaaacaaggtttttatcattgrcatcaatgactattagttgtttttcttaaagtgttaagattatttcattcatttagaagaaaacatctgccaactgcccacatataaataactttacttggttaattttcctttcaggaaaaaattatgttcatgaaaaaagcaattatttgagtttgcaactcaaacaattgcacaagtgcttttccttgtgacaaccactgtatttacgtgtgtagtagaagtgctttatacattttcccatttcatcacacagaatattaaaaagaatgtgtactcaaggtttaataaaattaataattcttacttctccttcaaggacattcttaattgaaactagtatttattttattgagagtacctggctgtgaagagtacatggctgtgaagaacacatggctactagcacagtttggagccactgccttaatttgtgctaaggcgctagcaattttactgaccattgcttttgtatatttggtgcaaatgtcaacatggttaaaaaaataaaaggcaaatacactttagtattctcacaaagacagttttgaccttgtggttccctagtaaggtcttagggagctcctaacatcccctactccccaacattcctccaggatcaagggcttcttccatgagcatgagttctataaaggaagtcaggaacaagcatgggcttggttggactgtacagttcaagaattagggaatttgaaggagtatgggtgaggaatagggaagccattaactgaggttggtaagaaggagaaaggtttttgcaaggagtcttagagctcagaagctcagattatgaggtgatttctctttaaggaaaatcaggagtttctgtaatttgttgagacaaaaatgacactgtccatgtgtttccttatctgtaaagtgggaatataagagtattattattgtgtgaattaatgtataaacagcttagaacagagcttggcacacagtaggtcctatataagtgttattattgtgaaaatggagttttgctctagttatatgatgaattggagcagctgttcttacacttcagtcagcagcagaatgccttggtgggattgttaaaatacggattgctgggccttgcttctggaatttctgactaaggaagtcggagatggggccatgattttgcatttttatcaggttcctgggtgatactgatgctgctcctctgggtagcacactataagaaactgaatcacaggaattcacacamtgaatactataaatatcaatagatacaactcatataagcaaaagctgtttgagattctcaatacttttttttttttttgagacggagtttcactcttgtcacccaggctggagtgcaatggcgcgatctcggctcactgcagcctcctcctcccgggttcaagcrattctcccacgtcagcctctcgagtagctgggattacaggcttgtgccaccatgcccggctaatttttgtatttttagtagagatggtgtttcaccatgttggccaggctggtctcgaactcctgaccttaggtgatccgcccacctcggcctcccaaagtgctattacaggtgtgagccactgtacctggcctctcaatactttttttaaagagtgtaaagggattctaagatgcaaggtttgatgcccttttctttcctagctactcaacaagccaatgcctcttattcatatccatgtatggaaagtgatgtctacttattctttcacttgttttcatttaactttgctcaagaactgaagtttaccccgtgtttttatttttatctgaacaataagctgggactgtaactggttcagtatttatattttttctagcatgtcctattttgctgtgcctaattgctattaaagccagatggctgggttccaaaaacttgtctgatttgccaacagttttactcacctgaacaattttcactggctctaagctccctgacttatatcacaggccatcattgccacttttctgaacttgccagaggtcttagaaatgtagactagttgttaagattgctgatgaagatgtgctaaatgaagagtgttggtagtttgatgattaccaatgatgttgattttaaatcctacattcacttaacaaatatgtgtgtgccaactgtatgcaaggctttgtgctgaatgctgggaaccaaaccgaggaaaaaatatgcatggactctgattgtcagtctgggagacactaaatcaacaggcaattataaaacagtacaatgtcacaatgtcaagggaagggcaggaagataattgggctgaaggggggatctaatccatggggggcagggaaggctttctagggtaagtgatgcctgagctgaaaacttagaggaggctttgaattcgttaggtaaagaaagcaggcaaaaagcatgacagtatcccaggctaaaagggacagagtgtggtaagacctagaggagaagcagcacacaccactgtctttgagaagaagtttaatttggctggttcactgagtgtaggtcaagatggggatgtagaaggtaggaaatgacaagagggtagaaarattaggcaggaccctctaagcctttggggtttctcagccttagcactatcaacattttgggctggataattctttgttgatgtggggtgggggactgttctatgcattataggatgtttagtagcatctctagcctttgtcctaaataccaagagtgactcccatccctccagttttgacaactaaaatggtctccagatatttcaggtatttccaaatgtaccttgtggaagtaaaattgcccctggttgaaaacaactgttacagagttttgcctttatttatgtttttgttgttgctgttatttgtttgtttgttctgagacagggtctcactgtgtcacctaggctggagtgcactggcacaatcagggctcactgcagccttgacttcccaggctcaagtgatcctcccacttcagcccccaagtagctgggactataggcatgtgccaccacacccagctaattaaaaaaaattagtagatatgaagtcttgctatgcttcccaggctggtctcaaacgcttgagctcaagtgatcctcctgcctctgtttcccaaagtgctgggattacaggtgtgagccaccatacctggctttgtctttatgttgagaacagtggtgggcaattataagattttattcaggggattgacctaaccagatttataccttttggacattcatttatagtaacagtatggaaaatgaacagagggttggcagcatttgaggcagggaaacaggatgtcactgttgcagcttggatgtatctaaagaagtggctgtaggaatggagacaactatgtacacttaagatataattaggagatagatttaacagggtttggtggctaattggacatgaatggtggaggagagagaggaatcaagtctgcctcaaggtttctggccttggtcctgaagaagatagtggtgcttttcactgatgaagggagcacaagaggagggacatacttacttggaaagtcaggagaggattgctggtattttagatatgtcggatttgaggtgccttgtgacagccaagtggagattttcatctgtaggtagagttcggtttctggaacttaggagacagaactgagccaatcagcaactagagggtagttgaaactctgggcaaggctaattaagaaaggctccactgaatgggaaggcctggggactaagagccggtcctgggtgacaccaggtagatcatggcaagaggtggaggggctggtgaagaggagatttcagaggaggaaatctaggatgtggcagtgtcagacaagttcagaagagttagctctgtgaagagaagcaaagtttccatccatggctcaaattcttccctttccttcaacaaattcaagtttcatgtggttctagatgctcattagggttcttctgaaacgattggatcctccaagacatagaaggttatgactggttataaaaattgccacatttacctctggtataacccaartagaagctctgcatcataaaatttagagttgaagacagatgctgtaacttaaaagrattgatgctgggccagactgctgaattctgtagaggctttataatggagacacatctttctaggcagatatcacttgtcacttccataaggaaaattccctggagttgatgagtagtagagctgtgcttctgctttataaaatccacttttgatgaaaaattaacattttaattcagaggtgtgtagctatcaccaaagggttatgatgtcatgtaactaagtctcagataccaacattgttcaatattgtataattttttccagagtggtatgtgctccagataactgacctttgaaggtagtaatgtattatttacatgaaactaaaatccagtgcattctaaatggctgtgatttatcatgaccattttgaaattgggtcctgtggccatatgctaatttgactcaaaggaaattctgtgctgtgtgcttggatttcatgcttaaaaaattcagcaatagtttcaatgctcttttaattaaaataagatgctttataacatttcccacatgatgtggaatgyactctgtagctcatatatgaattaaaacccttagaagatttacattttctggtctggcaaccttcatttttctaatttatgtgtcctgtttgtcctgaaggagttgggaagttgaaatttacagccatcccaaatgagagagttgagattcttgattaaatgagagcttgtttgtgtattcaaatggaaaaatgtgggtggacaaaattaaatttgtagtgggttatctcctgaacagttttctctttcctggtaatttcacactgcccaactatgcacatggtaagtatgggagaaaacttttttgtataataaaactttttagcagtaactgactggaccatggttgggcwtctattccaagttattctgatcagcacctgcatctgagactttgtaattggctctatcatattcccagtatgccttttgtgtgtggccattttctgctatgtaaataggaaaactgaaaaatcaggtctgcagaaattgaagaatgaatggggagaagcaaagacaagcaacagagagaaagaattcccagtcattcctggtgcgctgcagtctccagtttctgtgagtttccaagacccagctcatccatgcctttggggtctttgaaagatccctctatctttcaggggtctttgaaaaacccctgtttatttcaaccagctcagatggttgcctgcatgtgggagcaatgaaataacctatattgcttagatttctattttctgattagatggtggctaccatgctatgtgtatattcttaaaacaagcccttgtacataaattagataatattggatggttttggttgagctggtctttggcttaaatgttattgacatttttctgaaaaaatataataaatataggacatgtataatctcacacaagtttgaaactatttaatagactcttaaaacaaaggaagggtgtctatgtagatgtgctgattggttccaggtctaggaatccaggccatttgcagtttgatttgtggagaaggaaaagagactacaatctctcagtggtggtaaggaggcaggatggagtggggaccagaaacgcctctgagatacaatgtcccaaggtccagtgtttttatgattgggaggaagactgctctaaaatctttgacatttgaagattattaataataaatgtcctcactaagttcctctgttcataggatagtaatacaaaacaaattgtaccccaatgcagcagtgtgaaaaaaaaagaaggaaaaaaggccaagattattaaattcttatgttcagactgagaaccagaaagcaaaagagagttaatcattgagttgtgtattagtctgttctctcactgctgataaagacattcctgagactgggtaatttataaaggaaagaggtttcattgactcacagttcgacatggccagcgaggtctcaatcatggtgaaaggcaaaggaggagcaaagtcatrtcttacatggtggcaggcaagagagagggcatgtgctggggaactcccctttatcaaacaatcacattgtgtgagacttactcactatcaatgagaacagcatgggaaaaatccacccccatgattcaattaccttccaccgggttcctcccacaacacatgggaattatgggagctacaattcaagatgagatttgggtgggaacacagccaaaccatatcacgttggaaactgaatgtataggtggtcctatggctagatgtcactgatgacaactgtttgcagtcttctgtgtctggaaaaaaaataatagcttccctgcttaggaagtcagaatataggcggtagggagaaaaaactgttaaaaaaaacttcaaagactggaataaactacatttttgtagagctactatattaaaatataagaggaaaaagaagtggaaaagccggggagtggaaatcgcaggcctctgcagaaaggagataaacaagtgcctttgggtgggatcatttgtgattgtaacagaaagacatacaaaaagacaagactatgtccttagaagcagagtggcaacttcaagtttataattactaagaacccctatgtacacagcatttggcatatgcaaaatatattggcagatgcattagtaaaatttaactatcgtaaagcctctgggagcattgacttggtaaagtaacagaatctccattaaagcaaaagtaatgaactgactcagcactcctgagtaaagtgaccagatgtcagaggtaccctgaaggacacagagggcaaatcaggtgtattttctggctacaatcggaagggtggcacagagagaaacaaaaccatgaatacatctttgatttcaggtttaactcaaaggcagtgatatttacctggagagcagaggaaagcattgatgcttccaagccaattctttaaagaggtgtgggtggagagtgtgtgtgcatgcatgtgtgtgtgtgtgtgtgtgtgtgtgtgtgtgtgtaygtacatacacacatatacaattagctccaaggctttaaataaattcaacacaagtatttattcagacctttgttgtgtaaggcctccaccaggtcctgggagggaatacatatgtgtgtgaagccctaagctttgtttaaataaagctaagggtcaaagaagagtgaagagcaccccacctccaccccaagttctctcccccagcctcttycagtcatggctcttgggaaaccctgcagtaggaacagatgaatgtgtgtataagtagttggaaagggaagtagagatgatacttagacaacataaatgagagaagtgtgaagtgtttgcagtcagagtacctattcccaatagcctgcttttcatgctgataaaaccattcaatcttggatgttgagttcaattttttgtcagtgaaaaatctgcccagagtcttaaaaaatgcaagcaagtcatctgtatatagcctcagagcattgtattttcaawktactgatttgctaggtatatattgaagtggcctttggaccctgagtgttaaatatggagatctgaatgttcttcagttcattttaattgtgacgaaatcaactattgaggaagaacacacttcctgatatagtctgcagccttatagagagccaagtatgtcacctttaacatataattcaagttcatttgttctgattaatttgtggggagttgcaggattggaatttagaatattttaagtgaaattgttggattacggattaaaaaaattacaaaagtcaattatgtacaagttctgggctaggtcctagggtacatgccaaaggaatgtgaggatattcccagtcttcatttcagagcagagtcacctggagcattttagaaaactcttgagactcaggcagcactcagatcactggagggggcacttagctcaaataaatcagaatctgcgcagggggtgcccatgcattactcagttgtagagctccctcctcaccgggtgattccaagtgcagccatgtgtgagaactagatcaacagtctggaaagcttataaaactacttaacatcaatttaaatataaatctctgggcattagtctgcggttggtaagttttacaggctctccagatgattctgttgcatgtggaagatttagaatcagtggtatagaccctgctctacagatgattatggtcaaatgagggaaaaggtgacttgtgtattaattttttttggaaaattacaagaaagtttatgtttaaatgccaaaagaataaaagacaataaggagtgataagaaaatgcaagaggtaaatatttagtgaataaattaaaaatgatttgtatttagcatgtttattcagatggaaatagtatttttaaagtgtataaatttttagaaatacatttttattatatattttcactatgtattctactatatagatataaaattacctaataggtatacatattttcagggtacctgtgataatttaatacacacatataatttgtaaagatcaaatcagtgtaattggggtatccatcaccttaaatatatgtcttttcttcatgctagaaacattcaatttattatcttctagctattttgaaatatatcatagattattgtaaactgttgtcaccctactgatctatcaaacactagcttttattttttctatcaaacagggtgtttaatcaacttttatcaaccctttaatcaacctttgtttatccccttacccccactactcttcgtggcctctgctaaccaccaatctgctctctatcttcatgagatccactttttttttaattccccacagattagtgagaacatgcaattgttgtctttctgtgcttggcttattttacctaacataatgacctccacttccatcaatgtggctgcaaatgcctgagttatggctgaataatattccattgtatatatataycacactttctttacccatttatccattgatgggcacttaggttgattccatattttggctattataaatattgttgccataaatatgggggtagagatagtagatgaaaacttaatcttcttatctgaagaattacttaaaattctaaagtagaagagttggaattgagaactagatagatcatttagtctctgatgatctgtctgtttgcagaggggagttgggtggaactgggtgctctgggagtactctgatggtagaaagagtcctttttattccactgtggaggtggggrtatgtccttgggtgtggttttgagcctggatatccagaagcagtgtttctcaaatggcactattctgtatattcctattgcacgacgtgtatcttcttgctaaaatcaggcagtatcactatttttctatgggatgtggggaatatttgatagaaatattggtagaactttcttattttaagttttatttccataatcttctcttagccctttggtaactattactggtagtctcaagaaaatcgagtgagagataatatgggagatttctttagattttcatagcacttcatctgagtaccaatagccttggattcttatattaataacagtaccctaactcttagggttctttcgcagacttagatgaattgatataygcaaatgtgcttaggaaaatgccatgcacatagtgagccctcagtaaatgtcagcaattctataacttcccttccactgctgttattcccaacgtcatttgcttyctgaactgtgggacccttgaggtcaggccagatcttttatctttatattccctgtctcctagcacaaggtttggtgcagtatcaacacccttcaacatgtgctgaatgaaggattggccagcttagatctgatttaaccctaaagaacttatgcagttattttaagagtattgtatcagtgtttcagtgattttctccctgagtgaaatgcttccaaatgccctgctatgttaacagtgcagagaatggctgctttagaagaaagagccccttgtacactcaatagtccacagcctccccctttaccttcctgatggtgggcaggtcactacatctccccatctacctccctgcttgcttagggttcccygacacacaggtcagccctgattcatcattccctacagaagactgaccttggggccaaaaggctggtggatatgatagaggggatgaggagaggaaatggatcagtgacattccagctggacacctgaatcccttttcaaaagagcatcttgttttgtccccttaggcatcccctaagggaaagttagcatgcagttatgaatgagaccctcgctgctgttttgatgttgtaaaggaggagggaaatctacaatggcattgaggaataatgcaagtgcatatatttttcctcccaaagaacccaaaagcatttccacctctatgttatctgatgctgctgattttatgcttcaaagaattgagaatgaatacctggcagtaagtactaaatctatgtgtggtgactgacagattaagcactagggatgttaaaggagattagaccacggatccccaaacagtgaatgtcagtgttattttccatcttgaaatggaatgaagttgccctcatgattcttaccacagccagcactgttatatcctcccaatttggttcttacattacttcactcttcagaacatcattcatttatttaaatggtwtttcttgagctcttttcatrttatggcttggttctagctacagagaaggatataacaaaatgtgagacatggtctttggacccaagaagcttctatttcaagaaatggaaaaataaggccgtaaaagtcatgattacgtgcttaagttctatgattccatggtgaaaggatattttgaagtacagggaacagcacagaaaataatgctacctttcaggataagtctaattatacctcttttgttgtcagcctgtgagagctgagggtttgtggcttttaattctcctttaggctgtggaaggcagtgggkgtgcggaaagagtgtgaccattagagttagttctggattcaaatcccaactctgctgctttccacttgtacagattaggcagttgacaatatttcctagcagaactaaatacatccacatctttcagagatgtgaggaattgcactaatgatcacagctggaaaaatgctgttggagttgggcggatcatgaggtcaggagatcaagaccatcctggccaacatggtgaaaccccatctttactaaaaaatacaaaattagccrggcatggtggcgggtgcctgtagtcccagctactcgggaggctgaggcaggagaatcgcttcaggagaacccgggaggtggagtttgcagtgagctgagatcgcgccactgcactccagcctggcgatagagcgagactctgtctaaaaaaaaaaaatgctgtcgttagaaaggccttcaatagatggtgattgttataaacaatgatcactaacagtaaagatactgcttttatgaagctcatgcttaaatgataacttccagcaaaacaactccatttaagctgttttctttgtactacagaattagcacttttcgtccctctaaatagacagacaatatatcatggagaggtgtttccttcccttgaggacgcaatatgctattttatttttcattccattgacatttcttaagaattcccaaagaaggaagtctcagctggcctccttccacatattaagagagaaatgttactccattatgttggacttctgattcctctttctataattttaatagtcactgtgttgagtagtttgcactatttttctcatttaactatcctcagagttccacaaagtaggtgttaaccccattttacaaattggagcccaaattgcccagccagctagcaagtcattaagtgggatttgagctctggcagtctggctgcagagcctgtgtttctcactgtgatgctaggctcgcctgcctgtgtgcctgtcccaccaagctcagggctgcactgcctccacaactgctccttctgctcctgcctatataggctttagtgccatttgtgagaatacacagtaaaggtagtgtcttcgttagctttctgtggctataacaacacagattgggtagtttatcaagacaagaagtttacttagctcacaattctggagacttggaggtctaaaagcatggcactggcatctggtgaggttcatcccaagacagaaggcatcacgtggcaaacatgtgagatagaaatgggactgaccccactttgtcgacaactagcccacaccggtgatcatggcattaactcatttatgaggtctctggtcycatgagttaatcayctcttaaaggccccgttacttaatagcattactaaggcaattcaattttaacatgagttttggagggggacattcaaaccataccaggtggttacccacaacccccattcaaattgatggtaaataatgaatgttaaatttatcttctcttcagtattgattcccatagtccatattctttactggctgttagattttcaccttacatgctccaatgtgcctaacataaaatgatcttagaacctactttgtgaagatgctgcaccatcctgagatggcacaagaggaaccaggccctgagttctgctgctgtgcttcagggggggcctgcattagccatctctggctgttcccactcaagagtgcccccccccmccaaaaaatagttcacccagaacccatgctagtcctttcatgcctcagggactcaggatcctgtaacccacttaaacatcacttacctcatctcagggcctaccaagacctatggcctgggcctgccctcctgaggtctgcctggcaccaccagtgggagcacccctagaccccagggatatacagtaactattgggatgatgctataacttgcaggctgtcctgatgatcattaaaacagtgattcagtatgaaagtgctttgcaaatgatgagatgtcacacaaatttagccactgtttggtcattttcactttatctttgaaagctygtgtttatagctaaacatttggttagaagattaaagtctatgaaaagatttggatccagtaggtcacagcttactagaaacagaacagagacttaaaccatgtgcctctgtcttctggagttggacttttaccatgaggttgcttatctggatgaaatctgagggctttacagtctaactttctgagggagtcattcagggaacgttttagtgtcaagccattaaatcacacctcaaaaggttggaagtggcccacatatgagtccatataggtgggtctggaaaggtggggcgagcaggaatctctttccattatgatgatggggtttctaaagtaattattgctttaaaaaaaatctgcctctgccattttccagtcacactgttcttggagcgagatgcatcatcaatacttttcatactaaacgttctctcctattggatttacctggattctaggggtatttttttcacatttctctggagacaagtagtgctgataaagattttataaggtctctcttgctctcaagctcgttttccttaacttttcttgtcccagttaccagtttatttggtccccagaaaccttctaatcttcatctttaatgataaatttatcttttgtagttctcctgtcaaagcttttgtgtctagtggctcattttgcttaattgctggagttttctctggccttttgttatttggtcctgcgtattttcaaagattctgtagaattttcagactgttactctgatgtttacttggtagattgattgctaagttgcattgtcttcagaggaggtttttgaggttgygtctattataatgtctgcttctacccggagtccattgcacttggagtgcttcttgaagcccctgagcttatgctgtgataaaagcgtgaatgttttactgtgtcaaagcactgtggctcataaggcttcataagctctggcttttatatcagagcatctcatatggttgtgcagattgcatcctggtcaagcatgccaggatgaggggccaagggtgtactgaatgccagcctgtgcttcatttgccaagccttgcatctgatgtaggactgtatcctcacaggrgacaccttttcctaatacacacaaaggtatcatgtgggctagcagctgttctgctataacttagctaggtgtctttacaggagaaggtagtggaagaggtggtggtatttctcctcgggaactgagattagcttactcgacgggaatcttgaagtgtcccaagatgaagccattggtgccccactcccccaacagttgtttaaaagttattaaagaaccaattgacatttgctagcattttaaatgctcaggatgacttatgaggctatgtcagttattctttactcagtaggggacttggagctacaggtctgatttcagcctctgtgcagcccccgggccacccttcctgctgaatctaagccccactctctctagaggattatcttggggtttattttggctcctggctttgaatctgaattgctgcccctcaagttatattcaaacaactctattaagataacgttgtctccaggggctccaaccagccagtttcattttccaactagtttggttggtcagtgcccataacaggtccacttgaaattagagctgcgttttttttttcttttctttttttctttttattattttactttaagttccagaatacacatgcaggacatgcaggtttgctacataggtatatgtgtgccattatgatttgctgcacctatcaacccatcacctaggttttaagccccacatgcattagctaattgtcctgattagagctgcattttctagaagtcaacaacatagtgtcttgaaagccttctttgtcatattgcagttgtgtctgagacctttatgtaccttagtttttttgggttttccttccccatgtgaaccacagttaccctttctctgactagtatgctgaagytatagtacatttctatttagcaggtgtttcctgtggttgccttttgttctaaatctatgattgaaccttatctatattgaaccaartctaatatctatttgcctggacacctgtactaacataatatgattctttttgtatccacccttatattaatctggtaggatttccataacaaaatactgcaggctgggtggcataaacaacagaaatatatttcttacagttctggaagctggaaatctccaatcaaggtgttcgcatgtttgctttctcctgaggcctctctccttggcttgcagacaacttccttctctatgtgtcctcacatggacatggacttttctctgtgcatatattcctactgtctcttcctcttatttatttttttgagatagggtctcgctctgttgcccaggctgkagtccaatggcacgatctcagctcactgcaacctctgcctcccaggttcaagcaattctcctgtctcagcctcccargtagctggggttacaggcacctgtcaccacacctggctaatttttgtatttttagtagagacaggatctccaactcctgacctcaagtgatccacctgccttagcttcccagaatgctgggattacaggcatgagccattgcacccggcctctcttcctcttcttatggggacactggtccattggattagggccccatgcttatgacctcacttactcttaattacttctttaaagtccctatctccgaaggatatgaacagacacttctcaaaagaagacatttatgcagccaaaagacacatgaaaaaatgctcatcatcactggccatcagagaaatgcaaattgaaaccacaatgagataccatctcacaccagttagaatggcaatcattaaaaagtcaggaaacaacaggtgctggagaggatgtggagaaataggaatacttttacactgttggtgggactgtaaactagttcaaccattgtggaagtcagtgtggcgattcctcagggatctagaactagaaacaccatttgacccagccatcccattactgggtatatacccaaaggattataaaacatgcttctataaagacacgtgcacatgtatgtttattgmggcactattcacaatagcaaagacttggacccaagtcaaatgtccaacaatgatagactggattaagaaactgtggcacatatacaccatggaatactatgcagccataaaaatgatgagttcatgtcctttgtagggacatggatgaagctggaaaccatcatcctcagcaaactatcacaaggacaaaataccaaacaccgcatgttctcgctcataggtgggaattgaacaatgagaacacatggacacaggaaggggaacatcacacaccggggcctgttgtggggtggggggagcggggagggatagcattaggagatatacctaatgttaaatgatgagttaatgggtgcagcacaccaacatggcacatgtatacatatgtaacaaacctgcacattgtgcacatgtaccctaaaacttaaagtataataaagaataaaaataaaataaaataaagtccccatctccaacatagtcatactgggaattaatgctgcaacataygaattttggggggcataattcagttcataacaattttcacttgccagactttcttatttaagcatatccagtagatattagaacaaaaacaacgtttaatttataccttttctgtccatttgggctcatggagctatgttaaagacttcatttccatcctcagaaaaacattccatttagcaataattatactttggatcttgccccttagacagcttcctaattgttatttccaaaaatctaagcctcatttttggaaactgctcccctatgttaartatagtgaaacgcttccagacaatctcattttgttaaaattaaattggtgttttctggaccatgtttgtcccataagcagcattctcaaagggctcggcaggctggggcccccagcctgtgcttgtagacatcatgttgatttttaatcaaaagccttattttggcagcttcygtttttttgattgtttgaaaaatacttcctgatggcttggagtttagattctcagttgttggatcctgaagaggagtttgaagccttagtttttcaggaaaaagcacctgacctgtgtatcttaagctgctaaatatttaggaagcatcagggcttatttccacttctaccacacaatattgaagcaattcaacaattgaatttttttttccccgctagaaaagagggtttttcaggccactttgaaattcaggtggttgatttaaaaatgcaaattctttgggaattaatcatgaaatgtttcaggatttttataaggaagctcatccgctcagtgaaataagggatgctttcttggtcatgaattttctttttgtactattttgttagttacttggtgggctagacagtatttttgggtgccactggcaagtctaaaacacaggaagggagaaagaaaacagctgacacttacaaagtctgacccgttctgtgctggaaacatttggtaaatggttaaatttactgcatatgcttgaaacgaatagctgaattaataaatgaatgactttattaattcaagctgttctatttttcaaataatccgaattagggatagtggcagagaccatgtatgctatgtgatcattttcctcctgggcacataatgggaactgtgcaactcactctcaagtgttgttgggtagggccatggggttggattctggccaatgggatctgttaggaatgacatgtgrtacttcaaaacctaaaaatcctcctgcatgatcctctgcattttctgacttcctttatctactgactggagggtgctaggagatggtggaggcataagacagaagtatgctgtgtcctcgaaacacaacatggagcagagcccctatcaatgcacatgaagccacaatgtgattgagcaagaaataaacctttattgttttaagtcaaggaaatttgattgtgggttgtttgttacagtagcttgtgttaatttttaaaagtttcatgatggtgtagtttcttagtatcattatgctgaaaaatatttgacctgaaagcaacaaatactgcaaycaaagtacctatgccagtttctgttctattaaaaacaaattcccttgctctatttattccaactaaaatcacagagatgtgctaatttacaggccagcagagtgcttgtcacatgcacattaaaatggtgaacatgcaatcttttagggaggtgaatagtggcaggtgtctattcttcctctaaatcctgcccaggagactgccttgcctgggcataacccagcagatgaagtcatctacctctcctggccaccatcatctgattaagggaattcagactacatgctttagatggtgaacatctcacaaaagggatatgttatcagagataaagtgtatgaattccacgtatgaccactgcatcatttgtgaatgcttaccgtatatgactgtatgaatgggccacctgcatctcagaatgtttttggaaaaagggattaaatataattgaaagaaacccaagaaagagcaaaaagcaaaggctataaggaatgagtctataaggttttattttttttcttcccctttgagaggtagtcaattcataacctagattcctccctagccgcacagcccaatatggcagccactactcatatgtgactatttaaatttaagtttaagttaaaattaaataaaaaatttattttctcagtcacactagccacatttcaagaatacaacagccacatgagttagtggttgccatactggacagcacagatgtagaacatttctgaaagctctctcagtgctgacctagagctagctttggtattttcatcttttcatgatgcaatacarttgccaaatttcttacttctcatatactcaaagcaacctcttgaaaaaaaawtttttttttgagatggagtctcacctcttgaaatgtttttaagattgttacagtataaattctggaaaaggttctagaacaaattacaaaagrttgatttctgagtacacattaagggaagctgtgataattagaagccaccaagcattcactaaaattaagttactacacatttacttcagtgactggaataaaaatctaagcttcaatgaaagaaaggaattatttgtttttattgccaaatatttgcagttcttgcacacagtaggtactcaacaaataacttttgaatgactattagagaaataaaattgatatagtcagtttcagttttcatcaagttaaattagaaaagtccttatgctgtcattgaagaaatggttactgggtcgtagggcagttgggtgagttgccaatgagttaaccagtcaygagaagtagctgacgaagagagcatgagacttgaaattagatagggacctaccttcaattcttggctttcacttaacctgtgtaatcccaggcagccatttcacttttctgaatcactgtttcttcatcctcaaattgggcataatagggtgctcatatcaaatatggtgatattaaaagctagcatgaacatagcctggaaggtttctagtagaatgttgtggagtggttcttcacatttagctagccagtgcttctgtctctgacttcagtaaggatatactgattaaatttgtggatgacccaagatggagtaagaatcagaattcagagggaccttagtagacaaaaagataagctgaatacaatccttaaaagtttcatatgggtaaataataattaagaaaactgcaacagtaattgacagaggacatgtagtttaacctcattgtgcaacagacttgtggattaaaaaataatgtcattcactgtgtgatgtggctgccagaatttagattttrgcaataggaataaggtatgcagagtagcacatcagaacgcctaggaagttaaaaatgccaatggctgggttattgccagagattaattaattgatgtgggatgcagctttggcattgggatatttcatgcccctcccctgcccckggtgatcctaatttgagaaccactggtttaagctgagggaggtcttgacgatttctgttcgctccacttttacrtagtctattaagttacttgcatggaaaaatgcatgctgcatgtagttccgaatgccccacccaaatcttggagcgtatcaggaagagtgtggggacagtgagtggatggcaattataagagacatgttgaagaaaacaaaaagtttgtcctgaagaagagtaggaagaggtaaccgccttgaacattgcctgcttggtctattttaggaagctgggttcagttcttctctctggtattccagaggatagaaagcagtccactgggtggcagcttcaggagatggatgtagggaagcatttgcttactacagtgctttctagagatggtgggcttgccaggcgctggagatttacaaagacctcacagattttgttgagaatttaaagggacttaaatgtttattggcagattcaacttccagaaggtttcttttcatccctctcctcatctcttactcttttgctttcatccactgccttggccacactggtctcatagatgttatttaagccccgccatgcaccatctcagggtctttgcacttgctgttcttcttggttgaaatacttcacctccagatatctggacaatttcctctcatgtttttgctcagattacaacctttccctggactccttgtccttctttctttttagtgtttctctatccccatctctcttacacacacacgcacagacacagactcacacacacaaatacgcatatatgtgtatgttttcctctaacaaaatataagccccacaagggccaggacttttgtcggatgtgtttgccaatgtatccccagggcaagtatagtgccaggctttcagaaatgctcaagcaataatttgttgttgaatagatctctgggatcttctggttccttggaatttcaccagtggtagcttgaatttcctattcaggcctggacaaacatcctgtaaagaatgccacctaatttgtatctttgaaggatgaatccaataatatgtgggtacagtgaccactttcaagcttttcttctttcttcttttctccccctgcatcaaacaggaacagcatcttctaaaaacaaaactttattcattggtcagcagtttcatgcaaccattgagtgaaatccaatgtggaaaggaaatccaaaactttactgcagtgtaatttgtttcttctgtgttgctttgtgtacagtaaaggtcaataatgcacaggaaagctaggtttaatttctttgatgtgtaaaaattagtgctttgtcatcagttacagtggcaggaggacaaatcactggcacataaagttgttcctgctacataaattacaaatcttgttcggaaaaaaaatactcacatcatcccttgttattttaaaaatgccaacactgataaacagtcagccttggacatgtattaaaatcttcaaattgtactaaaataaatttagccttttaagataacacctcattttaatttcatacatgattaaatccatcaattcaaaggtcttttaagatgtaagttttgaaatcataatagtaccctctaactccctgcgaaaaacttaaacctctttctacttcattaataatgttcttgacagacaaaatttttaaagaaaatcctcagctttgttttgtgtttttgtgtgtttttcttgagaagaggaaattaaattatgatcataaatccctttcatttttagaactagatttttcttttaatcataatccagaggaagtggaaaaagctttgtgaatcaagttttgtatttctaacatgatgacatagtctaaattattgtccaatattcagcaaaatctttatttctatatgtggcagaactgaatattttagtctcagcataaatagtgcctcctcttccctatccaggttgatgactgcttccttgtgactttgcaaacacaacttcttmttattattattatttcaataggatttgggagaaccagtggtgtttggttacatgaatatcttctttagtagtgatttctgagattttagtgcacccatcacccaagcagtgaacactgtacccaatgtgtagtcttttatccctcatccccatcccaccctttctcctgagtccccaaagtccattgtatcattcttacgcctttgcgtcctcatagcttagctcccacgtatgagagagaacatacgatgtttggttttccattcctgaattacttcacttagaatagtagtctccagttctatcctggttgctgtgaatgccattatgttattcctttttatggctgagtagtattctatggtatatatataccacattttctttatcagcttgttggcggatggacatttgggttggttttatattttggcaattgcaaattacgctgctataaacatgcgtgtgcaattttttttttgtataataacttcttttcctctaggtagatacccaggagtggaattgctggatcaaatgatagttctacttttagttctttaaggaatctccacactgttttccatagttgttgtactagtttacattcccaccaagagtgtaaaagtgttcccttttcaccacatccatgccaatatttattattttttgatttttttgattatggccattctgcaaacccaactttgaatagactatcaaaggttggggctggatatggatctgattactcaccctggccccggaggccaccttcaggcagagcagtcctgcagcctttccagaggaggcagcctcctgcccatgtcaaagaccttggaggctagagtatttgcccttctgctctaatcaagatctccttggaaagaaagctcaatcagcaaatctttattgagtaccttccatcagatagattctccagccccaagctggtatggtgaggataactatatctactgtaaaatacctgacctaaagaaacaatgcaacatgtgcatatacaattttaaaagaaaagctgttcaccattttctaaaggaaaaattatatctataatgtatgtattcacatgtttatttttatatatcaacatttatctgctttttctttccatgcctcccctctttccgtcctttcttttcctcstggatacatycattcctgcagcttaattyttattagctaagggttatattgcagatgtatgaattaagagcaaaggctttagaatctggcagatctatgtttgaatcccagctctgccacttcacaaaaagattgttctatttgttattgttactggcacttttattgccatcatttgtagtatagacaataattacttgtgctatttatgtttattagttatttaccatatcaggcactaagggatttgcatgtattttgaatttaatccttgtaacaattatatagtgtaggtagtattatccccattttatggctaaggaaactgccttgagattttaagtaatatgttgcccaaggtcacataataagtatgtaaaggaactgaaactagctttgtgttttgaacctacggagattctctttatcctctgtaaaatggagatactgattcctgccatggtagctagttgggatgattcaatgatatgggatatttcgcatttgcagtttggttccctgcatataacatatgctcacacaggatatggctgttcctgctctgcttctgctacctccttcaaggttgaataatctttctttcttctctcttagctatttcccagcccctcacttaagtttataactatattcttttcatcaacctagaaaaccaaatgaarcctgaagtattgagaactcaggaaatgtttttgaggtcccatgtgattcagtggcaaaggcagagcaggtgcagatgcaaacctctgggctcttagatgtgaaccctctgcctggtgttttatcctagcttgtctctgcagcaaagcaggtgctggagtctgagggggtccttgaggccagcttcccctgggcacagaaatgtgctctccctagaaccatcacatggcgattttcctggcgatcaggggccctaaatggtgaaagggttttggccatacatcactaaaagtgtgttagtaagaggcatgaggccccttgggactggatgtggtggatgtgtcatatcacatatgaagtggcatgatttgatagtgtgccattttctgtctgtaactaaatcaaattctgtggttgaaaaggactcatacataatcttggtgtcctttaacgcagtcatagttcttgtgttaaataagttaggattggagagttgcatttctagacccgaggggagcggttctggatcttgctctggtttcctgagttgctgcagcayccaaccctgagcaattcctgtgactcgtggtggttgttatagagagggtacacagtggtgaatgagaaggaggcttattattgttatctgtaggcaycacttttgcttgaaaatgtgtaatggcaaactcaaaagtagaaatacttattccctattaattgtcttttttgtcataactttttaaaattttttgggttctttgattcaaatttcacaagatctcacctaatatgctggtaaatttcaccagaagtatgaagacagaataaactttcttgaatttttttccctgcaatgtaacagtctgcttctagatgacttcttgaagaattatctacctaatttgtattttttaggagacatcagagacagaaaaaaattcacattaaggaagatatgtgtattatataagtaaatcctctttgcttacagttcttttttaaaacaagcattttatacaaagtaaaataactttagcagtttggttcatttttaaaatatttcatgcctgcatgcatgattaattgagacrawcattccatttaactaatatttgagggcatactatatgccaggaaatggggctactcaggccttcacagatcttgtaatctatcaaccaatacaaacaaataatcaggccattataatttagaggacagtgttttgagggcacatggcaggatgatctaatgctgacttggtggaggacgcaatgacttcctcctgaatgaagtagggtttaagccaggtcctgaaggagagtgagtgttaacctggtggagctgttggggcaggctaggggckttggactagggaatagctcatgtaaatgcctggagtgggcagccagccatggtgttattgtgttcttcttcttctcagagatatttacatgggcaagaacttcagattatacttgattgtgacatttgcactttcaaaaaacattgcaaaactgcctggtgaaaaccatcccagtcttgacaggtgcatagtctgatatttccaaaggtaacagttgtcacataggtggtcctgccctgttgagacacaagcccrttaagcagtttattttcaccccatggccagattggctttggagcaatcaatgcagcctggtgcagcctggagaagagatcctactggataaggtgggaagcctttgtaaatcaaaggttctaagactgctcctactgggaagatagaagtgatgggtggaatggatggataagtataaagaaattctttggttctagaaccctcaatgtaaaaaacattagaggcacacaggtcataatcatgtcgcataatttgattaatttcctaagaaaccttaatactacaaagtcatattgcatcataaacttacgttttatggagcaaagagccctgggcttgggaagggtccacagggtctgggttctagttccaaccacatgccctggggtcaattatttaataacctataatgaagctgtcgtattctatcaccacgacatggatctggttgtgccaaggtagacatttgagattacataccgtaaaataccgtggaaaataactgtggctctcaccagctctagcctctttctgggcttcatagctccccttccccagtgctccctgagaatgtatcattcagaccatcttctgtccttcattcrtagtcatagtcccatgcctcagtgattcaacaatcaggctctcttaccctatttttgcttacccttcttttttctttcatttcagatgttcagtaactgaaaacaaaaaaggtttaagtatgataatgaatttttttccacactcaagaatataaacattgaaaagattggcctctttatgctccctacaatgagtgacaggttctgacttaattcaacttaactgtagagattattggcataagagttattaatataaaagtcatgactcaaaaaatatctccactattaaatatcccctgcaaaactttattatccaggtcttggcgtgagctttgattgtgttgaaagaatgaacttgtgtttttggccctgtaatgtgaatgatggacaggagagtgatttttctgttactgggtggtcatcctcttgaacaagaggattctgaaagtttctttttatatatttgtgtatgtattatttttccttttccatttttgattgtagtgaaagttctatctctaagcattaaaaattaaacatttaaaatgtgcttttgcaatggggaaaggactccctatttaataaatagtgctggrataactggctagccataagcagaatagtgaagctggaccccttccttagaaaaatcaactcaagatggattaaagacttatatgcaaaacctaaaactgtaaaagccttggaagataacctaggaaataccattctggacataggacctggcaaagatttcatgatgaagatgccaaaaacaattgcaataaaaacaaaaattgacaaatgggacctaattaaactgaagagcttctgcacagcaaaagaaactatcaacagagtaaagagacaatctacagaatgggagataatatttacaaaccaggcatctgacaaagatctaatattcagtatgtataaggaattttaaaaatttacaagcartgcttaatgacgagttaatgggtacagcacaccagcatggcacatgtatacatatgtaactaacctgcacattgtgcacatgtaccctaaaacttaaagtataataataaaaaaacaaaaacaaacaaacaaaaaaataatttacaagcaaaaagcaaacagcccctctagaaagtgagcaaaggacatgaacagacagttttcaaaggaagacatgcaaacagctgacaagggatatgaaaaaatgctcaatatcattaatcattagagaatgccaatcaaaaccacaatgagataccatcttgtaccagtcacaatggctattactaaaaagccaaaaaactcagatgctggcaaggttgtggagaaaagggaacacttatacattgtttgtgggagggtaaattagttcagccattgtggaaagcagtggtgattcctcaaagaacttaaaacagaattaccatttgccctaggaatcccattgtatacccaaagaaatataaatcattctaccataaagacacatccatgcatatgtttaytgtatcactattcaaaataacaaagacatgggatccacctaaatgcccattgatggtagggtggataaagaaatgtggtacatatacaccatggaatactatgcagccataaaaaagaacaagatcatgtcctttgcagcaacatggatggatctrtaagccattatcctaagaaagcgaactaatgaagaaacaaaaacccgaatactgtatgttctctcttataagtgggrgctaaacagtgagaacacataaacgcgaacacaaagagaagaacaacagatactggggcttatttcagagtggaaggtgggaggagagagaggatcgaaaaactacctatcaggtgccattactgtgcttattacctggatgatgaaataatctgtacaccaaaaccctgtgacacacagtttacctatataccaaacctgcacatgtacccctgaacttaaaataaaagttaaaagaaaaaataaaatgtgcttttagaagtatccagaccaggccagagcttgtataaatccatattactatcttgcagttggtcaaagtagttaagaacctgtgtaatagtgttttctgggatgttgcaacaactttctatctttattgcaagggctttctgtcttcctattatactaattaattctttcagtctttcctgattattgatgccatgatgattttttttttaagaatttgatcctgcaaacttttatgcctaaaatctctctagctttactattgcctccagcaggaatttttcacctaagttcatcaattgcagtcaggaaactggtaaactctgagtctttctgcaaacttctgtgtgtagaggatccagagtttgagtcagaccctgaaagctatccttgatcagatttagaatatcctaactctttagtaagaaataaacccgtctagctttacatgcagccaccagccgtgacgtgagactcaccccacactgacctattattcaacatttcctgatgcttccatacttctctgcctttgaacctgatgatcattctacttataatgtcctttcctcatccttagctttgcctgttgaaaccttcaagattttactccagagccaccttgtctggagagattttatttactttgtgaggaacaaaatgctgctcttttatcttttctcctcctttataacactcatcacctctccccactaagtttgtggacaagraatgtattctgtttatctatgcattcccagcccagaggaaggtactggcccagastaaatgctcattaaatattgtgaataaatgggcaaaaggatagaagacacattctttacttagatggagttgagataaacttagagagttagtgctagaatcaacattgccttcttgcaggcaaatgatttacataatctggacatcaagttgcctgtcccctggatgaggtatctcagtctcctatgttaaataatagtaaattgattctttcttcaacacagagtataacaaatacctctaagtattctaagttttatgaaacaaaagatttctggtgctggagattgattttggtagttataagcttctcaggatatctccaaagagacaaggggcctaggtggatagaaatatttcccttaaatcagcctgataaaaagttctccatggtaaggtagcctttgtcttgtattaaaacgcagttttctcaccaagtgactttggcaggttggtgaatcctttaagaaaaagagatctggtctggagttgtggtcccccggagatttagttgctattgtgatcatctgatgacagcagaaaacccagggggatcagcatggtttatttcagactgcagggatgtcagcctgttattataggagtgggagctacctaggcagatggatgcttcctgatttgtggattgggaacacgaattgagcagcagccaatgcagtgacacttgtaatactcttctgaagccctccttttttttttctgtccactgagaaacagtacccacctgctaatctacaaggcaaagccatccttatttcaaagtgtatttgatgcaacaaaattctttatgctgaaagsctttaaaaggcctctaaatttctagaaatgagatttaatctgatatttgaatcttatgccttatatccaaagaacagtctctccctagtccccatttctatatatagatgcagaaatttcataattggaaacctgtgactttagcttatggcttggtcccttgtgaagaatgtattgtgctttttaagtgatgtgtgtatttgtctgaattagtctatcagaagtttctttttgagaatagccattaatgaagatgagaaacagagctgtgagggacatgaggaggaaaacaaacccattaaagagaggaaagaactccctgccccaaccccaccaacccaatagcatttaaggccaccaaagggaacgttttctgtgttactgtttattcaggagctggcttctaacctgccatatgcttcactctatttagagagcctaggtaatgttctctcattttgtaaggagataatattacttaacctaagagcttgtgcaaaactgggggaaatagttggctaataagttacatgcatccatgagttgcacaatagagatgaaatgatgacaaattgggatgagaggcaatgagtgttgtatgggaactacaggatttaagatttgaaaagaggcattttaagagcccatttttttgctttttctactcagcttaggaccccaattattacttactagcctcatttcactggacttcacccattcacacacctgtcacccaaaatactaccaaatattttctttaatgttatttttgcatttaatcctcatgaaggttaataaagtcttctctctctatgtggtatgaaagcataactgatgactttattggtgcagatatattatggctgcttttgacgtttatgttttccgtccagatagatgaatgattccagtgaaagtaaatcaattgcacccagactgtgggtataaaacaccacgctcagggttttccttcttgtctggcagatagtagagggtgtgaaatattgaaatttgacttaatgctgtatgtttcttctgaaaaagagaatttcctttgactatctcctaaggtacatctgtgattgatatttgccctgtcatttagtgccaatccagggaggggatgccccttttgtggggcctgtttgctctccaagggagccttcatggcttccttyggtctagttggagtaacctgttttttcttctagaggattgaattcaattaacagggattacaaattcagttattaggaatttatcagtgatggcaaatggaattttactggtgtattagtccattcttgcattgctatcaagaaatgcctgagagtgggaaatttataaagaaaagaggtttaattggctcactattctgcaggccgtacgggaagcagagtggcttgtggttctgaggaggcctcaggaaacttcaaatcatgttggaaggcaaagggggaacaggcatcttacatcgcaggagcaggaggaagagagagagttgggggtggggtgccacacctttaaacaaccagatctcasgagagaactcactcactatcacaagaacagaaccaaggggatggtactaaactattcagggaggatccaycccrcctacacacacccatttccaatcacctcctcacctccaacattggggattacaattcgacatgagatttaggtggggacactgattgaaactttatcaactggattcccaacaactggaaacatgagagagtaatttcagtttctaggatgggtttaactggctttcatgataaaaagagaaatatttcttgatccacaagaatamaggtttttgttgttgttgctgctgttttttccaaaagtgatttgagttcctagtgtaaatcaaaaccagacgcaactgtaattgccaattgatggtacaaatggacaggtaaatccaagaagtgtatttcratttttaaaaagttctgtaccctggaattcccttcttcagcttgccttscacctctgcattcaggagtgctatggccctgatcaatcaaaatgaacactggctgtaaacaaccagcatggtggtggtgctatgcctgaatgtcagccttttctggtcctttgagcaagaattaattgcattctcattaggggtcctgggaacttcagggtcaatctttcttgtggaattgagcacattgttttaaagctatttgtttatttgtccagttcaatttccttctakacagtgaagcacttgagggcagggactgtatttatctacctttgtatctttatcaccaacttggtgcctagcacagagacagttctcagtaaatctttgcaaaataaattaaaattgtagaggatatttagaatttttattctaagataaatgcaaatgtgttattgtgtcaagcactcatctgtatttaaatcccaattactggaatgtattttaacaatagtttagtctgtaccctaacattgactgtgcgaatttctgacttatagtttaaaagtctctagggaagaaaatttcaaaacttcctcgttgctctttttagaagttcaattacagtaataatcagcacctactaactcactgggatatttctagtattatttgctctcatgtgaccatatagcatgtatctcaagtgctgcacaagatttgcagctgtgactgtatggaaagcttgggaaatattgtgctgagctccttttgtaagggatgtggtttctagattctgtgttcagggaaaaaaaagtctaaaacctgcaagtactcatttgtggaacatttaatttcattactttgttagcaaagcgtgtatctggaggtaaacaccaatcagctacagttggcttcaggcccaagagaattgaggttaggagtcaagacagaaagatggctattgcaggaaaatacgtctgctctagactaggataaattttcctattgaaatatgaaatagaccattacacagaagtttgcctaccactaaaagtgttctagaacattatagttcaagggtgccaaattttaagcaaagtcctgtggtttcagtgatgctattttcaaatcatgattcctgtaagaacaatctctgccactaaagtgtagctttctctcacacacttattcatatattctggctgtcctctgtcttccactaatctgagaagtttatggcacaaatctgattcttttccttaaatacttgcattaggttaattcttaggtggcccagtaaccttgcgaagaaagatcagtttggggcaaaccatgtgaagccccctttcaaattcatttctgccctactttctgtctgctttaatccaccacatttccttgtctattttgtactctaggtcaaaccacagcagcacattttaaaacctggtaggaagcgggtctcagagctctagaggaactattatgccagtcttacaaattattttttaattatcggtttctcagacaactcacttggtttactttcaggaaaaatgttatcgctgtaaatgagttgtactttcttctgtcagaaaacataaagtgtgtaaccccttttattttagctgagtgtgaatttttagattcaaattgtttgccatgtatttcttagtttgtaaatttgaaatgaagcaacataaacaacggtttctgcccggagaaggtcatgccagtcaggaccctgcgcattgatggtcatcttcaggtgattaacgttgatagatatctgagcagagaatagtgcaggatggagaaggagccayccacagacagggtttagcacattcagagtagactcaccaggctaatgctcatgggcccgctctggtttcatttagggctgagagactgattatatgaatggacaatggccagaccctatatgaaaacagaaccctgacccacaacctgcagcaacccgcccaggaaactgactccttattctcaataaagaacccagaaagctagcctgccatgagttagacttgtaacaagtcagattgcaatctccagtaaccatctaggaagctaaacaataacttcaacaattgacctcaagtggycaggacttgatcaataactggcagcttccctaattttgtgtccccatttttaacttaggatgaacgagagacagccaaataacacacccctaacaaatcagacaggatgccccacttcctgttagaccacctacagcttccctgcacccataacctttaattagggcacatctgaaaccttcctttttttcaggataaagctttcccacttctcttcctgcctttgtgtctccgccaaaatgcaagtgacagtgtggctgactccctgcctctagcaagctcagaataaatagcctttgcttgttctcatttggttggtctttgtttatttccagagggcctagttgggcaagaaatgatattgtccaggagcacgttttaatttcatggtctctgtaggtakgtgattccatgtagctgttgttccttcaggtacattagcatttcctagctttggggtgggggctgtggctgacctgtgagagatgcagccttgctcccacttgctgttccacgtgtggaaagggcagagcagtaaagcacattgctaaatgtcaacgcatgcattaggtattaccatctcacggtgaaccccattcacatggcgcccagtagggaggagcagaggggcctctttgcaacagagatcaatggccaacagcttttctttttttaaaatgtaaaactataaaggaaaaccttttcaaacattatcctcaaaagatttggaaataggagatctgagattagtgggtcactgaagggctagcacttgcttatagatgacttagcttagaaactccaacttcctcatacttttgtttctgctgataatagaatgcagtacaacaggagtgaaaaacaaagccaaattatttctttatctttttctaatgaaaattcaatgacatttcagcagtgacttcttcccaaaccttaaggagtacatataagcgttaagatgagaagttgaccaattgcctaagaacagtttgaagcatatcacaccttattttgttattatatttggtttctactacgtagagttcattatctgtgttctctctgttattactatatttgagaattgtaattatggagctttaataggatgaaagaaaagaaggatgcaaaaatacttaaatactgttcatgatgaaagatctacattattttcaaattatcttttattttattagctgagtttttagggtcctatggcaatatactagagtccaagtattttttcaaagtaatttaattttatgttgttatgattaggtaagtctactgaattgaatcaatttataggaaaagtatgagattagtattattaaatttcatactgtagtctggtttgctttaatatacctatatatgtatgtgtgtgtttatttaagactttagttgtgaaatatagactcctgttagtaactgatgccttttccttttctctttgattagaagaaatacattagaaaggtatcagaatcaactcatttgccagttggcaaacattcctggaattttaagaattgtaacaacaataaaacaataactgtttattaagtgcttactatgtgcactgtccttagtgctttacttctgttattttaagtgttagattatttatagagatcacagtaataatcctttcattgtttatgcacgcacatttgcaatgtaaatttgctgtytgccccacctccttctgtgagggaagtctattttccccttctctgaatctggtctggccctttgactttctatggtgaataaactgtggtgaaggtgatattttgcaagacaaggccttgggagacactgctgctttctctctcagcttcttggaacccagagctgggatgaatgaccatggagggaagaggctcagccacagaactagcacaaccccttgatatgcaagcgaggccatcttgaacaagccaggtccagctgagctaacagatggctacaggcaagacccaaaccaaatggtaccccacagaattataaaccaagcaaatgtttgttttttaaaatttttttttattattttatcgttaattgtagtaaaatacacagaacataaaatttaccatgttaactatttttaagcgtacaattcagcagtattaagtatattcacattgttgtacgattaatctccaaaacgttttcatcttgtagaactgaaactctatacccagtaaacaacaacttctgtttctccctcctgccattccctcacaattaccattttactttctgtttctgtgagcttgactattctagatacctcctcatacaagtgaaatcatgctatatctttatgtgactggcttatttcattaaggataatgtccctcaagttttatccatgttgtagcatatatcagaatatccacctttgtgaggctgaataatatccactataggtatatgtcacttttttttcatccattcatctgtcagtggacacttgtgttgcctttatccaaatggctgttgtaaataatgctgctaaaaacatgggtgtgcagatatctctttgagaccctgctttagattcttgtggatattcccagaagtggaattgccagattatatggtaattctattttttaactttttgaagtgttgttgttttaagccattcataactgaggtgatttgttctgtgtgatagctgaaacacctaactgaattttgacaacaaggcttcgaggtagtttctaccattctcatttttcaagggagaaacttcacttacccaaggtcgtatggtttggacaaacagaaccaggctttgayaccatgaagtctggtaccagaacctcactctgcggcacactgtaccactttacagaaagcatgttcagaattgttttacctatagtggttgacgctggacagaaagaaacatcagtaaccaacaatattgaaaagawccctatctatgactgatgtagttcaaggaagtatacttttccagagtttgtagtatttatccattgtatggtggcctctgagcttatttctgtgttgtcagctaggcttaccctggtggtgttggagggaatagtactggatgatctacagggaggtccactcaccccactccagggctgctgggtccagatgggcaaattgggttcgaacaaagggccttgccagagtgggctggaatccagagcccatctggattccactcaggtgggaccaagcctgtgctctggccatctgggagyaaggggtcctttttctaatggatcctccccggaaaggctcctttgtgcaattcatctgaccggagaaggtcctctccttaagtccttcctcttccctcagatagcggggctgttgttgaactgtatcacagctccctgtcctccccatcaccaagtccctgccccttagtgctggatgactgttgtttctcctccatcagggtaacctgtgttgttgaagaagccaccagaaaaaactgtggttgagcaataatgaactcttgacttgagcgttaaagcggggccccagtggtttgcaggagccggtcaagtagagatagaccgagatggagatgagccactgtcagctgagtgtgtaatccaggaggctgtctttacacagtcctgggctttgaagttggagcaactcctggctttaccacctaggaaccatgtgactttggacactgtacttaacctcatcaagtctctgagacacaggtacatgagaaatgcctgccttacaggactgctataggctcaaaaaacaaagtctctaaagggactggaagagaatctattaaatagtcaatgttcgatacatgttcattgttaccacacccattcttcctcattacttccttcacctcctcccaaattcttctacagtaataataatattactattacaactattatcattaaaaccagaggccagtttagttagatttggtggtatctgatatgattcacattaagagagttataatgaagacctgcttgtgattgcaaaggttcacttgcaaagggataggatgaatgggatgtggattagcagcagcattataaaaaactttacaagtttcagttgagaataatctaacatgcttcgacctaaagaagcatacaagtaagcccaaaaacaaggagtagggaagggcatccaccaaccacaaggccaagggaaggcctaggtatctctacaggacagtgaagaattgtgacctatagtttaatccaccacaaagggcatgcactggtatggttggacagtttttaaagcatttatccatcctaaatgggcagtcccaatgcttgattagtagtgccagtgtaatgcctattgttaagtattttgagtagcatcctcattgctaagaacttcatctacagtatatcatttactctttttctttctgcattagtctttatattagatacttatctatgtatttatgtttatttaaataaacttaggggtacaagtgcaattttgttacatggatatattacagtagtkgtgaagtctgggaggaaataccatttacttttaacaacaaccatatactttttgtatatataaagcacagatacatgtgcagtatacaaacagatacacagtatatctgtgatattaaaattttatgtgggggagcaattagaaaaaatgtctaaaaagtgtccttagagggacgataatgaaaacatytaagaattactggcaattgatatttttattaaataaatgtgaaaatataggttgagaggttaaataattagtccaagaacataaaattattaggtgtgagagctctgacttatacccaggtttgtgcgataatgaagtgtgtgcttttatccaccttaccaccttgcttccttgcccttcattcagctctctgaacctctgcttccctccatgtgctttactgcttcccatcctcccaratttctctgtaccctcccccggtagtggcctagattctcctaaactgctctgtcccccttctaggatctgagatcccacctctttggtttcattgttagtgaaggaatgcttcaagggaaatttctgctcttgggttggaggaatgagtgtttgcattttaatgcccattcagagacatttctcaaaggactgagtcttttccagtgggacttcaggatctctcacatgccagtgggaagcaatttggaactgtgtgctttgcaaacccgtgcaaatcatagcaggaaggccgatgcctatctctagctaaagccttatgtgctatatatcttcatgtgaatgtctggacaagaatcccctgctcttatgccataacctgggctctacacctgaatttctccatgtagcaattccaagaaaattcaatcttcaaaacacattttttagtaaatagaggcagccatgagaaacattttgttgttgctctgaaaagttgttgttttataaaatggaatagtcaatctcagctttctaaacagagtttctaggatcaatttatcaggaatgagtggattcctttctcttcctcccaaagggtctatggaagatgaagaatacaagcaataatagcaaatcwatcaaatttacattgcaaagartccttcacaaaagtacctgagagggctctacctagataatcagatgctaacattacctttttcccaaatatagtccacctctgcaaagaaccaaggagtgtgggcttcagcttctctacagagtcgctggtggttaaactcaaagtagcagggcctcacatttgggcactgctgtgtaggaggtgccaagagtcagtcactcagctgatggcctctggtttccaaaggaaaaacaaaaactgttcagagctattgttcaaaaaggaaaaaaggattactccccaaattttagcacccaaaagcatacatgtgagtgtcaagtgctaacatttgcccaagtcaggtctggtggctcatgcctgtaatcccagcactttgggaggctgagacaggaggatcgcttgagcccaaaagttcaagtctagcctgggcagtatggtgagaacccatctctacaaaaaattaaaamtattagccacgcgtggtggtgcctgcctgtagtccaagctacttgggcagctaaggtgggaggatcacctgagcctgagagatcgaggctgcagtgatccatgatggtgccactgcactccagcctgggcaacagagcaagatcctgtctcaaaataaataagtaaaataaaatacaataaaatttgcctacattgaatgcctacaaaagccaaggttatttcttaggttatttctctcatttgatataatggataaattcattcaaatgcctcagtttccctatctttaaattgggaatcataggaatacccacctgcaatagtttactagggctatggtaacaaggtgccacaaactgggtgacttaaatgagaaactwactgtgtcacaattctacagactaggcatccgagatcgaagtgtcacagcactgttttctttctcagggctcctggctgtgtgctgggaatctttggtgttcctgatctctgccttcatcttcacatggtgttctcccctgtgtatgcctgtgtcccgtttccccttttaacaatggtmccagtcatgttggracagggacccatcctactccagtgtgacctcattttgttttttgtttgtktgtytgtttgtttttagacagagtcccactctgttgcccaggctggagtgcaaggatgtgatctcggctcactgcaacctctgcctcccaggctgaagcgactctcttgcctcagccaccatgcctggctaattttttgcgtatttttaatagagacagggtttcgccatgttggccaggctagtcccgaacccctgacctcaggtgatccgcccgcctcggcctcccaaagtgctaggattacaagyctgagctaccgcacccgaccaacctaattttaatataacaaattatatctacaatggccctacttctaaataaggtcagactctgaggtattggggtttaggatttcaacatacgagttttggaagaatayaattcaacccatgacaccacctcacatggtttggtgtggattaaatgagtacaaaaattgctatgtgagggtttgctctaattattattagtaagtagatgtcttaaaggataacaacataagcaatgattactacttgagaacctactaagtgtcagatactatattgtcaaaaacttctaatcctcgtagaaaccttcaaagtgtgttttttatctccagtatcttcagtttacaaatgggtaatctgaagcttagagaggtgaaaagattttgatgtacctgaggcttcacaacttgtttatgattataaacaagactataatctctacttgatggtgaaactctttgaataatggaagaaggttttaaaaattcatacctccttactttagtttttgtgtgcaaatgcaatcttccgtataatgtattgagtttgcataatcaaggttctaaaataattttttagataggaagcttagctatggataaaaactgccaattcaacagataaaagatagtcattttgatcttgtcaataattactttaagacagtggcaggtacctgatttagttaacattcagtgaacagagtccctgaacctgtgctaggaatcccagtccaataaaaccttgctcctgccttcaaagagctcacagttagtttagagagtgtgctaaggggataggccacggggccaggcaagattcacggggccacggtgaggaagattcaggtttatgatgcgggtgtgaaataacttacttgggatcaatgaatcattgaagaattctgttttttatattctccccacccaggcaagagtgcagtggcrcaatctttgcttactgcaacatctgtctcttgggttcaagggattctcctgcctcagcctcccaggtagctgggactacagatgcccgccaccacgccgggctaatttttgtgttttcagtaaaggcagtgtttcactgggttggccaggctgatctgaaactcctgacctcaagtgattcacccgccttggcctcaaaatgctgggattacatacgcctggtgtggaattctttaatgcagtgagaggagatgaaggccactttagctaagcctttaggttcattgaagaggccattcaaaaagatgaaaggtttgacatatacttccctatatcaagccatgcctgatttttcagaaataaggtagaagtttaatggatgtcatagtctaaaaatttgtaaggtaatcactataaatggagggaaaaaaacccagttattttctcttagggccatttctcatgggaattcagactagaataaaaggaagttatttataggatgtttaatacccagtccctcaccaggattctagatagaaaaaaaatatttctggagatggaaacgctggtttcagtgtcatgtggaaagttttgttaaacacctatcatgtgcaaaaaatgaatatcttctcgatttagaagagcatatagtctagcagaggaagatagatacttcaaactctccacctcacttgcctggatatgaaatacttcctgcttttgaatgaattacattgatgttgattaatgataatggaataacattactttgcatttggaggatgcttttaacatttcaaagtgctttccgaattatttctcctgtcaaactgtccaacaagcctggtgtggatgggggctgggctgacactggcactggcacagggcccccaggagcctgtcctagctgctacttttctggcaatgcctttcccttgcaatttcttcccagcccgcaccttctaccttttctctctagttcccacactgtgcttcctttgttttggtcttcctggctattgccttggattctctacatatcctgccgtgctctttgaagcaaagctattacagaaatgtaataaataataaatttcatcactcagacagatcaataaaatgcatgataagaagaggccattatggagagtgaaaaatgcgcaagaggatgcccacagcatgagtcaatctttagccaggagatgccaaataccaggcaggccattacggggtattttaagcttttatttgttagtacatccacagacatttgttgagggtatttttcccgctatgcccagggctaggcactggacatwccgagacatactgtgtccagaagctcaacaatttagctgaggagatggatgatgcagccataactaattgtaatgcagtgccattgcctctgtagacaataggcagagagcagtgagagttcagagggggaaggaaccagctttggagaggaggggagagggggcttttattaaagcgaggaaattggacttcaattatacagtaagagcaggatttttctcaggtggaagagttgaagtaggtgtgagatagattattttcctcgggcaggaaatatcacatgcaaatatgatggatcctatacttactgacaacgtctagggattttttttggttcacaatttttattcaggtatttaaagtctttctcaatctgggacagtttagataagcagccttacttttccactaagcctgtttcccactaacctttttttttttttttttttaactgtttaaaaggataaggcccagtaagatagaagtgagcacaaaagcaaggggctgctgggctccattggcatakaatataggcagagtgggcttgggccaccasctgtctcctggggttctcaggcctggagtcctgggggagcctcttgtccttttcgcttctctagcctccttgaaggaagaatctgaagggagtgatccasccttattatcatcctggkcacatggagagaaaagatagaagggkgatgctctttcttctaacaccctaktttttgaatatatggcccaagtcagcatccttgaacttgaccagtcagtgacaatactcctcttccgtggaggaagggggaaggatgtggagagaggatgtattaatccattgtgcattgctataaaggaatacctgaagttaagttatttataataaaaaaaaagttttattttggctcgtgattttgcagagtgtacaggaaacaatggtgccagtgtgtgcttttggtcaggacctcaggaagattttactcatggcagaaggcaaaggggkagcaggtgtgtcacatggtgagagagggagcaaggggggaagggagaagatgccagactctttaaacaaacagctcttgcatgaacaaacagagcaggaactcactcattactgcaagggaggcaccaagccattcacgagagatcttcccccgtgacccagcacctcccactaggtctacctccaacatcagggatcacatttcaacatgagatttggaggggacaaacatccaaactatatcagaggagcactgaattatatggtacggaaacatcaacttccaaccacaactttgttatgaaattggatacagggctgagataagatgcaaagaaggccctaggctaatagaagtttagtctgttacctccttaatctttttcttctgaattatcctcattcatttactctttattctcacctcccaggcacaatgctttagcctcttttgcatttctgccttttcctattaaggtagccattgataaattaattctggaaaaggagtatgcactttggagtcagaggtgggttcaaatccaagaactattactaacttagcctcatgaccttgaaaaagttgctaggaaaattaaataagataacataggtataatacacagtacagtgtcttgctgtacaagcattcaataaatggcatatatacatatattcactgttagtttttcactagtgatgtggtatgctggaaagaataaaatatgtagtatgatgttttacgtagaactgcttaaaaatgcctgtctcttctcctctttcaggtctctataaagtttctaacttgttttactttttaccagcaattctgtctcacttcctggcagacttatatttagttctctaatgctgaacacaaactgctaactgtccagccaaatccattctcttgttcccctttagtctgatcatgtcttctccatttctcagcctttttatagttaagtgtggccatcagactaagtgttcatgggtatggaatgtaagtagaagtgatgtgtgccatttccagtcttggccattaacttcctacaagcaattctctgtgttcttatcttccttccagacacctgggatggggatgcccggagcaatcttggaagccagtcagctgatctgtccctcagctgagtccctgaatgactgttgagccaattgcctcccacaacatacagatacatttgtgagcaggcacgtgcacacacacagaaacaaaacatttggaaataaactattgccttcaagccatttaatttggggtcattttgttctgtcagtttatcctaccttaatacccatttttatctatctccaagtttgactgagatcgctggaaaaacccaaattgtaaggtacttttgaaagagcactgaaccaaaagcagaactaggtttaagatacttttgcacctaacagctatataatctttttatttacctattcaacccttctytttcttactgaaaaaaaattataataatctctgtgacttagttgagctatttaacttcctggttaccaggttactcacttgcaaaatgtgtcatggaattattgtgcaaaattattaggatagtacatgtcataattttaaatttgtagagtcttctacagcttcactgtccaaaatagtagtcactagccatatgttgctattgagtacctttcttagtctgttttgtgttgctataaaggaatatataaaataggtaatttatacagaagaaaaggtatctttggctcgcaattctgatatctaggaaagttcaaggttgggcatctgatgaggcccacaaactgcttccactcatggtggaaagtgaagcagaaccagtgtgtgcagagatcacatagtgagagaggaagcaagagagaaaagtgggaagtgctaagctcccttaaacaaccagctctagcaggaatgaaaacagtgagaactcactcaccctttcccttccccaggaatggaattaatccattcatgagggattctcctccatgacccaaacacctcccattagtccccatctccaacactggagatgaaatttcaataagagatttggatgggacaaatatccaaactatagcagtacctgaaatgtggatagtctgaattaagatactctgtaagtgtaaaatacaaactgtatttcacaggtctagtacacaaaaagaatatcagatggttcattaaaatttaaaaatattgattacatgttgaaatgataatatcttgagtctagtgggttaataaaatacgttattaaaatgaattccctttttttcacttttagtgtgactaccagaaaatttaagattatgtgtgtgactcacattacatttctattggacagcctgctctagacataaagtattgtaatttagtgcaggcggatatcctctaatacttctgaatgtgagtcttgagtagtaggagttagaaagcaagatttctctaaatgggattgatcatccttactttgcagggctgtaattgggattaaaaatcatatatgcatagtgcctggtacatagaagtcactcagcaaatactagctgttgttctcccaccttttcctttcattccaaaagcagcttccacaatcacaggctatatggctttggatttttctcatttaggaagaaattattttgtttcctcttttaaattcattttttttaaggattggaagaacatttgtaatcacaaaaaaaagagtacactgaggaaaatgagataaaggaaaaccctgggggagaggagtgctggttcctagctgggatgagctagagttggggggaagatcttagcggtcactgcatgctgagtgcatcacgtctgtaacagagctgggagcaagtgttagggtgatgttgccagatrccttcttttcctttttttwaaaaaaatttactttaagttatgggatacatgtgtagaatgtgcaggtttgttacacaggtatacatgtggcatggtggtttggtgcacctatcaacccatcatctaggtattaagccctgcctgcattaggtatttgtcctaatgctctccctcccctttcccctcaccctgcaacaggccctggtgtgtgatgttcccctccctgtgtccatgtgttctccttgttcactcccacttatgagtgagaacatgttgtgtttggttttttgttcctgttttaggatgctgagaatgatggtttccagcttcatccaagtccctgcaaaggacatgatctcattcttttttatggctgcatagtattccatggtgtgtatgtaccacattttctttatccattccatcatcagtgggcatttgggttggttccaagaatttgctattgtaaatagtgctgcaataagcatacgtgtgcatatgtctttatagtagaatgatttataaatcttttggtatatacccagtaatgggattgctgggtcaaatggtatttcttgttctagatcattgaggaaccatcacactgccttgcacaatggttgaactaatttacattcccaccaacagtgtaaaagtgttcatatttctccacatcctctccagaatctcttgtttcctgactttttagtgatcgccattctgactggtgtgagttggtatctcattgtggttttgatttgcatttctctaatgaccatgataatgagctttttttcatatgtttttgaccacatacatgtcttcttttgagaagtgtcttttcatatccttcgcccactttttgatggggttgtctgtttttttcttgtaaatttgtttaagttccttgtagattctggatattagccctttgtcagatgggtagattgcaaaaattttctcccattctgtatgttgcctgttcactctgacatagtttgttttgccaggcagaagctctttagtttaattagatcccatttgtcaactttggcttttgttgccattgcttttgatgatttagtcatgaagtctttgcccatgcctatgtcctgaatggtactgcctaggttttcttctaggttttttatggtttggggttttacatttaagtctttaattcatcttgagttaatttttgtataaggcataaggaagtggtcaagtttctgttttctgcctatggctagctagttttcccagtacatttattaaataggaaatcctttccccattgcttgtttgtgtcaagtttgttgaagatcagatggttgtagatgtgtgrtgttatttctgaggtctctgttctattcctttggtctattcgatttggtaccagtaccatgctgttttggttactgtagccttatagtatagtttgaagtcaggtagcatgatgcctccagctttgctctttttgcttaggattgtcttggctatacaggctcctttttgttccatatgraatttaaagtagttttttctaattctgtgaagaaagtcaatggtagcttgatggggatggcattgaatctataaattactttgggcagtatggccattttcacaatattgattcttcctatccatgaacatggatttttttttcatttgtttgtgtcctttcttatttctttgagcagtggtttgtagttcttcttgaagaggtccttcttgttccttgtaagttatattcctagatattttattctctttgtagcaattgtgaatgggagtttattcatgatttggttctctgcttgtttattgttggtgtataggaatgctcgtgakttttgcacattgattttgtatcctgagaccttgctgaagttgcttatcagcgtaaggagtttttggggtgagatgatggggttttctaaatatacaatcatgtcatctgcaaacagagacaatttgtcttcctttcttcctatttgaatacactttatttctttttcttgcctaatttccctggccagaacttccaatactatattgaataggaatgatgagagagggcattcttgtcttgtgcccgttttgaaagagaatgcttccaggttttgtccattcagtatgatattggttatggatttgttataaatagcttttattgagatacgttccgtcaatacctagtttattgagagtttttaacatgaagtaatgttgaattttatcaatggcgttttctgcatctattgagataatcatgtggtttttgtcattggttctgtttatgtgatggaatacgtttattgattagcgcatgttgaaccatccttgtattccagggatgaagctgacttgatcacggtggataagttttttgacatgctactggatttgatttgccagtattttactgaggattttcacatcgatgttattcaggcatattggcctgaaattttctttttttgttgtgtctctgccagacacaggatgctggcctcataaaatgtattagggaggagtccctctttttcttttgtttggaatagcttcagaagcaatggtatcagctcctctttgtacctctgatagaattcctctgtggatccatctggtcctgggcttttttggttggtaggctattaattactgcctcaatttcagaacttgttattggtgtatttagagatttgacttcttcctggtttactcttgggagggtgtatgtgtccaggaatttatccatttcttctagattttctagtttatttgtatagaggtgtttataatattgtctgatggtagtttgcatttctgtgggatcagtgggatatcccctttatcatttttgattgtgtctatttgattcttctctcttttcttctttattagtctagctagtggtctatttttgttaatcttttcataaaaacaggtcctggattcattgatttttttgaagggttttttgtaggtctatctccttcagttctgctctgatcttagttatttcctgtcttctgctaggctttgaattcatttgcccttgcttctctagttcttttaattttgatgttagggtatagctttgaggcccttccagctttccaatgtgggcatttaatggtataaatttccctcttaatactactttacctgtgtcccagagattctggtacattgtttctttgttctcattggtttcaaagaacttcttaatttctgccttaattttattatttacccaggagtcattcagaagcaggttgttcactttccatgtagttgtgcagttttgagttctaatttgattgcattgtggttggagagactgttatgatttccattcttttgcttttgcttagaagagttttatttcaaattatgtggtcaattttagaataagtgccatgtggtgctgagaagaatgtatattctgctgatttggagtggagagttctatagttgtttgttaggtccacttgctccagagctgagttgaagtcctgaatattgttattaattttctgtgttgttgatctgtctaatattgacagtggggtgttaaagtctcttactattattgcatggaagtctaagtgtctttgtaagtctctaagaacttgctctatgaatctgggtgctcctatgttgggtgcatgtatatttaggatagttagcttttcttgttccattgatccctttaccattatgtaatgcccttctttgtcttttttgatctttgttggcttaaagcctgtttcttcatagactaggattgcaactcctgcttttttttgggctttccatttgcttggtaaatattcctgcatccctttattttgagcctatgtgtgtctttgcacgtaagattggtcttctggatacagcacaccaatgggtcttgagtctttatccaatttgccagtctgtgtcttttaactggggcacttggctcatttacttttaaggttagtatttttatgtgtgaatttgatcctgtcatcttgatgctagctggttattttgcacattagttgatgcagtttctttatagtgtcattggtttttatattttgatgtatttttgcaatggctggtaccgatttttcctttccatatttagtgcttccttcaggagctcttgatttggctgttgatacttgtgtatgcttcatgaagttctcatgctgtgtttttcagctccatcaggtcatttatgctcctctcaaaactggttattctagttaacagttcctgtaaccttttatcaaggtgcttagcttccttgcattgggttcgaacatgctcttttagctcagaggagtttgttattacccaccttctgaagcctacttctgtcaaatccatctcattctttgtccagttttgtacccttgctggagaggagttgtgaatatttagaggagaagtggaattgtggtttttggaattttcagcattttcgcactggtttttcctcatcttcatggatttatctacctttgatctttgaggctgatgacctttggatggggtttttgtgtgggggtcttttttgttgatgttgttgttgctttctgtttgttagtttttctttaacagtcaggcctctcttctgcaggtctgctgcagtttgctggaggtccactccagaacttgttcacctaggtattaccagtggaggctgcagaacagcaaagattgcttcttactccttcctctggaagctttgtcccagaggggcaccaggctaatgctagccggatctctcctgtatgaggtttctatcgacccctgtcaggaggtctctcacagtcaggagacacaggggtcagggacccacttgaggaggcagtctgtcctttagcagagctggtgcactgtgttgggaaaatcctccttgtcaggatcagctgttctctttagagccggcaggcaggagagattaagtccacagaaactgcggacttaaccacagccacccctccccctaagtgctctgtcccaggaagatgagagttgtatctgtaagcycctgactggggctgctgcatttccttcgaagatgtcttgcccagtgaggtggaatctagagaagcagtctggccacagctgctttgccatgctgtggtgaattcagcccagtccaaaccttccagtgcccttagcactgtcaggggaagacagcccactaaagcctcagtaatggccgatgcccctccccctagcaagctcaatggtcccaggttgactctggactgctgtgctggcagtgagaatttcaagccaatggttcttagcttgctgagctctgtgggagtgggacctgctgagtgagaacacctggctccctggcttcatccccctttccaggggagtggactgttctcctgtctcggtgggtttccagatgccactgggatacgaaaaaactcctgcagctagcttggtgtctgcccaaacagccgcccagttttgtgcctgaaacccagggccctggtggtgtaggctcaccagggaatctcctgatctgcggattgcaaaaatctgtgggaaaagcgtagtacccagggcaggtagcacagtccttcatggcttctcttggctgggcgagggaggtcctstggctccttgcatttcctgggtgaagtgaagccccaccctgcttctgctcactctctgtgggttgcacccactgcctaaccagacccattgagatgaactgggtacctcaactggaaatgcaggaatcaccctccttctgcactggtcttgctgggagctgcagaccagagctgttcctatttgaccatcttggtccctctctcgccagatgccctcttttaaaaattcttaaatgtatttgcagtatcaaagttgagactayttttcttctcctttacagccttttcaatatcaccatctccctaagtatgcagttacaagaggtaacttctctctgtatcttatctaaggaaactgagagcagttagcttctttggtatgaggaaaatgggttcaagtctagcagttcctatttaaagacctttccttagctaatgcttttctttaatcaaatcaccgccccttagattctaaaggaaacaaccattatcctaatttcaggaatgttttatttttctttgtttttggctgaagatccataattttgactgtctaatatgaagcaggtattttccaatacttctctctcagaaccaaatacttgttttctcctcatatctcctcttgtcttctctccttttccttcccttttacctcttccctcttctacccttttccttctttccctttttctttctctcccatttcctcctttccttcttccctctttcttttcctttgtttgttcacgtgacagaggtggaaagaggatgacacattaggaagactgagaaactatcccatttgtggccacctagaaaccagaagttactaagatctagcactaatcaatttcttctcaaagtaccgatttaccttgtattaacatggctttcaagatactctttagactagtgttcccctcttactttctgaatgaagactatttatgttttcacttgaggaggtgaccctgagagattagggtatatagtcataagttacttttttaaattatagctttatagagataaaattcacttactataacattcaccagtttgtagtatgcagttcaatgggttttaatatactcacagcgttgtgcaaacgtctccactctttaattgctttatttcttcaaccttctacaaactaagtatctattaatagacattttcctttgctttcttctcccagaaactgccaatctactttctgtctttataaatttacctactccagacatacattttctataagtggaataatataattgtgacttttgattttttattttaattttgtgattttgtgactgggcttttgtgactggcttctttcacttagcaaaatattttgaggttcattcatattatagcttrtatcaatacttcattctttttattgccacatatattccattctataaagttaccatatcttttttttctacttatcagttatagccgcttttaggatgtcattaataatgttgctatgaacatttatgtacaggttttgtgtatatatgtgtctttaattctcttgggtatatacttaggcttaaaagtgttgcatcatatggtatgtctatgtttaattgccaaactgttttcataagtggctgaatcattttacaatcctaccagaaatgtatgagggaaacaatttctcgacagccttgtcaacacttactattgtccatcttttttattttagcgatgtcagtgactatgaagtgtgtcttgtggttttgatttgcatttttctgttgattaataatgtttaacatcttttcatgtgtttattagccatttgtatataatctttggatgaatgcatattcacattctttgttcatttttgagttgtttgtcttttttaattgttgagttgtaagagtgctttgtatattctgtaatataagttccttatcagatatatgatttgcaagcattttcttccattttatgtttgtcttttcacttccttgatggtatcttttgaagcatgaattttaattttgatgaagcccactttatttatttatttatttgtgtcacttgtactttgggtgacagatctaaggaatcagagcctaatccttagaagtttctctcatgtctttaaaaacacatatacataaaataggatggtttgcaatttctaagcagttcttgtcaggcttcaatggcttccagacaaagttttggctgtgctagcaaagaagtgttaaaatcttattttcatagctagccggtggtgtgaggagggcacagctgctaggcatttggacactgcagcaattgctttaattggacattcctcacccctctagtctgacttgttaatggctttttaagtgagacacaccagccaagtgaattagactatttggcaagtcaattcctgctcacttggaagcgttaatccatggaaagtaagcagaggccttcagccaggaggaaacctgaatttcatttgcagaggtgaaagagaaagaactattgtctgcagtctcaggagtttccaagtacacttccaagggctgactggaagaaaggtcttcttatctaactggctctctctctctctcaaccccactttttcaattcagcacatatttatttttcccttcaacatggctatgaagcatacaagtgaggtctgtcgtggtgcctgccctgtgaagcatctatgcatgagaaacaggagaaaaatacacatacaaaataattagcaataatttgctaataatgtaatctattttctgttcactccttgacttagcatattctgacttcagtcaaccactctacttaaattgttctcttaaaaaacaatgacactcaccagtaacctcttaggtatcaaacttgatgattttcaaaatctgcatytgtagcttcgacctttcttctgggyttcatcctgaatttccccggcctgtcacacatctttacatagaaatcccagcagcacatctttcacacattgaaagtcaaacttctcctaccctttttttttatcgccttttccaccttcaacaatgtattctcctcctctgatcatggctaaacaactactttaattagcaaattctcccattatcacccgcatgtcactagttttagtccatttacgtgacttcctttctattcccactccttcgtgtaaactttctctttcctaaataatacaagttaaggcctcttccacacccaacttctctaatcctttgtctacattttggctagaatcatttttcaaaaccacaaactttatcctgccagttcttttttcacacatcttcagttattcttcagtgcctggagaataaggtcgaaatctttgagctgcttttgtagacctgctcattcttgcctcaacctctctttctagccttgtctcacatagcactaaacccttcactgttctctcctcacatcatggtcatctgtacatccactctctttcctctccctgaaataccctttcttttgactgtttggtaaactcttagtcattctataagttccccaatccaaagtgaacttggaaagtcttccttgagatccacggcaacttgcgtagacttctgttatgattcttatcatacttctttgtgcacaaatttttctcttgctccaatcccttactcttgtctcctctgatgcatttttcaatctcttgctcttgtttattcctttctcaaactctctctacaccatacctccatctataaaccgttctgctcctagataagcagggactgtcctgcctgtgcaccttgcttagtgcctcactcagaagatacgctccttaaagggcctaaggaaggaatttgctgaactaattatgattaaaactatgattaaatctcacccatctaaaggcaaacatgctcaggtttcaaattagtctgaagtgtggtttaaggggctttttaaatgtgacagtttttgttgttgttgttgatagatggtggggagcgttggtatggtgggaaaaaaaccagaaaaaccaaatgtgaggaatttagtgatgcagaattgctgatggagggccagaggccatccctggagtggctcatctgaccctgtatacgatgttcgtttggatgggtggctgtattgtaatagtcacttggacactggctttagaagtcagaagagatttgactcaaggcttttataatatgtctckttcatggtcatctgcctaacttatctgaacttcagaatctactactgttatataaatgacctccccccaaccttgagggttttgtgggaataaataggataatgcttatgttgtgtttagtcaagttctttcatgtggcaagcacttaccaagtgggagctatttcatgtttacgtttaaaaaagtgtgtatctgttatctaaccagcctgggaaaatacagatgatatttctattatattttaccagttcccttgaggatggcccccccttttttttttaaatttcttgggctggggaccaagctctcattcctgaatgctatgagtactgagagagatgtgctgtcaaagccaatgaacggcagttgtacacactgacattttttcagaatttgtccttgggggtatttaagcagcaatgtccaagactgtaaacacagctgagaaatgctgttattacatttaagaatctcttttctgtaatattaagacatcttgatttaattggtaagccgctctgtgatagcattcaatttaaatgaggtttgtcgagtggagaatcataaggcaatctctcatggaccaaggattgctgatgaggtctaccttattgccatgtgtcagaaattaaatcactgtctattatcatgaaccagtcaatcagattctctttttgattagaatgcactagtgggggaggtagagaagtgagaatttaaaagaattttaccacttccatattgtgttgcttacttcatggtattagaaatgctgttggctcactatactagaatattatcaaccagtattttcataggaaacaaaaatatagacatacacacatatatacactaaaagaatggaaatctgaaggaaatagagaggaaaatataattttgtctttaaaaaatcccagaagcccttagactcccatgattaggattatattcaacttatacattcttctgtgtcattcttccttcagtaaattaggaacaactaatatgctctgcctcctttctgaataaggaagtataaatggatgttactgaattccctcaagtcctgggcaaatacactatcacaatgtctttggtttgcatgaagatggaggcgctcatttataatgtgaagcctttcaccgttaaagcttcacgtgaacccgaactgacacagaatcaaagctttcatgagagcaagatggaaagagattatgtcaacacaccccatcccaaaatgttgtaaagtgccagacttcttagggtattccatgacactgctagaatgtttctcatattcagtcacgtagatcattcttttactatttgttttcttttagatgagttcaattggagcctgcccgctatggaaaattattgatgcaattacattaatcctgatcaccatggtgatgtatagttataaaattggcttaaaatactgtaaggcaggaaaactaggcaaccttaactcttttagcacaggtggccctctttgcagagcattctgactttcttagtttccaatattctagcagatggcatgggtagttgggcacaatcaattttcttgcattgcctcacatcttccagtgagattttgcrgaagaatggtgtgtgcaccacagatcttgggatcattcaaaggattctcaaagctcctcaatggccaatcagcagtgaagagggaaatggtggtaaatgaggtagaagccctctgtgaatgaagtaatgttctggaaggggctatgcatttggattttcattctggtaattttctctatgaccttggaaaatgactttatttcttcgcttttgcagatggaakgaattataaaaatggttctgtgaaaccttgaaaccataaaatgctatacagatgctaaatatacagaatttagcacgcgattttcctctgttcttaggacagttactatttctagatccaagtggatcagggaagaatagtgctctaatgctctgagaaggaaacgagtgttaagctggatactggtgtgcttagctgcaattaaggaagctgctgtggaattagtgactcacccttcatcaggatggaaaaactgtctcatgccgtgtttttgatttctctcccctattcagtttgtttgaagtctcttttgtgataggagaaaatgacaattactctcctcttgtgtttccatttttggtaagcagtgggcagagtttacattggatgaaatttcaaaagctgtttttatgaaaaatcacttcctctgaacaatgggaaaatggtgagagagagacgatagttggcttttagtctaccaggttcaacctcctgcaaaagctgaattcaagactgccctataggcattgggaatctagttaatgccactatctgcctgtgaatttcctgccttaaactgtctcggattatacattaagctggktttttttcccctataatgtgtcagaaaacaaaaattcaacaaactgagcttacagatctaattggcttttattagtgattcatgaatccgttcgcatcccatctgtgaagcaacaagggcctcttcagggtgtggcagaagagtggttttcataaggcaacttgarcaggaacaatgaaacagcaagtgcaaaaaatgattggttaacatcatattacttcaggttactttccttgtataggctaaagcacaggaggcttccttatcatcctggttcagctagccttctgcgtggtttctgcaaatctctctctctcttttttttttttttaaactggcccatttgtaagttcagtttgattatgtggcacctagcacaagtgacaccattctggtttggtctggtctgttagagccaggagcctagtccaaaacattggcatcccataaattttattcaatgaatgtttcctatacccctgtgtcaatttcatctcctacatgaatccatccccctccctttccctggccccttatactaactgagttgtttgcgcttgggaggaatacaaagtattttcaatacatggctagcatgaacaaattatagttaaatgatacattttgtagaaaaagcaatgcacactgaggtcatttgcctgcagatgttaaattatctgcttttttgtgttactatatatgctgtagcacttatccactggtgtaaataagaaagtcaattgaactctctctgtctggagagagakaaaatgagattgagaataaagtcttgcagaggttgcagatggccctgtaaggctgaattcagcccttgcgtatattttgttcagttggtacaaagttaaatttaaatgcagttaagtggctttcaaatgcactttgctacagtccccactgctccttagtgtcttatgccctatatgtttcactactttgttgcctacgtagtttctgaatgaacttgaacttgcaacccctcgtttaaaaacttgttcctgttatgaaactgtgggtgcttatgctaaggacttaatctttctctcttgcgtgggaggaaaggatatctataacagaacaataattgtaaactagaagagtagaaaaaaggatgaaagaaaagggcaatataaaaggcaggaaaagtaggggtataagaaaataaaataaagatcaaatacatttattactatgagagcttctatgcgggaaaaggaaaaacaaagtataataatacaaggcamccacataattaaataattttttcaaaagactgtcagtggtaacacacacacacacacacacacacacaattaggaaaagctacaaaagagccccaagtctaacttggcaaaattgaaagtatgtgatagttttaaaataaaaattaaaatactttaaactagtttaaaaatatatctctacttcatgtacatctgcactgtttgacatgttataagaagtgctaaattatcttaataatttaagaagaaaagaaaagtaatggtcttccttctctctctccaattctaattccttggaatagtcgtttctaaatagattgcagatatgttcacttttcaacattgcttatataagagaaggcaaggtatttagaatttttcttgatcataacaaaaagacactgaaactcagaggcagcaagaggccccattatgggggcaaagagtagcagtggaaatgaaagtgagttcctgaacaagttgcttccaacagggtaggtgtattttgaagtggcgttgtaagtggcaccctactgcttccatgagtttaaattgtatcaactgaatataaagtataagccaattttaaaatgagaatttgtagaattcatgtgattagattagaggtttttaaaaagtaatatttgaattttgccaggggggtggggtggggtatgtattatgtgttcacgggatgacagcagatatcttcaaggaagtggtttggagtacattaagttctgaacacataaaatgactttttttttttttcctttttggtcttcaggagacttgagaaaacaagtgctgtgtaagttataaacaggatgaatggaatagtgatttcacaggagttagaaaaatactccagtcacaaaagttaaaattagagtaatctgaggcattctcagtactttggataccctgtccacattcagggctactgattatatttccaaagaaacttataaaaccagatgtctagctggcaattggttttgatgaatctccaaatctcagcaatgagaaaatttgacagttgtcagacagcagctagctattacgagtgagccagggaattttcttatctgttacaagtatagaaccattacagggagatactgcatcatagtgtcatgtttataaagaaggcttcagagcacatggtttaatccccaaatttctaagaatgacagttcattttcttggatgttgaaaggtgctttaatacctatacaacatgaagatggttttattatcaccaatcaaaatgtcttggtatttcttaatttaaacaaattcattttataggaattacattgctgagaattcacaccatgacactgacgggacttataatagtggttctaaagcctgcatgtgcgtcagaataatttggggatttgaggtgacttgttaaatgtacagtcactgggtagccccctgtaagattctgatttagtacatttggggtggaatccaggcatctacatttttaaaaagcaccatggccaattctgaatcatggtcgggtttgaaaagcactaagtttgggcaggcctgatttatttcaaagaattttcaagcatatttagttgtgccgttcagtaatagtagcttctcttattactgtgtgtatcccagtaaatctcttccccatttactctttcatcgccccactttgggttcttctgctctgccgccatctatttggcctgtacccactgttcactaatgaaagcccgtagcttctaaaaygggccaagattcacagttgatataagctgagaaagactgacaagttattctgccgaatgatactggaaaaaagaataggatagagggctaatgatgttattttatttttgtccggtatctttacacccttagttgctttttcatttgtcaaatggaatctcatgtggaatctcgctctataaagcagatgaaaaaatgtggacccagtctggctgccagtcctgcccacttggtttccctctgactcagacactggtatcccaggcccctttgtctcatgtgcccctgaaaactgctgtgacatttaagcttttgtgtctcacataaaggcaataagcatattgcaaggttttcttttcttcaggtttcaatactctaacagatatgttctcaaagtagaattagtccttggttaaaatgagtcacatgtaatctaaagtgtttttcctcataaacccatctccagcttttatggtgaaattcaattgtaaaataagatgaggtgttaagtttaatttttttgaagaagacgttcattccataaatatttatcaagcactctctagttatgacataattcagtttctaacgtacagtacacctcttacaaaattgcataatctttaaactgaaaggccaaatatcttcatcaaatactgcttcttcagatctttgcttcctcagctctttaaagaaatgggcacctttggcatggatgggtttatatccagatgataattccagagccatcagggtttcagtttttgctggcaaagaaatcaattttattgctactcgaaggctcccctgggatgaagcaatattggaggaggcaatgcattctagaatgtcaactttcagaggtttgragtttgctcaaaaaataaatgatctctgacttgattaaacttcttttgagttcctactatatataagggcctgtggaagggctgggtaccccggcattgtaagatgtgactgcagccctcaaggggtttgcagtctagctggaaagaaggatctggcaataagaaagcacagtgagcccaaatgaagtgttcagattccacatactacatacagaatgcatcatgtaattgaagaaatagaaatcaccaggttacatggcagacctaaaaaaattcagcaagtctttttgaatgtacttgtgactgtcaacatttacattgtccaaaattttcttgtcaggtgagggcatcaaagaactcttaaaygctttcaaatgtggtgggagcatcttgcttctgtgagaagatttatattctccctaccttctcaattctgtttccctatcttatatgctataaacaaaacctcgctcacgaaaataaaagatgaatgcatgttctgaaagaatacagaatcatgacagctgaaatggtcatggtttcttttaggagatgaaaaaattaaatacacaggtgaaaacattagaatgcaattctctaggttaccatatgcttacaaaaaatcaaaaggagctgcagaaatggaaatttctaatgacagaagaaatcaaacagcagatacagtagagactttagagataaatgggtgtcaatagtggtaagaacacaggttcagaggagatccaatgttccatctaaatcctggttctgtcactgagtgggaatgattacttgatctttctgtgtcctcgtttcatgtgacaatatctatcacatgcagtgttgggtaaaacacttagcataatgcctggcacccagtcaatgtgcaataaatgttggctattatcatcatcaccacctccatcatcatcattctctaataaaagttaagcccttctctctgttgaatacrcccatcagttaataccagtggctccttttaaatagcttaaaagcaaccaacattctatagatttcagtggggaagattgtaagtgaaatgggtgttgtgacctttcttgaaaataacccttctctctattagtatataaatgctagtgctgagtacacatactctgaagttgaacttaattaatttggggcagtagcattttcactgttgatgagcttgtatttattttctttggtttacaaagcagctggtgttgtccaaaaatttagaaacccctttccaaaatttaaatgacccccttcattcccttcatttacactgttgttctagaacctgggatgacactctgcagggtgaatggagactggtccctctgtcttcttttccatctctcttgctttagttttgctttcttcttcttctttttctttttctttttctgactgaagcatggaataactggctggtgttcattgagctaatttccttacctgcttcagggcctttgaacccaaagacctgtaggtgatctgtgactatggcaagcaggaagccttggggaccactcttcacatttggagtaatcctggtttgaaaatgtgtgagggaagccaggcaggcagagagcactatgtggctgctgagttagaaaatgctgaaatggaaagatgctggaatagaaaatcaaatgccatttattcattggcctacactttcactagtaccttcctggcagccttaagcgtattctttgtggtggtggccttttgaatgtcaatctgtggaaggacttctgtttttagcaaaggctgatctttaaggcaattaggtaacagttaaagtaatagtccccagttattgaacacttgctatgtacagggtactgtgctcagcactttccactatttcattcaatcacaacaacagccctatgagatagggtattattatcatcagtttgtagttgaggaaattgaggttaagggataagtgacttccccaaggtcacaggaagtaagtcgtggagatgagatatgaacctagcctttctgatttcaaagcttgtgctgttaaccactttgctatacttcctcatgtgtgtttaatagggtccagtttctactgaaaggatattttaattttgtgataaaacaggacaggcctaaaaaattaggtgcagactctgaataaatttaatatatctacccatctctcttattcctcttaagctcactttaaaaaatctctttttaaaaggaggttttctttttaaacctaacaataaaccaaggacatccgtccaagttaataaatatgtgccttttttaaaaaatagaaaaaagtctaattgacaagtaaaaattgtatatatttatagtgtacaatgtgaggttttgatacacacacacacacacacacacacacacacacacacacgctgtgaaatggccaaatcaagcttattaacatattattaactcaggagtttattctttatattatattcttaaaatctaattgctttgctatttttaagtatatagtgttattattaactattatcttcatgatgcacagtaggccacttgaatgtgttcttcctatccaaatgaagtttagcccccctccccacttyaagtatctgtcttttaatggctacataatatagtttggatacattatattcaattagccttttgttgatttggatatgccataatctactcaagcattcctttattgatgggctttcaagttacttccagtttgttgtcagttaagtaaattgtttacttgaaagcttccattgtctgggtctctaccactaygggacccattttgagtgttggtgatgctcacacaacaaggagacacaagcccggagttgagctcctaggtgagagagccatccagtagccattctggtccaagtcctgtccctaccacttacctgccacgtgcctctgcacaagccatctggcctcttttaagtctcagtttcttcataagaaaaatgagaaaaacagtgctgctctcaaagaatgaccatgaggacaaacagaataatgtgcatgcagggctgagcacagaacctggcatgaagcaggtgccaaacagcagagcaactgcattgctggaacccagcagaaacatcctctcactggagcttggatgggagctctctgagggccctaactcccctcttttggcctaatgcattatagggactccgtaaacatttgttaaccaaaaaatgtttggaaaactactactgttctgagcggtatttttcgtttcctttctatatttttattctaacagtcactaaaccacattttgagagtatctggaatggagaacctccagtggtttaaatagttttaccaaggaaatgtttttcacgcggaaagaagactgagatgaaacttatagagaccttgcctcaccctttcatttgccgaaaccatgtatttttgaatctagtgtctgagctcttaaccactaagtcatattgctttaataatgatgatgtgataataggtaccatttattgagcacttactgtgtcccagaaaaatgtgctcagcacgctttaccaatgatcccttaatcatcacagtaatcctgagagaaatataccctcattgtctccatattctatttggggaaatggaggcttaaaaagatttaccaaattttcccaggttagtggaaccagtactccaacccagctctgcctgacaccagtgccactgtgctaattccatggcaggctgtggtgactatgtatttattggactctgttcatatggaaagttgtatgcatacagaaacaggaacatttgctgtaatacttaagrgagtgaaagaggaatgtacagaaggctaaaagaggtgagtattgctttgtcaattctaatgtctttctatgatgttgatatttggatcatctaagtaagtgctatgatgaaaataatattcaagaggctggtctggctgtctgtagaatgaggtagatgtagtgaaagctggaatggaggaaagcagctaagaagctattgtagtcgttagacattgaagtaaggaaatgtggaggagaaagatggcagtggaattagagacaaattgacaaacaagcgggtagtaattagaccttcatccaatcacttgtggggagtggggagcatggttcatcatccttcaggatggatctgtccctggagattggaaacatgcacgcacacatttcttacttccacgttcaaaactatggtgagcattcacagctggtatttcacaacctcttggattcatgtttattatatcctggatgaagaagcacttcctttcatctgaggctcactgggcccagggttgtgtggtgacctaaaggccgtatctatgaggattttgtctaagagtacctcaggtaagggctctcaggaacagcttcttagctgagccaccatgctccagatttgatctttaatcttatgactatagagaatgaatattttcaggtgactcagttcagtctctacctcatgaaaattaaattgaaaaaacaatatagagattatagttcaagtcctctgctactgtttaactgtgtaaacttgggtgaatgatttaatctctgtcagcttcagtttcctcatattagcatgggatggtccttgtaagatactatgttggttaaatgggcccacgcatgcaaagcacctatagtgcttgggacactgccaatacctaataaatattatatgctaatatttttatgattgaactataaatcataactaccttatgtaatatttttttatatgggtatcaagtctaaaacctccatatcaagagctttctgagccctttttgtcacctcgtctttcccctaccccaattcttgtgttgaggttattgggaaactgcactgttaatcagaaggtagctcagttaagtgtggactcaacgaagaaagaagatcattgagatgtgtaatattgaagacctgggaaagtgacaaaatatttatatcctacaatagcagaagcctttwtgtcaatggaattgatttggtttctcagctccactgtctcattcttttggagacttctgggtaaacacattttgctcctctgaacactgtatttctcgaatgttcctccctggcagtcgccatgttctttctgtgaatttgttagaatcacttattaaaccaaagtcagggtcaccccttgtggggcttagaagtgctttyttttttttaagccttttatctgttgatgagctttcgtttctgaatatgaatggtatttggtcaaggtaggaagaggtttgaactagaacaacaactaaaaggcactggatggacaaatcatatttaaatgtaacggctgtaatcagggaagttgaaatagggagataagagaggttatccaaagttctgtgttggttggataagacattcaccgttattattttgtacaatatacagaaacaattgtctactcatacagctggaaggagccatggagattacctctattccccacattttacagatgaggaaacttctcagcgagtagataatagcctgaaattctattacttagagcaagcagggaaagtgttaggagggagttggggttagctctaggcagccacatcagcataatagtagtggcttcaatttttcttcatattgcactgaattcatttgtagtaatgaacctatctgtctatctatattatagtcatcaaattatcttcagtaactatgtaggtgttattagtttaaacctttaagacccatgaaaatacttgggttcaccaagcacgtctgccatatgcacttaaggagattcttcactgaatagtaattgtagtaactgctgccctgctcttgtaatatcttctataaaaataataatttgcacttcaaatgtctctttctgtgaggtgctcggcgtaccttgcaggaatcgcttacctaaatctatccttcaaggtggtgtatggaatagcttccagtggagtagctcagtaggaggagggaagagtgctgagaattcctagaatgcaaacctaaacctgggtttgttcagacataatccttagttatcacattagaataacaccttatattttcaaagctctttcatacttattgaattaatagagccattaaacctctctgaaatagtagtagtggatagtgtgacaggtgattaaaaccagatggagaagccttttttgaccctaacaacaccaaactgattagtgataaagccatacttcaagatgcttgactgtaactctagtgctcttttttttttttttttaactagattatattagctagagatttttcttgataagacagtggtacttttaaggcctttattcctctggattacaaaaaagtaagttacctattcctgattatatgaagcaagttaactgtttcaggaacatcaagagacctttaccacatcacaataaaactcaaggtcattttgctccaggagtacttatacaggtgatatttgacggtagtacatatcttgaagagaaaaaaagtcattttggctagggtaagcacagctaaagtttgacacggcagcttcaatgaatcatgcctctttttatggcacaattaaattttttgagaccaactgtgattttatcagctatccaggtcatctgtaggcaggtcatgattgttacatggggtggtgataattggtacaaggtcatgccctaagcatgttatagactagtagcccagcattgctaatcattttaaatcaagactacaaaattcaactgtagcatttcacttcagagcaaaaacattgcatttgcttgttcatgttgctatttcccttcccctccatgtctttctctccccaattctctcaatttgataggctgtaagaagcttcgtacccaccaaatgcaaccatatttcccctcagctctttattacaaacatgcacttttatcaaaaattttttaaaagactgaaaatgagactcagaatcttttatttatcacagaatggaccctggctcagctgcttattgactgcgtaaccttgtttgaatcagtttccgtacttagaaaataaggaaagtaatacttgcctcatagagtaattgtaaggattaaatgaatatataaaatctcaagcttagggtctagaacgtagtattttttcataaatgtaagtctctgtgtttctcaaatagttgtgtgcataggtatcacctacattgcttgtgaaagcttcagattcttgtgctcattcccgctccctaaggattttggtgcataggactggttaggacctaggaatctgcagctgcacaggtagatggtctgaggattatagttagaagtgccatgctgtaggttcaaagcaaatgggctgtataacacattcttcataaatttctgggttatggtcaaatttcctacgtttttcagagaaagaaattatagtgttcagggggcacttaactggaaataggtagcaacagaaaactggatgttgttgaatttatttattaattcaccgtatgttattgggcaccttctctttggcaaactttcccatagctgcagggaacacagtgataaacgagatagagatggaggcagagcactaagtgagtaactccttttcctgggagcccagggctctattacccagggtatgctgtcttcagcataaggatgactctatcaagtaggtctgtagatacttccaagtctttactgccgaaactctcgcccttgccctagaaaggtgttgggtctcaaagggagttgtctcagaggaagggcaacctgcagcctttattttattgggaccagacccagcatccctggctcagattcagatttactgttcttatcatcagatgtggaataaaggcttctggaacagcagatgtggttttctacctatgaaagtaacattctctaaagcctagaggatggaacttgatctctagggataaaagagcaacagttgctcttaggatcttgtctaacaattggcttagtaggtgctaactccaattctcatctacctgctccatcttgattttagccacccatctaagcttccacttgccaccctttctgtgattatgccagccaccgactgtgctctctttggtccctcttggggcagagacaatccagaatgttgggaattacctgaactctcatctcatttgtctctccagccatgtgttaggctctgtggccacccacaatctcaggcccagctgttctgtaggaccagccctaagtggcccagagaaatattttctttgggttatatccartaaaaggatatgcggatatgctcgggtcttgttgagaggcagcctggtaaatggagtgaaaacactagaagcaggcaatgccaatgtgaagtccctctgctccagccagcttcccaaccttggccaagtgcccactttctcaggagtatcccacctcccttccagaccagaaatgccgtagggcttgacagccaatttgcgctctctttcctacatcctgacctctttgactcaggtccyggaacttttgatccgcaattatgaatctcaatatacaaccccttgatcatgaccccttgcctcatggaactctctgtctcctctgtctagcccctgctaagcttcgtggactttgtcactaatctacttcacctatggtcttgctaagttgcttcctctgtcacctcccttcccagcccactcgagctctgtcctgccactgtccaaagtcaaaagaggcagaactaccttccttactttattttctttctcctctactttgctctttctttctctttaccagaacagagcatctgcaaccactctcactgcatttttttaccaccttttcttcagagtctatctgaaaatgaaatacagatttttttgataaatatattttcatactgaggttgaataagaatctgatctttatgattcttagacttgaaaaaatatatattttctgaaggaagtagactgttatcttcattatcacctccgtaaaattgcaaatggtcaaaaccataaaaaatggctttgctctatgtgtaataggcaaatgaagggaattcatggcaactgaaacccttgctttaaagtcagctctttgtgaatggaaagcagctgatattctgtaaatcctccccagatagggtttcttacagaaatactggcagactctctaatgactgtgactgctttgatatgaggatgtggtcaatatctcaagaaaaaagactgcaactttctaccttctgcagtatagagaagagaaaaggaagtatatgatgttctcacatccatctaactgagcaaccaaaatgctttataattttttaattgatttgtctggaaagagtccgttccctataggactcacagatctccatttaygtagggaagaaaattgtagtcctatccccatggctgcttgaaattccattattgatgtgatgagctctttgttcctcattttgatacagataagatattgaactgaagaaaatgyacaaaatatatctttctccactaataaaccgagaagtggtagtggtgccgtttgttaatttgggatttattttgctttgccaaatggatttgccattaatttcactaaggccacacaaaactctacatcagtgacatgcagaaatagaggtgagattgtccagtaagtagttgccagaatttgtcttgatgatgcttgatgcagatttaagagagagaaagcagatgcagtstgtttcactggggtgccagagccagggggactgagactgccacaatgtgtgggacctttcctttctgagcacagcctggtggcagtcagcctttccctccagcccccacacaaaacaagtcggtcaagccatgcacgagtgatcttgatttgaagagagagaaagaaatttgatccccaagtctcagagctgaggtacttatgcactgaactccaagaggcatttcatttctaactagcttagaatttcccacagtttgacagcaacccaaataaagaaaatacttgaggaagcaaagtagatgtgctggaagttgagggcattacctgatggctgaatgaatttgacaggcttttctcctgttgttttgacacaattgtattttcctctacaccgctgatggagtgctctgcctaaccacgatgtacccaccttccgtggctcagctgagggccactttgtcaaatatctccatcttactcattcctcgccgtggccctctcccaccagggacctcccagatcactctgtcacccccaagactacacatttcggcactttatgccgccttgtcttaccctttttttcatgttttattgctgcatggcatttaatgttattactacagcaaaactgtatttccctagagggagggaatttgacttgttctggtctcaaactctaaactccggtcagttgtgaagaagcctggaaccaaatttgcagcccatctccaggaaagtgtatataattgtgtggtggatactgtgggtcatgaccctactcacggctctatctaattgtttcttctccctcttcccccttcctccttgttgtcagtcttttctaagtttctttcaatccttttagggattgtatggagtataaataaccttccatatgctaagccagaagttaccaacatgggtgtttcctgacgccaggcaagtaatgtaatataatgactcagccaagggaagagggcagggcttatctctgcacagctgcagtcacttgtggccatgctggaatgagggccctttgttgccaaattttcagatttttcaagagaagttagaaatacagagtcttaggcaaacttcacaatatttaaacatagacagctaaagtatgggaatatccttggtgattcccctaacctggaaaacatatttgggtgccatattcagtttgtgcaccaccggtttgcacaacctgctttaaagtttcatttggtaggtatccagttataatggaactgactctcctactgtggctttcttagtataaggccacatgccatgtgctgatcagcaaacgctgttgaaggattttgaaaagactggaaaaaagaaaactggttgtctagttatctgaagaccctgggctgtgtcacatccactatgaatacaccctccaaaatctgagaccttgttaatgagccctgtcttctctcccagattctaactgctcttcagcgttgtgacttagaggggatgccgtaatgcatgtgtgcctggaacccagggaggcagaggtcctctttttcaccctaatgtgaagcatgaagttagaatcatctctgtgctccctaatagagcctcatgcagagctgttatcattctggataagggattcakgggcatttgcatccataccccccaaatagtggttcctgagaaaatttctctgacatgctgagaaaaaataaagaattcataaagttgaaattattgaacttattttgatattaatgtacttttttactctggttgtcccaaaatatctcattgggtatatttacttgacaaaatgaaaagttggcaactggccaggcacggtggctcacatctgtaatcctagcactttgggaggccaaagctggtggatcccctgaggtcaggagttcaagaccagcttggccaacatggtgaaatcccgactctgctaaaagtataaaaataagccaggcatggtggcaggtgcctgtaatcccagctactcaggacgctgaggcaggagaattgcttgaacctgggaggcggaggttgcagtgagccgagatcgcaccactgcactccagcctaggtgacaagagtgaaactctgtctcaaaaaaaaaaaaaaaaaaaaaaaaagttggcaaccttagaacagttcctgtcatctctctttattgtttcatttctaaaagagtttcatttggttgctacccagttataatgaaactgaaatccacagtggtctgtgaaatccaagtctgtggccagatttgagccacaccctcagttaatgacagggccgggagagggagggaagggtggaaatgaccaggaacaccaggtacagatagaaaatgtccatcctcagtaagacgggtcacctctgtgaggggtacgtgtcctcattcagtccatactcaaaagagatgtatccaaaagctgttgtaagcagctcaggttttgggggcaggggctgaccttttctagtctttgaaagataatgtattactcttgagaaatgtagaattttattgtcagtgtgcttgaattcagcaaacagacccggagatgaacccaagggacaacgggctcaaagaacatagatgataccatggaactttgacctatttcatatgagcattcctgggcctgcatttgggactggctgccttgtttgttttataaattgatcctcatattgattccttacttgatggctgtggaaaagaagtctccttcttgtttgaactcatgtctttgtgagctgcctttatgcttattacataaaagtctccctgattcttgttgatttggcaagagacttccttgctgagaattttgcgggctgtggtatgggtgtaaagtggtttgctgtaatggaacagcttccagaagagaatccggtctccgttttgaaatgccacttcttggaaccagaagaatttattctaggagggagaaaagaattattgataagttcataattattcacaattatttattgagtacccactctataccaggttgtattttagacactagggctatagtaaccactaagcaaaatgcacagaaatgcttgtcttcagtggtcctatgctttattgggacaaaacagatcagaaacaaaataaaactcacaacatataagaacattacatagtatgtgagaaggagacaattctatctggaaagtctagcagagcaagtgtgatcaagagtttacaagaagggattgctgtttaaaccagggaagtcagattaggtgtccttgattaagtgatagttgagtgacagtgacaactttatttatgctttagaaagactactctggctgctttgggaaaagactgctgaaaagcatggagacctgtcaggaacccattgcaaaagtccttgcaggcagcttggagcagggtggtggcagtagaggtggtgagaagaggttagatttgggatgtatttcaaaagcagagccaatgtggatttccaataaactggaccttttaataaagctgagagagactttacagatcatttagaccccttccgaggccaagtaggtagcacaagggagtgaaactagctgcatgacaatagaggctcttagaaacagggtgcattgtcttattacattaaaaaaattaaagccgggcgcggtggctcacgcctgtaatcccagcactttgggagggtgaggtgggtggatcatgaggtcaagagattgagatcatcctggccaatatggtgaaatcccaactctactaaaaatacaaaaatcagctgggtgtggtggtgggcgcctgtagtcccagctacttcggaggctgaggcaggagaatcgcttgaacccaggtcgaggttgcagtgagccgagatcgcgccactgcatttcagcctgggtgacagggcaagactcagtctcggaaaaaaaaaaaaaaaaaaaaattaaaacaccgttcaagccaaattatatctgtaaagtcagcctatgaacttctaaactacatcctgtaagaatcaaacccattctttttacagatgagagatacggggtcttacaaagtttattgacttctccaaggtcattagaggcagaatcagaatcgaagcctcaggcttcctcatttgtagttcagagttcattcattccatctgtactcgaaccatgaacagcttttcctccttggtgcygctctgagtggatgccacccatgtagaatattcttttattttcccactggtgtagcgtgatgrgtccattttatttttctcttcatctctatcatcagktgtcatcttttaaaacttgtgagcccttggctgtcccagycacccccaaagaacacccttgggatttactgattggctcacaacagtaattgtgagcaatgaaagaataggctaacttagcctcctccctagtttggttgatcacagcagagagaggaagactaacaaagaaggcctatataaaatgggaactgagggctatcttttgcttttggcgtcttgatggatgcctaaggtggatcagtatttgtgtaacataacaggggtactttacctgtggggagaggagtgaccactgaaaacactgttcaaaggggtcattcatagtcgtgcatttataaatttttttwaaaatagctttcttttcctattataaaagacatgtatcttggtatatagaataatttgatatatttgataaagaaggtattgcctgggaaaggatgttgagaagattagctatccaggggaacattaagttgtattttcattttacattgttgacagaaataaaaaccttcatggattaaaatttaaacagaaaatacttttaaaaactctaaggaaatttaaccaatatttatatagagaaagcttttgaaactttaaaagcaatgaaaaaaataggaaaaaaaaacaagtaagatttatcacatgaaaattaaaacacaaacccagaaaaatattcacaataaatagtgaataaaaagttaacaaccttaatgtgcaaagttatctttttcttggataaaaatcccatggcatcaaatagagctgagaggaagagctcacagttcatgaaagaggaaatacaaatatggcaagtaaacttccaagaaaaggtggaacttcctagtaatcaaagaagacaagttaaactaaaatgaaaaccatttttttttgtttgtcagattggtaaaggttaaataaaatttttaatacgtaaagtcagcaagttaagacagcagacctgtttacatatgcctggtattaacataacgtggcatatcggtctgaaaagcaatatggcaacatgcactgagagccttaagatgctgatattcatcaatccatgaatctcacttttggtagcaatctaaatatccgctcgtaagatgtataagtaatttttgctatagttatgttatggaatgatgtatctggaagtttatttccctccacacatactctgtgccactcctgtgctttatgggagtctattgttaaaaatctcactgcttcatccagtggtaacatgttttatggcccacaggtgagagtcccatttatcacagaaactttggagtatacataaaactaaaagagagaaaaagaccagccataatcacaacattcgaagtcagcatagctaatattttcatattttcctttctaatctttgcaaagtacattcatagttcaagagagttttgcttaggtgtcatctctcaataataaaaacttctcaaactatggatcaattatgcatatgtgcacctgtgggtacattatacatttatatatgattatatataagcaagtttatgtcctattagtctctgaacctttccatcacatcttaaatttttaaagtttttataaaaattctaatttacccttttaaatacatacctgctgtgtgacgggatgttagagaacccaactctgtatctattttaacagcatggtggcttatagcaagcatgggcaatcttttatgactttgcccccaatctctcccaatctcctgtaattcaggcatttcactttgctcaaccttatctctgatcagcctcctcacccattactcatcatttcacatcaggaatccacaagtaagcaattcaagaaccttgaatggaacatgagtgaaagctatttctgcagcctaaaccccttcaatcaatacaagaatgtcagcaattctagagtctaaacttattaaattctcatattatttttaaaatgctagccccagtcctctttgtctgatttctaatctctgaaagaaacagtaaatgcaaacataggtattttaaagagatagggtggaggggggtgcttttccagggtactctsttatcattttcctgacaaacttatgtgatttaacagttactggtaaaacctttcaccaacagtttgttactgtgacagcagaagcactcaaattcagggaatgtcgaacttcatcttgtgaattcagacctggcagaagaccatttcttcactagaagttggaaaaatgtcactctctgagactgcaataaatggagcccagggttctgctttgtgtactgagtgagagaataatagtgtggtgtccctgtagacagagaagctgactatgctctacggagacagtgttttccaagatgtgttaagtgcaattccagcttctcggcttttgatagatgttcctctagaaatgttcattgctcaaaggcatttaggaaaagattcattgcaggactttaatatgctaaggtgcaatatgaatcaataagcacaagttgtagcacacaacatttaaacctgtatgagcatgaaacccttcttcaagggagactagtgttttccaaggcctgctttgggaaattcttcattgggcactttgcttatgtagcagatttgaatcttagtctgtaaactcagatatgcaataaatagaacatttcacatttttgaaatattaaactctgattttgatgtccccatccctcccaggtggcagraagcttaactttggcccttcttggagttctgcactgacctgttagtaccatgccaaaattctggtcattgcttatctgtcacacttggctagttgccccttgactcagacagggcccaggatccatcctaaggtcttccctcaggatgcttcctgggcaataattgagtctctactggtggggatggggtgtaatctttttttctgtttgccttcctgattctctctccctgtactccaaaagtcttcctgagtatacctagcattaggttttactgttttattttcttaattgatggctagtatttaagaacattatctcccttctgtattatgtattttaaataagagtatttactgtcttgtatayacttgtattgtcttgtatatacttgtcttgtaagagyatttactgtcttgtatatctgaatgggtcacatgtagtgcaagcttcaagactggtttgattcagcggttcaacagtgtcatcaaagtactcgtttcattcttccttaatgttttgtgactgtgatatgacattgaatctgagatctattcctttatgaaggggaaatagctagcatttccaggttttatatttgcaacccacatcttccagtagagagacacaatggctttggacaacttttcagaatgttaaacaatccttctctcgtaatagcttccatcaaacctctactaacatcttattgaccttcattgcatcacataagttaaaattattctgaaatattttatatatgtactatatatatatataacatttaagatatatgaagaaaaatataatgcgatttcatagcccccttttaaacttccttagcaatgcctcctatatcccctgacaggggcaacgtttctttgtgtttatcaatattttgctttcctgtataattttaccctttatgtatacaatcctaaacaatatattttttagtgttgcatgattttagattttgtgataatgatatcatctatgtgtatttcttctgccacttgcctttttgattccacatgatttgtgagattcatccatgctggtggatgaatctatttcttaatttgtactgtgatatagtattccattgtgtgattaagccacagtttacttatctatgtgttgttgataaactgttaagtcggctctagtttgggagtgttaggagtaatgytgccaatcttctcttatacattgttgtgcctgcatggaaggggtgcccaaatgtacatacatatwtaagaatggcattgccgaatgaaaccatgaacagtctttaatgttactatataatgcaaaattattttccaaaatagaataatattttcaatataagtagaatataagaactcctgtttttccacatctttgccaacacttggttttgtcagcatttaaaaaagttgtcaaattggtgtgtatgaatttatactttacagttcaatttaccrttttggcaaatcaattaggctgagaatatttgcatttttaattgatatttttatttcatcttttgtgaaatgtctgtttatgatttttacccattttgattttgtgttgttttcaccttcttaatggatttgtagaagttcttgtatgttctgcttactaatccagggtcagttatacatgttgcaatatcttctcccaatttgcaatgtacattttcactttttgagataaattcttttaataaactaaaaaaataaggtggtcaaattatcaaactattccttatggttgatattttgttgtcttatttttaaaattattttctactccaacctcatatatatttgtgtatgcctatgtgygtgtgtgtatttacatatgggcttatatatttgggcaatgtggtactgatatatttgggcagtgtggtactgacacaaagacagaccaatgagacacaatggaaagcccagaaatgaatccatgcatatatgtaaatttggtagatgacattacagataactgggaaaagataagtggaaacaattaatttctatattcaaaaaatagatggaataagaccccctccttcataacaggtcaattaaagacatatatgtatatgtttatgtgtatatatatatatatatatatacacacacacacacactacacatgtagctgtatatacacgaatatacacatatatgtctttaacttaacgtgaaggaggagtcttatttcatctgtgttttaatatggctaataattgtctcagcatcatttacgtttcccaataatctgtaatggtatctctgtcatctaccaaatttccccatatgcctggatttatttctgggctgtctgtggtgtgcctttggtctgttgtctttgagtcagtaccatattgccactagcttctatacatttacaatgagctttaagtctggttacacaagtctcctcccacattctcacgcctagaccttattcttcaggaatgtcttggtcattcttggccttttgcatttctacagaaattttataataatcttggaratttttaatatttttatgaaatttcattaaatttatagttttggggaagagttggtatctttgtaacattataatgttgagtctttctatctatatttctatccaaatctacttatttagatcttcactgtctttcgtcrctataataaatggtatctttcagtatcatgtattctcattattgctaggcattctttttttttttttttgagatggagtctcgctctgtcatcccaggctggagtgcagtggcgcgatctcggctcactgcaagctccgcctcccgggttcacgccattctcctgcctcagcctcccgagtagctgggactacaggggcccgccaccatgcccagctaattttttgtatttttagtagagacggggtttcaccgtgttagacaggatggtctcaatctcctgacctsgtgatccgcccatctcggcctcccaaagtactgggattataggctgctaggcattcttttttttaatggatttcagtgtttaaagaattcaagaagagcctttgatatctggttacctctactttttgaggaaaccaaatccctgatgcagagaatgaaagagtttgtctatctgcttgaacggagaagaaaagaaaaataaacagaaaatgttgcaatttgaaagtaattttagtaaatttgcctgccacacctacataatcttatttaatcctcaccacaacgttcgaagttaggtgttatttgtcctattttcatgacaagggaaaccaaggtttaggaaagccaagtaatttactcaaagtcacagagcgaatgtgtttatggtaaagccaggatttaaaatcaggtggatttcacaccaaaatagttctgttcatcgcgtagtactttccctcgggcaagaagaatgttcacaattttctaagcatttgagtacaatgaccggaatggataatcctttctgtagacaattatgtggctctgtctcccctcactaaggtcagcagacatttgatacaactttatccatctcttcttgtcactgttgctggctgagggggccacttggctcccagggaggagattttgcacacctgaggaaacagacagcagacagcaccaacatgcttcccctagactgcatttggacacacacagccaggcaggggaactgaaattgtagagcagcagtctgtgtggagtcattttaatgttttcttaaacagtcagtgatggaaaactttgataacaactcaagtgaaagcttatggctgcgaaaagcctcctctgtggatctgactggaaaggattctctgctgaatatggcttagatgcctgagccccgtgttctttggtaagaaaattaccgcaagtcattcgccatctgtgatcctcaggggtggaatcttttgctggaagacacagttattatcaatcaacctgtgctagccaacaggcctccagagcttcgcgggtggggggaatgttgttacagaagaaacgggaaagaggagcctttgtgggaaagggtggttagtattcttgatggcttgtcagaggcagtagtggccataatcacgtgagtgcagcacttgagctggttcagagctgcagtgcctggagtcgtgtctgccrgcagctgccggaggcggaagtggcgtccatggtagccacttcgtcaggagggctcctcaggttttagagccagagcacaactgtgactcctataccaggcacactggacctcaggagccttgctggagtctcctcagaattcacaaaagaaatatgaagaattaggaagaaagttaaaacttagtagagatcctctttatagatgcaacttgagaaacagcgcacagatataggttactcgactggaggagttctgtgtttgtgttttcctattataaagagttcgggagaaagtggggtgcttgctaaccattggttctctctcctgtcttctcttccttttctctcatcttgccctttctcttttgccattgccccttttctcatttttcgttctcttatttgttctttccttctccctccacttctccttcgccttttctctcttgcttctttctctgcttcacttcattctccctgttctktcctctcttccagtcgcccttttttccamcccaccctttgctatgttctgaattagtgattgcctaagtggaaagatggagacagtttcagaaatcctatttattttagttcatcagttgttactgcttactttttgtttgaatatatttggggtatattctcaaaaatatgttgataatggagtacagaaattctggtgactgttactctccaatgtctctcttttcttcctagaactaactactagtcctttccagttcgggtagatggattatatttcttgcatagtactttcagcatttatcatttttggtaaatgaatacctaatgtgccgctagggaagctaaattcatacctatttcagctggggtgagcactgtgaccttctgttacacatacctattgctgccaccagagacagaagattgagttggatgcactatgggtagagacaagggctggtgctacttacttatcagaaaggattcttgtaagaattaaatgaaataatgggcatagaatttagaattaaataatgttatgtgcatggtatgctacaaagatttggattcagacctctttacaaatctcagattcgtcatttactagcatgcaaacttgggcaagtcactttattctacttgaaccttttcttttctataaaatgaggtcaataaataatattcatttacaaattgatcatcaaggcaaatgagataatacatgaaatctcctaaaatagagtagatgctcactgaatatcaccttacttccctccacccaactatgcatttatttatctgtcaaacatttatattatgctcactttatgccatgcactgttctaagagctttataaatttaacycttcaatatcatcatagtcttttgagtacttactattactatctcgttttgcagaytggtaagctgaagcaaaggagktttaataacttgtttaaagcctcatggatagtaagtagcagagccactaactgatatttttgtgccgacaccttaattcaagcttttttctcctttaactgaagatattattgccctgagatattaccttgaaatcgatatagatttttttcttgagtttgcaaattttctctcttagaaggcctgaggaaaaaataacattaaacaaatgcacacttaattatgagttcattttctgtgttaatgtagtaaagaggtgaatgaatgtcataaaatatactctcatttggttccaccctgagagagccgttggattgcagccccagtgcttttcagcagggaagctggccagagaygcctgcagcctgctggggagtgtgtgggtagctcctccagcagtgtgcctgcactcctcatctgcacagagcatgcacagtgttcaaaggcacacagatggggactcaagtggggccaagatcactgggaagagtgtcggaaaatgaaacctggccaacagacagcacccttctgtttaatcagaatgctggagccaggtccagagaataatgactacaaactggctgtgccttgggcctattcagcatcttgttctcattttcaagtgtttggtccttgggaaggtctcaaagttcactttgctactcgattatgctgcctattgaggaattttcaaggcaaagtgaattcatgtgacctggattcattattatttaagattattaacacatttttagaccgaattggcagtaaggaragggaggaaggaaacatctattgaggtcataccaggtgctgggtgctgtagtgggcacttctatgcatgttagctcaactgacgataccagagaagtggaaattacttcagattgtcatgaaaaagacaaatggagaaggtgggatgcatgaaaaatagacttttaaaattcctaaatcaatgccctcaagtcatctaaaatgattagaaacmgtctatagttgtcttttatgaggagacaagaattatatgtgttccttgtttttttctccttctgcttgctgaagagttctggtttcacttgtctagtccttttccttccctttgtcctgccttgagagacwggttatattaagcttttgtgaggaatttcaggtgagagggaatggaggaagaaraaagagacttagggacacatattcatacccatgtgtgtatgtgtatttatgtgatatatgtataattttatatatgtgataaatacatacacattacaaatgcaattatactatacttaatctttcatatgttttaaatccttcaagtttattatgaacatctccccatgtcaacacatttaaaaccacagtatcattattaatattgcctaaaactctatactcagtatatgtcaatacttgattattggatatttaggtagtttccagttttagttttatcaatagtgcagcagtgacatctgaacaaagtcatttaaaatggcaccagttactgtttctcagggatcagctttattgtgatttttcttaaattagaggaatcgcctatatgttcaaactaattttttagattactagaaatattcttgtaacaatgtcttatggagaacccactgtataaaacccatagaagtgtacttccccagccagatgcagtggctcacacttgtaatcccagcactttgggaggccaaggcaggtggatcacttgaggtcaggagttccagaccagcctggccaacatggtgacatcccatctctactaaaaaaaaaaaaaaaaaattcaaaaattagttgggcctggtggcacacacctgyaatcccagctacttgggaggctgaggcagaagaattgcttgagcccgggaggtggaggttgcagtaagctgagatcaagatcacgccactgcactccagcctgggcgacagagctagactgcctcaaaaagaaaaaaaaaagtggtactttcctccatgggttgcctcctgcccctgaacgcccccatccctcagtgacctctgagcttccacagtacccaagagtgctccggaacaatggtaagaccactgagctaggwactagctttgttttgtttgtttgtttgtttctatattattatttgttgatgttacagagtatagaaaattggctttttttctttaaaagaagaaactatgttttctttttttaaaacaactcacattgagctttgctatactactttgttacctgaattggtaatgrttttctttttttctatgttataatagaatctttatatttaaataaacttaaatactttmaggcgctgtggtctagagctcactgaaagtgttatgtgtacatgagcaggaccctcaagagccaacctgtgttttttgtctcattaacttggaggaaggcatgaggggtcagggcctacaatatcacttggaaayaaggaatataaagaaaatctggcctgtttggtaaaactgtgcttctccatgtcttgcctcttttgatctcttgcctaagttttgttttgaaaggttaacactattcatcttgtcatgactttaaataatcagattacttttctatgcaacaatgctctgtttttcctaagtttcctatttcttcagtgattctggggtgggatggagagtgaatagaaatacaggcatcaactttagtgttttcattgcaattgttttatttgtgcccctcaagttgaacctctctgaatgagtgtgatcatatatctcacatacttggtgttttttcttcagatgttgggattcaaattgtttggaaatttcacatgttgtaaacctaacttagtgacatcatgtgaccatgtataagggaacctttatcattatgttattaggaacctgatctctttgtcattcatctattttttgccctggcttgttgggattggatcaaaccaatggaaatgccggagaactgagttagaaatgcataggatgttaaaagaacagaaatttatgctttaaagtattactactattagatttgtaagtttaattttttttcctctggtgttaaataaattgctcaaagatctctgacaccagaaggaaattagaaggtaaatgtatgttgataacacagaaggatcagagagggaaatccactagcaaataaaagaaaataggaagagtaagtaagtacatcattgtaagcaaaaactgacaaaaaggaaagtttgaagccagaaacagtcaaaaagttcttctaaaagtaagaaaatgtttatgaggggcacattggacatattttctattctattggggtctggagagataggcaagtatgaatgaacaggtggaatttagttgttttccaaaacttgaacaaacaagaaagggtattttggggtccaattagcaacattaagataaattttatrtactggcttcctgggatttgtgccttcaatttacaagttttgctgataaagaagaaaatcaattttattttattctatttcccagggagatagcaaaatgcttgaggattttttttgcaagagacttkttaattaggactattatagaaatgagttaaacagccaaatatcaaacctgaaacgatctcctgaggcaagagtgtacatgatcattaggtttggagrcaaactattgttaaggattctcatataaggtatcttagtctccacaagyaaaggtgatcaaatccagttgaacttgcttcacaccatatgccattgtccttcagtcccccaagcagacaaatcaagcttgattacatatgagataccaaggcatccagagaaatgatagtgggtgtaagtcatgccacaatagggtgtggataggtgtttctggatayggagatagatggccacacaatcctgctgccttcacccagccagctctcagcttaagagaggyaggaaatgaggcaaggaaaggaagatctgagcccttcctggagctcagctgcatcctgaggcagatgtttaatggactagaaatgatcacatagagaattccttgtgtctaacctagaactaaagcctgtgagaacacactcttaatttatttccatactgaagcnctaaccagaagcttagatctttgcattccaacataagaaagagacaggggttaccaaactaatctgtgagaagtaaaagaatgtgtgaaaaaaataacatgagccccagagtctagagcagaagtggataagatgaccttacctatagtcttctaagctgagacaacaggaggccaggcccctggtcgggaggatggtgtgtgtgtgtgtgtgtgtgtgtgtacrtgtgtgtgtaatgtgacttacccattaggcaccataggtgcggtgccttggggccgtggcagttttagggctccacaaaaatgttttaatcttttttaaaatcaagaataaaaaatgaatctaataaaaataatgaatatttattaatgaattcagcatagattatataaacttgccttatgccaatgtagtcctaaaatatgttttcatattttttttctatagaggaaggtactcatgagggcagaagtgactagggccaaaaaagtcattgtgcagctctgacagattgaatgaccatgagagagacacagaatgacaacctcctgatagatagatgcagagagattggcagagaggaacagaggcagaacagcgagaaacagatacaggaagatacatgcagagtgagaaacagggacagagagacagagggagatgaaaacagacacacatgcccacacacaaagagagaaacaggcagacacacacccccgcgccccctcccccatctggaccygccccaycaacatcctgacagatacaggaaggcagagagaatgagacagatggagacacaggaaagacatgcagaactagactgacagccataggctaagatgtcacagggaacattctactggaaggaggcagccatcagcttggtcttacttgtttcagcctcccaggatcaaatatgtctgaagagtaacaggcctttccatccactctttatttttagccacagaggaaacagtaagagagaagagggcagatgcttctgtttaccaggattttaattggctacctttggagcctgtgggcctaagctatgactattgtctagaagctttgggagaaaggtaaaaccacagtgtaaaatcacagtggaagcttggagctgaaatgattattgtatcttctctaaccttatacccagtaatgatgtgtttgtaaggccagtggtccaattttttctgcagagtgaacaaaccagtsgctcccccactacctccayagagatgttttaacacagacacattctaaacagcaaactacatcggacgccagtctcctataaaygctagagagtaggcctcctcctggcctttatttttccatgttcctggatatatgagagtctcaagagggaggtttgatgccaacccctgcccttgaccttgggcaaccttcttcccctttgtgggtggaatgaggtgccatgacttgttgcttttattcacaaagtgcctcacttgttkatatgaagccaccggcctcatggccatgcctcagccaaaccaactgggaattatgaagattggtttgaggcaggaagtgtcctggctctagacctaggacagctgctttgattgtgagtgcaccaggaaagtgggacaattgaagcatgaggaccttgtcatttaattgaaagtcacagagttccttttcacctgtgtcatctctggaaaactggagagagatgatctatacaagacccagtaagatacacaccatttaaaatgccctacaagaagtcacagtgaaatgaaataatttacaccaaaaggtgtatgttcttcaatcttctctgaattctggacttctgatcttgccagagatagttgttagaagaaattgatgataacttttttaaaaagaaacaagttttaaaactagaactagctcagccttcccttcattcaaggttggataagcagtagtcagtgagaacttgggaaaatagtcttgaagaggaactgtgttcacatgtccttagtcatgaaaatcatttttaggtgaagtgatttctcattttgcacaaatgattatagagtgtgtctgtttgtgaacttggtcataattgctgcccaacatcattatggcgataatttgtttagctaagagaataagagcagttgaagttatttttaagtttgcattttgtcagttgtaggttttcttttttcttcctttttttttttttttttrcatttgatggcaccagctgagtgtgggatggtgcacaratcccctcagaaatggagttatttggtcacagtaaactgaagcctctccccaaccgccaagataacagcaattactttggattcattttagtaggtgtgaaaagctcatctgtttaaaagatgagtactctggtttatataggatcctctggtagcagcaggttaattaaagaatgattctatcatccctagcctaaatcgcaggcatkataaaagccagcctgctttatgactgtcatgtgagaaatgtgcacactgataccccagaatttgagcattgttaaaagttagtccattgggtgtgtttgttcttcacattatccagagcatctgccagtttcttctttcttgattatatgcacctttgcaaacaatagtacagttagcaacactcttctaagtgtgccacatttaatttggggtgagaatacagctttaattccattttacagatgaagaaatggaggcacaaagttgttaagtacctttgtccaaggtcctagagtttgtgagcagcagaaggggtttagcaatmagcctgccttgggagccatgtgcttattacctacaattcactgcccaactgagaagtagcatgggagatcacctctcccactcatctttgagatgctgattcattatttgactaagaggccagactcttctgcttaccaggattttaattggctacctttggagcctgtgggcctaaggtatgactgttgtctagaagctttgggagaaaggtgaaatcactgtaaaatcacagcggaagcttggtgctgaaatgattattgtatcttctccamccttatacccagtaacgatgtgtttgtaagtccaattttgtgtttgtggtccaattttttcctgcagagtgaaaaaaataatggctcccccactaccttgatatggatgttttaacactacacattctagacagcaaactacatcagagaccagtctcctcatccctggaggcatcacactgtgtgctgggctctggacaaagtaactagaagtataagttctaagcagtcctcaccactaagtaacttgtggtataagagagggaatggcacacataattgtcaagtcaacccttactgcaaagaagttcagatgggtggtgcaagcagtaactgctgtggaagctcagatgaggaagaaaacaggtctggctgaatggtatgggtctccaagaagagggcaggatgtgtgcttgtctgagtttggggataagattcaattttattctaaaaaaaattgcacttggatgaatagagagaagaacatgccatgtgcagagatgtgagcaggactctgtgaatgtaaaacacaggtgatggtcagagtcagatgggagagctctattttgggagtcctggatgagaggctgaaaagatacccaccgacccatgctctattatagcgagcagaaaaatgaacacattgtggtttgctcatttcatatatgaaagtgtggggctcaaaaatctgattactgtgtatgtcacgtagaaccacacttccccctccaaagtacgtctcatgccattgtatattcacatcttgtctaagaagaaactgtatctctaagtgccataaactccaataaaagcaggtttgttctttcctcccacttgtgttcctgaaacctatgtttataggaccttatgttacttacactttggtgtgttacctttaatctcaacctctatttgctacaaacaccactgaaaggtgacagtttcatgtgggataaactctattgatctctgtctgtaaggcaagatgtttttctcaagcatttttgggcacattttctctgagaggtagcatagggcagtggtcatgagcatagatggaagtcagactgtctgggttctgatcccagccctggcacttattgctaggcaacctatggtatgtacttaacttctctgtgcttccgattactcatgtttttaaagattaaattcaggcaccatgctttaagaagcacctggcacatagtatggaatagttagcttacatcatgggttcccagcaggggtgatagcaccctcaagggggcaaaaagtttaaattcaggaatggtttcattaggaaaacatttgcttagtgaggcttcttgtggggctgaggggtaagagggatgagtggagaggaaaaaagtggtccagaaacccctgggttgcaccaaccccattaagttggacctgatgaagcattgatagaaggaatcccaaaagaggtttacatgttgtacttggaggcccgtaaccaatagagggtttaatcaacaggctttttacctagggcctgatrtaggctccgccttaaggccatcacattcactgyttggttatgtgcacagggagggaaccagtggaagcccaaccccccttccacagggttcttgaagctagtcatgaagggaacagagggaggagggaatgagttgctttgcctgccttgcctgaggtggaaatggctgtgatagatgtggtgtgacctgggcagagtgaatagtaaaagttcacatctacccaggattttctgtttttcagagtagtttcacactcattatctcacaagcactctttctcttttgaaatagtttttagttacacatgtagtaaagaaatgcattcctttgtaagaaattgaagtattactgataaaagtaaaaatgccccatgagccacatctggttccagttccctgctccctccacaggattaacccctgttagcactgtgtgtgtccagcacttgtttctattcatttatgctcaggtaagactattttaaaaagtacactattgctgtgtagatcctttaacactaaggatatcaaactatatgtaattttctacttcaagctttttttaaaatcataatatgtcttggagatggttccataataaaacattcagatctacctcactcctttcaatgactgcatgcccatggaatgamtacctcattatttatttagccatcttactttctggtaaatactgatattgtttctgttttgatttttttaaccacagctacgaatgccacctctttgggtatgtgggtacgtgtctacagctgctcattgaggcagatattatctttacagcaaaggagactgaggctcagagaggtgacacaggcagtgaatagcatgtccaggaccagaagccaggtcttttttgtttyaaatccaggtttgatggattttcttccctcattccacagctacctcccacccttatctcatactgggacatttgcatttggcaactgatttcctagcagtaacatccctggkktggccctacatgtcrctgctccttttctcactgtagatgatggatcagctgctgtgtgtccctgaaggaaggcagctttcaggaggtggacagctgtgtgtgaataaaacaggggaggaggggatccacacatacctgtcctgacctatttaccgagcgagctgttgagccaaagcagcaccgtgttatctaaccacagctaaaatttgaaaggtccaactgagaaatgtcaggaggaagtaacacttgaattattaaggaagtaggtactaaaggagatggagaagaataacctatgaaaccggcttgttttgagcaggaaaggaggagatggatgttctaagtgaccgccataacttgaaaataaagtggttcctggggcctactaaatgtttaaatttcagagaatccaagcttctttttgatgagccttcttcagtattttacaacggcatatcgaaagggtttcttaattaaaatccccagcacgttggaggggcgggctgattgaggctgcagtgcctgcaggcagggtgcccacctccatcagccacgccagccgaaggggcatcctgcagctcctctgtcagagggattcctgccggagcacctcctggcagagagcatgaggcccggccaattcaatgtggcctcgctgccccagcccagccgggacactccccaggacccaattagcagattggaaatcgcatccaagtatgttacaatcaccaagttaaagaggaataacagacatgaaagaatcaagtgggaaaagaacattttggatcccgaaagagcaggctgcttgtcggagttctaacgaaccgaaacaaaataagtagtagctccttaagcctcttttctaacactgctgggattggttagtgtagagaaaagcattgaaattgcaaaagaaaaaaatgcttattgttcctatgttcaatttgttatttaatataacttgttttttaggaatttaataaaaaaaaagggagggcatcattaattttacattctgcaagaaaatgaaaaatgatctgctgattagtgatgtgcaatttgttccttgaacatctccagtaatgtgtgaatgtcacattacataacacttataatgattaaaccagaagatgaaataagataggatagatcttgtgttctttccttgactggtggacaactcatctcattaatctctctttggcttgcagccttaaattgaataagccgtgttactgggggagatttatggccaaaagacttagcagcctcactgaggaaatcttatagcaccattttgagagctctccaagataattcttgggatttgtattaattgtagcttgtcataaaacattgcccaaaccagaaatgagcaatgaaccttctcaggaacttaatattacagcaacattgaaaatatgcacttcttgatgttccatctcatgagatgttaaaacattctgagtcccaatttaaaattattatattagaaatggtagcttcagtagagtgggaaatgatagcttcagtagagtgggaaatgatacactgatacacctgggcactgaggaatgtttgtagaaaaccagtgggctttcaatatcacaagggcagtccttcgcagagcagtgagcaggatgtccctatgaaatgtttgtagaaagaatgaaccaactggtaaccatgagtcctctttttaaaatataagttctctttgtggttgaatttctgacacttggtgtataagtaccagtaagtaagattggcttacttgttgcaatttttaaaggaagtgccttgccacagccagaaccagtgscctggaactaaagttgaaaagaggttagatttaataagtcatccaatatatacaagatttccctttagcagtcatcagtaagccttgcttgatgacttattccatttggggtgttcacttcctctcaccgtagcatgtttattactggactctgggctccttgaatgcgattctgtgcccttttctgtagccccacatgtcagttatgcacaggacacactaaatgctcaacaaacactttctgatatataaaaccaaaatyattgtttatatgaagtcaaaatctacctccttgaacttccatttggtggacctagttctatcttctgcacaaaaataaacatgtcaactccctcttccmtgtgagtattttgaggcttaatcactcctcaagtcttctctgtgccagattaatccctagttccctaaattaattattttcttaagctgccatgtcaatcattttgtgcttcctggtcaactaaaacctcaggtttttcttaagtaatataaaggaaacatttcccctcatcttttattggagtcatgttttccttttaatctttttaactgaatcctacttaccattttcaattttaatgatactgcttaaccaatctttctaccttactgagagtttttcaaatgctgattttgccaataatgctgttaccatggtgttgtatcttttgcagatttgatcaacagtactggcatcagaaaaacacagatgctttggtaggtgtcatcagggtcctcatctctccctatgctggcattgatctatcaccttatgtgatctttagccccatacaaattctcatatggcattagaagtaactttagaaaatattaaatccatttgtcctctctattgatactatacatgaggaaactgagtcccaaagagcccatggccacattactggttaatagaaacactcatattagaactaaggtccaagtgacaccaaaggcaggtgtcctttcctgtttatcatagctgccagtctttatattattcacaaggtcaatgcaagaaacatttaaacatctcgttggaatcccaacatattgtgataggtttcctattacgtgagggttatgtaccactgtcaattagaagataaagcaaagtggtggccttttttatctcttattctaagatcttcagtaaaattccttctgtttctaaatataaagctttaaaacaggctatattgatgttgcgaaagaactggtacattataagtagaagtgtgtgtgtatgtgtgtgagggaggggtatacacatatgcacgtgctttatatcataattaaagagtggaagaaacaggattctttactggtcaatgaaaacttttcagaggaaggcaaactggtcatttatacaaaaccgtttgtggagcatgtagacttcctttgcactcactaagaaagcactctttttaacgagggactatacatttgttcaatgaaaagaaaatagctctttgtaccttgctaacggaattgctaactattcttcagataggagtctcattgttcccactattcagtatttaaatacacataatgtcatgtctttactgccattagtcagtattttcaaagagctctttttattaaatttctgaaacccaggaccaaagaacactttctcttaggtatatattatttgttagaatggaaacaatcaatacattttcagagtcaaaaagcactgggaaacagtttcttttttggtctgagcatattttttattaaaaaaaaaacctttgaaatattttgttttatcagaattgtttgtagggaaaatgtaaacctcactattgtttaactgcagtccaaagaggactatcatattgcacttctaatcaaaaaataaattgaacatagtggtaggcttacagaaagagagagaattagatttgattagattagctttaacctgcccggaataaaactgtctgcctttcctgttatttgtcagtgtttatagcgggtttcatctacaatgctttcactattatttctgggcggtaaaaggcagtcaagcagaaaagacactcataaatgtcagaaaagagtaagtttttttttgcatttcaagggctttgaaggtcaagttcaacccacttaacggaagcagagtgatgggtatgtggtagcatgttgttagctgctgcgtttaggcatataatttatgtgaagttaatgcacttgtccatcactctaagaaagcaaaaggtcctgggaagattctatttattttattcattttgttcaacttttagaaggtaaaataattcaaatttccataatttgtgatggaaaagtcacatgtttaacttgttaacagctgagcagggtagagcactgtaatacttccctgactcttcctgttgtaatttgtttcttcttctgagcagctgccccactccatgctgggcaaaggaagagctctgttaagcatttttgcaaaccagtgggcattttttttttcctctggaagcctttattgagatgttttctttttctttttctctatgaggctttattttttcccaccagggagcctgagcaattatagtttaaagctaccgaagataggtatgttctttgatatcaaagagcttcttgaagatttttcaaactaaagagacccaaaggttgtattttaaggtgttactagcatggccctttgtagttgaaaactctcagaatgtctaccaagtgtattatgctttgtttggaaatgttggacctcggtactattgcatttggtaaaaggcagggtgttagaatctgtgtgtatgtgtgttcctactgctgctcagtggagtctctgtagttgcaaattgtttccctagtgatgtaggatgactagagagagaatagggagtaaggaataaaatcgacatttattgagcactcactatgtgctagaggcataatgtatgtaggggatagaaaatcttatctctattcttttggttttgttcccaccttgaattgaattgacatagacagatcaatgggagaaaaatgtatttaatacaaattttaggtggcacaggatccttcatgaggaaatgaagacccaaagacacagttattgttgaagacttacatactgaactggaaaaggaatagtgagctgtgaaaaagaaaataattatgtggagagactagaagataagacttattttaacaaggttagtacagaattttcttagtctcagcttcctgtccgtgatgataagaatgttgctttctttctactatagggagggatctttcacatgaaatccataggggaatttcacctcctgcttttgggaaacagatggagggtcggagtgatcttgcacctcctattttttaagtgcttttagctcaaaataattatgccaaagtagcatatgtgggggtggtgtgttctgaacgtttttatgcatcttatttctttcaatcctcatttactctgagaaatggcaggttactatcctcatgttcctgattagagaatcagaaagggaaagtttacttgcctttgagtcaaaactggtttctttaacatccatggttgcctcactagaatagtctccagaggggaggaagtggaggaaaaagaatgaaaactaggaaagcaaagcaaacttcttgggaagtgtgtgtgtctgtgtgaaaatacatttttgtgcaatgaaatggtttsagtactgtagctctgagttctttcgtagctttgagaacttttaccactaaatggtagaaattcagttgttctcttttctttctaaggaaatgtctttgggtcaccccattgaggtgctaacttgctgcctctttcctggacttcttttctcccatcgacccttctcttcttctattcgtcaattctcaatctgcaaattcctgttgcctttcatatgtagaaaattcaattctctctttgtttttactgtccatttccagaccatgctttatcttagaaaccccaaatgtccatagcagtgttttactaaacgatgaaccatgaatgtgtatttaaccaatgagtgttgagtgccacctgtatatcagatattatactgggatgacatagtggcaaccaaaacagacacagttccagcccttgtagaatttcaactctgatgagaaagaaaggcattgtgttattttataataaatatattctagtttttcccctttatactttytgctgccatcaactttattattttgggagaaaagattaaatttcaaccctatatcttgtatggtgcagttgccccataaatgtgtgttgattggtgaaaaacatcaaatctctttagccctcatattttcttgtcacaaaagtattactaatattttgtattaaatggtcattgaagaaaatcatcatgtgtagttgagcatcagcattggtcagcatctgtatagaacttkraagcctataaagggaggacttttatggactttatcagaagcaagcttcataaatctgtggagaaggggctcttctctccattttgcagttgagaaatcagtagataggaactaatttgtccaaggtggagatgagaatctcatctctcctgtctctaaatcatcttttcttttgactatattgtctcttgacartaatttaaaagtatctcaatatccacagcaataattattttttgcctgaaaattacaggagcagattatttcattcatttaatgtattgattcaccaacatctcttgcacatctartatgtgccaaataataagtttccagagccaggggtatgttgtccttttccttaaggcattgtattctaacttattggggtagacagaaatatgactaaataaatacaggatccttatttaggatatataaggacacatgacataagtatagaataagatatccttgtggtataatggaaagatcattagctttttaggtgcgcctggtttgaatcttgacatcaccagttactagctgttaatttgagcaaatcattcatctttttaatgaacagttgtctcaactatgaagtgggggataaaggtatttacatacattgtagttgtaaagatcagaggtgatatgtgtacgagacctagcatgatttcagaaacatagtagatgctcaattaatggtactgcaattttatcatgtctattatacagatatataatttgtactgtatctgtttgttttttacctacatatctaaattktcttctctatctatctgtctattcctcaagaatcaagagactaacttcccgaagagacagaagaacagctaggagaagtatcagagaagtaaagtttytagggttgtacaaaaacttaagttttgtacagaaaaaaaaactatactaatatatgtggcaattgaaaagtatggaatttatcaagaaccacaaaaagcttaccatggttaaagtatagggtacaagtttgggaggctgagagatgaggctggaggarnagtcagaggtcagattatgaaggggcttttataacatgttaagacacttggactttatcttgccatatagacaactccctctcacctaagtaggaaatgacaagctggcaattaaagtgcttcaaataacgtatcttagtatgtggaatccttaattgtgtagaaagaggagaaaatctatctaaaaacttacccaagaaaccaacacatggtatatactgaacaagaatccttacgattgatgggcaaaggagaggtgagatttctagtgaaatataaaattagaaagtatcataaaccaaatcccagaagcagcatgcagggctgaaatgttataggccaaagcaccctcgggcaaattttgtccattacatggtaagttctaaagcagcagggacaaggctcagagtaactaaacccggatggaacacctgcagtttttccctgaacgtcagcataaatatttgacatgtcttcctttctgtgaaggggccctgtcccagtgggagtggtgtctggtatcccttagcagaagtatttgttttcttaagcttttctttatgtcctagaggtggattctaaaagtccctaacgtattttgattttgaattttcacaaaagtatttttttctttcacagtaattcagtataaaaggcaataaaagtgatgtatccagaaatattcaggacctgctatcagcaccacatgggaataaactatcttgccacttgcacatcccatgggaaaaaagaatcacaatccacatataggaaatattgcatgtgtttgcctccgttttgcttgtattgtctgctctgctgaaaggcagattttttgcagataaaagctgccctgcgttggtgaactgctcacctattttactcaggaagaaaaggctttgtgaaaatcaggagcaaagcctgatttgcagaataccatctaaaaataaaatgcataaaaatgtcaaaatatgctaagaatacagggccaccttcatgctttgaaaaattacctagcaaattcagcaaatgctgtttttaagtgaatgtaaattatgtgttttcgaagtttcatcttgtgaattggtggctaggtgctgaaggagacatgagggtgtggaggcggcctttctcttcttgctgcactagggcaatagatctgtggttaaagcagatgaactgggaagctcttgatcaggcrtacgaaatacccagattcttgtatattttctagtttgtgtgcacaaggcttctggcttggctgcttttgccagtggggaagcattagtgaacaaaacagatacagcytcyagttttcaagagctcacagtctagcaagtcactgcaactttaaaaaggggatgtacatgtgtggtttaaaktatggtgggtaaagcctttaggggttgtaaaagttcagtcactggggcctaattctgcaaaagagaaattcttcccaaagctgggatacattgagtgtcttgggcaccagagcagaagttttagttaaaatattaagatccagcacaaagttacctcccaccagttgaatctgtttttgaaatttggaaaaatggcctctgtttctccacaactatgtattggtaattcttccctggggactaacttcatatatatattttcacaataatgcatactgaataaatctgaatattttgcttatggaatcaacaaataatctccagagaaagtttcattatgcagtcatatataagatatgaaacagattttttccctttattttaagaaatatgcatagcataaaaattctcaggctctctttgctttatgtagcaccatttctgataagataccaggtttcaacaaactggctcagtggacatttaaaattcccattgtgagtgccagggcttagtggaagatgtttgaccatgtgcgctaacctatcagtgttcatctacatattgggagactgaacctgatctattctgcacaactggacagaaaaatatggaggtgggttctcagccaagggttaaaaaaggaagtaatctcttttgctgtaaactttttctcagcaggtgtaaaatagctgcaatcaggtaggctttggtaagtggcagctgctatctgcccaattgaaagatcagaaattctcaccctatttctgtttcaattatgtagacagtggctccaattttcaagtgtctaaaggcatgcctaactctgtgataagaaatggatgtgggccagagtgggagccatgtgcaaagctgtgctgcaaaccctttttctagtgataccagctctagacaatcaaggtccctcggttatcattatagagtcattaaactcaggagccagcagtgatcactaaaaaatggatgtacagatgaggaaactgaggcctagagaggttaataatctgacttgtggtcagacagcttgtagacttatctagatatagcctctgtccttaagctgctgcctaaggacagctaagtgctaagtttattgctaagtggtaaactgattagtatcacaaccacctgcaacattatgttgagaggattctgaagttgcatcctgattcaggtggaaatagtgctatgattgattagcaatgtctgcctggggagaaggtgggatatggtttgctgtgtatttgctgaatttggttgaatgatgatggctgctttgtaatcacgattgctacaggatgtgaagtgtgcttcagtcagaacaaagcgctctgaatcttcttggaggggcaggacggtttcacagaggagacaacatttgaatttgatcttgaaggacaagtagaagttttcctgagagagaaagaggaaggaaaggaaagaagacattgcatgaggaaagaatagcttatgtaggcaacctgatatgtggataaaaaaaggaaattgatgatcattgattgtctgctatgtaatgggcactaagctaggccttttctgtgttatctaagtatttaattttcataatgaccctttggttttacagatgaggaatcagagaaaaagaaaattaagatgtctgaggtcattcagctattaagtagagctaagattttaattcttggggcttcaaagtaactttagtggcagcaactcagaggaacagtataggtaaggaagagtggatcagagaggcagagatcattagtttggatttggactattgaacttgagttgcttctgggacatccagattgggatggctaatactgttggaaatctggcacagagtgatctggtgatggtttaaaaaaaaaatcaaaggctctttgataacagaccttgtgcattttacatctaggttcctgcctaatagtggagatgtttctgcctttgctattctagcaggggaaactatacgtaataaatgcatatgctttatattgttttagtgattcaaatgactgtcaatgcaatattaaattcagaattgataggaaaactgtcctacttagaaattcaagagttcttggcacaatactatttattatcaccatgagacctgtgctgtagcaaaactctgcttgtgtttcggtgaaagactgtttaacatgcatgtttcactctaccraggttcaactttgacctataagaggacagtgtatattccttagagagatgctaggaggtaccacaattgatatctatgtatgagaagtgggtgggatatgcctgcatgagcaacataatctaaaccaagttcaaaaaaagaagttttttttttttccacaggtgcaatcttgacaagaagaaaaawctcaaaaaggtattttgcattggtaaattctgatgtcttgggcagctccaggactgtttgtcatgctttccttatggacttctggttatgcctccttaaggatgtgggctgagggataatcatttaaaatagtccaggcaccatttctgattctttgttccctaraatgatgatggtggtggtggtggtgaccacaacggtgacaacaatgataccaccatatttcattgatttttaaaatgtttttccacattttcagctatctaagaatacttatactcagtacttccttgcagtcactgtcagcctgcaacaaagttaaatttgtccacagaggattggcattatttcacatggtcacctggggtcactaccaacctgagaccatttaaagttatttgctgaggtgttttgtttgtttgttttcgcactgtcagtatgaacttgtatcagaaacctgcatgagtatctgcttgtggttcaagttctcagggaagattatttttcctctttctcttcttgctgtgcctttctgaatggaagctttctttctggcatattctagtgctaagggaatagctgtttggtgtttcagctttttgcagaggtctcttattagactcccatcttacttttctttcttattctatttagagtaacagtgtgactaacaatcgatggtctcttatagctgatgaactactgtaacaataaaagctaacatttacttagcactttccttttaccaggcagtgctctaagggctttttatatgcgataactcatttaaaccttcaataattatattagatgggtactcttattttccccaattttaggtaagaaaacgtatgctgtgtgcccagggttgcacatattgaytcacttagtgttaccagtggagggtgtccaggttctgggcgttttgaacaaagaattgcacaaaacacacaaacaaagcaaggaaagaatgaagcaacaaaagcagagacttattgaaaacgaaagtacactccacagggtgggagtggccagagcataaggggctcaagggcctggatgcagaatcttctcaggtccaaataccccctagaggtttcccattagcctgatgtaaatgaagtggtgttcacctcatgtaaatgaagtggtggtctgcaaccaatcagaggctaaagtgatgttacaaagttacatttctatgcaaacgaagacttggcccacaatcagtctgattggttgcagacagcagttaatcagaggctgaagtgaagtttcataggtcacactcccatgcaagcatctgattggttgcaaaaagcaaccaatcagagatactttccattttcaatctgccacctagaaaaagtggggttttgcaaagggagtggtctctggtccttttgttacctagccagtggaaagttagggtttttctttcaatttagtcctaggaagtcagcgtgaaacggccttaggttccctgcctccagaccctattctcttgcctcattagtgtaacttgaccacctgagtctaccggtacacccctggtgagaatccacttttagctttgtaaagtacttggcataatgcctgatacttgctgagtacatagtgagctgttgcaagtcccttccactaaaaaataagctattgtccttatcagaagaataggatactcttttgttatctatttctcattccatgatataggattctagctttaagtgttgtcaatctcagacaagagttgattatctaaaaaatatggattcttgtaagccttttcattatgtgccatataaaaaatgttgctccaagcaggtttactagtttatcaccattcagatttacaagttctatcaggaacttcaaagcaatttcctagtaaatttcctagtaaaaagtccagtttaacaaatgtttaaatttttctcacttctctttatattttaaatttttctcacttctctttatatttcacaccctaaccctctccctcactttcccattccccaccacattcacctcaaatctacacagaaatcttaaagtgagatgaattaagaaaaaaaaagaaaattgccttttttcttttatgaaaaaacatatttttataataatctgaatctgaaatttttgaaataatttaggacttatatttagaaaaaatcatttaatccctctgtccttccttctttctctccttcattctttcatttcttccacaaatatttactgaatattttctgttaaagacattgtgcttgatactgccttatgagatatatttctcagattttgttcatgtcctgaagaaattttcaaagacaaaattaagggggaatctttctctccttccctcccttcctttctccctccactctccctcttccctctttcctccatcttctttctccatccaccccatcccaccccacccttatccatgaactagaagccaaggaggaacaaatgctttatgggggaaacactctgagcaagttatattggaacttgcagagatgaggatggtagaatacagcaagggggccaggaggagcagcatgaacaaggtcacagtaactggatagcaaaggggctttagagaaggctgagaagtccagcttgaaacatggaggacaggaaagggagagatgggagaggagacttcccttctcacttcacttgttacagagagatgcatgtgaggtgtgaggataaatgccatttaatgtaaggtcatgtagattcacagaaaaataagagattccagctgatgtcattatcatcgtagtcattttcatcattgtcgggatgcctctggcaggacttcctccctaatgacaccaggaccaccagaatttacacttatgctctgcttctgtgtcctgaacaccttggaggtacgaatggattctaagagacaaactcatctcgtttagagtgaaaagatgacaagcagaggttcgcagaagccacatacaaccaaygaagcctataaggtagctgagaattaaacaaaagcacctgttccgattaccttcattgttcctggttagttagcacctccctttcctcaacagaatgcccggcgcacaggggtgggatctgagtgagggcaacaggtggattggagaacatttcttcccataagtagtaggatttgatggaaaaacaagtaacttcagggtaataaaatgatggaaagtcctgatgggtcaggtccatatctaatcttaagaagggcagccttargcagcatagtgggtgctagaatcattggtaccatcaagaaaagagtagtaatgtgaatttcaaagaagatcactttgggataatgaacagcatgacagaatccgggagcctaatgaagaagatgtgatatagtaaaagaaatatantgagtgtaggctttgaatagggcagaaggagtggaactagagaggcaagaggagatgtgattacggaaggtcttgtatatcataccaagggtctgcacttacactgtagagtccagagggatctaaatgtaggatagacaggatcaggtttgattttggaaagctcagtctggaggtggtgtggccaatgtttgggaagtggtaaagactctttcgggaaagacaatatcaagagcaaacatggactacttcatcaggtatcaccagcagatattaaattatcagtacaaaacccagcaattattactttcagatcggccttttttctcttactaggagaatatagtccagatagagtgtacgtgcatgaataatcatcatagtcttaacagaggatgaagtttaatgagtgttatcagttagataattatttatataatctcasttttccagacaaagaaatagaggcatagtgagatgaagtgactgcccaaagtcatagatggagaaaatggtaaagatgacttgaactctgatattctgcctctagagcctgtgttctagtgtgtgaattaactaagttgttaattgttattcatactaatgggaacattctcatataactggttcagaaattttaaaaactggtaccagccttaggtagattttgtaatgcagtttgtcagtaaccaaaatacctaattcatatggaaaattaagaggctggtgtgaagcatgataattacatttactttgaaatcagcaatttgtggataaatttaattcattttgcccaactctggctttattcccggtattaaaaagacaactacagggtgcacttggttagcactcagggaaaataaagcaattattcttccacttctgctagagaacactaggtaccctttgtcagtcaattgtatagactcttattgtaggcagtttgtaggaaccaacctgatggaatgggtatgtcttcctctttcagctccacaatccaatgacccttttgttcaacaaaaacacaactaaacaacaaaatgttggtagttaaaaaaaagtttaaaagtaataggacgccttcaacatggtaatctactttaagaatttagagcacatgtcagtatgtcaccttcagacatggttatagtccagtaagaattacaaatccaacaaacaaaaatcaaggcaatagagttttcatgggtaccactgtaataaattcttctgtgcaaaaagccagtcctagagaaaaattataggtagcaacatttcctgaggaacttttttcccaaaggagttttttttttggggggggggggtgcagacattattgagaagttcaagttaacatgagcattatgactgtatcagatgacatgataagaggttacattgaactttctaacacctattcttaaattataataaaaaaactcaytgagtttttaacatgcctgtacattttctcattttattcagggagtagatttaggtttttctggcctgactggatttttaaactgctacaagataacataaaaataatcatggctatattcactgagtttgtttcattttgtaaaattatgaaaaacaagtttatctcattcagtctctttagcatattgattcagtatatctccctttatagaaaagaaagaaagcaaggattttcacaagatagagctgaagactgatattgagtacatagaatgaagagcccagaaagcaacgtctctcagtgtggctggacagatagacacaaataaatttcatccaaagggttagttctgattatgagaacatgggagccttgggccttctttacttacccatacccctaacaaattagtggggtttttcctagagttcactatagtttaataagcgggatacacccagatttttgattcaacgatgaaataaaatgaatgaagsttttatttatatactctgtgctttgctacttcaactttgtgcaaatggaaagaagctttattgcattcagagagaattagatttggaacttggtcagtggcacaagatagaactataacatattgatgagacaactttttatgtgggaaaataattagcgtttgataaaatcacaaagaagcaatgggtagggactcatcaatgtgtgaagtgactgagcactgatacacataacacagttgacattgtctttaatatttattattgaataaatgacagcatgtgaacaaaagtgtatgcttttcacactagtgaatacttggtcattaaacaatagttaaataaaaaacacaactttataccattggttataatttaggaaaaagaaaacaaaaacatctgacaatagactggattaaaagttaaagattttattttgtggttaaagactacttctacagtagaaagaataaaaacatatacatattaatatagattgcaaatttgctaggtccggatctttgcacttgtgttctctcccaaaataatggattttctgtggattttattttggaataggtatttctcctatgaagtctgataaatgatattcccactctaaagagcaagcagctagaatgccatgtttttgatgcatatttttgcagcacagaggggattaaattctaaatgtctcagctgttaaaggccccttcagacttgcccaaaatgaagaacaaagaaggagaaagctttccctaaagcaattcatcagatctatttgggcacagtgacattttctcagaacttatatggataagttacactgaacagttcaagggtttgcagctgcttggaatatttaagaaaaaaatatctctagttcttaygcatttcatatggtctgaccagtgctcaacactagctaatgttcactgaggctgtaaccatcagtagttatgtcgtaatagcttttgtttctcgagagctcattatgtgcctggtactgtgttctgcattttccactcattgtatcacttaatatttatgcttctgatcttaggggaatgactgtttatattgcatatatgccatttttttgcagtatgaaaaatttgttgagccgagtgtcatacattataaactgacatgtacttactgttgtttaatctaattggtggttgttaaatctaaaggatgttctractacttcaataaaggcagcagcaatcacttccataaataaatcattagacgtagaacacatgtgtaaacaggtagagtcttctaatttgctaagtgttgatggactcaaaacagttactagaacaagccatagatggaatacatttattgatggaataagtcaaacaacttgaaacamggcattgtggtgtcttaaatggtaattcaaataaaatgaagtgattgatacatttttacttgtttggaaagtggagaatatttyrgaattgcaaaacattgcacttttatatacatttatcctttcattatcctaatgtagggtagataggacagttgattgcatccaacttcatttatttggcttattatcttttgttttatgattttaactctgtctagaatcatctcctaccacttagagtctatgtattcttctgaccaaatgacttcaagttttctgaccaaattaatggcctttcaaactgttaakccctctgcctggaatgcccttcacatcttctcttggcgaggccgccgcggtcctcaggactctgttggaatatcaccaccccagacaaacattccctgaactgttcctcctatacttacccttcctctggcctcccacagcaccctgtgtatacccacattagcatcatttgacacctggtattatagtgttctatttactggccagctgcaccaagttgtgactctttggaagcatggtgtgtcttttatggttttatttcggttttttcagcacctagccaagtctacacagagtatggactcaatgagcgattgtggcttgaagatgtaaattctttagtatgtattgcatgatatacatgtgagacatgcatgtatatcatgcatattagtactttgttcacttccccacctcccacatccctatgacacacacacattctcattgcattcagcgatgtgtagccttctgtctcatccatggttttcattgtagttgctgaagcttgaggtcacgatctggtggaagtgactactagaagaaggcacatgtgcattgtattctgttgtacttgtcatctggagcacacagtgtacttgaaggtatgccttttctagtggaatttcagagtggtttcatactagcagtatgagaacactttcatgctaaacaagaagggcaaagaatcaaacccgggcaatgtaacagaaactgagctgggggcctgagctgcagaaggaacctctgtccactgcagaataccactcccagtggcacacagaggagagggtgtctggcttctgctctctggttgctcccttcaccctctctgtgctcattacttggttccctttgatagaacatgagaggcagacatgggttgccagggagcaggcttttacaactgctatttcatcctgttttgaaatttctctcaaaatggttgacttatttttctctcacgtatgcatacgtatgtgttgctgcacacaacagtggattcagaaaggctatccacatctttgtccccaaacccccagccatgcaatgcaatatagcaaccaagagaaccagagagccgtgctgagctctgaataaacaaaagcacaaatcccatctgggtctccttcaaagcaagctgctattttgcaacaagctaccaaatgacgattaagaaaaaggttcttacctgtttacttaatgggtgactggcctctttgcttttatttagccatctgttctggtctatgtccctttaaacttgtaagatccatcacttcattaaactgttaccttgacacattgcnnnnnnnnnnnnnnnnnnnnattaaaacagtttttcatgattagaagcttaaatgaggtaaggctgtggtagttagtggtgagataaggggtgttgaggaggcagagctcaaggggctttcaggcgattggaagattaggctggcgagatggagggctggggcttttccaaattatgggaggtgagcaagaagcaagactgcctttgggtatcgctgactcctgggggctggttccattgcccatacagaggctgtgaccctggccctgggaggatacaggaactgccttcaggtttcttgacttccctaggagagtctgcgaagagcaaaaagaactaattccaccgggtagtggtaagctgaaaatgcaacaacaataaacattttggtctttcacagaaagttatgtggctttccttaagttcgaagaagaatcagggggcccagcccaactatawgaaagaatattttattgtgtctttaccctgcacttcatggcttcagcagtcctccttcttgctctagacttaccttccacctgactccttgacagttgctgaaaactagaaagtcaagggctttatctttttactatcttatgtcagttcctgctctgacaactctggtttcttctgatatgacccataatattgccgtcacatggaccccaaatctgaggaatctctgaattttccgtcagccgcttctgtcctgtcagtagcccaagttctatttctcccacctaaatcaagtttctcacatctttttccaccttgttatttcttcttcttctgccctagttttcatccctcattacctctgtcctaggcaattgggatagcctcctaactagtcactgcctacctatactctctccctgctccaaagcatcttaaacactgatgtttgattataactcataacttccccccaccccgccttttttttcttttttaaaaaattatactttaagttctgggatacatgtgtagaatgtacaggtttgttacataggtatacatgtgccatggtggtttgctacacccrtcaactagtcacctacataaggtatttgtcctaatgctctccctctcctagccccccattccctgacaggacccggtgtgtgatgttcccctccctgtgtccatgtgttctcattgttcaactcccacttatgagtgagaacatgtggggtttggttttccgttcccatgttagtttgctgagagtgatggtttccagcttcatccatgtccctgcaaaggacatgaactcatccttttttatggctgtgtagtattccataatgtgtatgtgccacattttctttatccagtctgtcattgatgggcatttgggttggttccaagtctttgctattgtgaatggtgctgcaataaacatatgtgtgcatgtgtgtttatggcagaatgatttataatcctttggttatatacccagtaacgggattgctaggtcaaatggtatttctggttctagattcctgaggaatcaccacactgtcttccacaatggttgaactaatttacactcccaccaacagygtaaaagcgttcctatttctgcatgtcctctccagcatctgttgtttcctgactttttaatgattaccattctaactggtgtgagatggtatctcactgtggttttgatttgcacttctctaatgaatagtgatgatgacctttttttcatatgtttgttggcttcagccaaaacagataaatagacaaatggaacagaacagaggcctcagaaataatgccacacatctacaaccatctgacctttgacaaacctgacaaaaacaaacaatggggaaaggattccctaattaacaaatggtgttgggaaaattggctacccatatgcagaaaactgaaactggaccccttccttataccttatacaaaaattaagatggattaaagacttaaacataagacctaaaaccataaaaaccctagaagaaaacctaggcagtatcattcaggacataggcatgggcaaagacttaatgactaaaacaccaaaagcaatggcaacaaaagccaaaatagacaaatgggatataattaaactaaagagcttctgcacagcaaaagaaactaccatcagagtgaataggcaacctacagaatggtagaaaatttttgcaatctatccgtttgacaaagggctaatatccagaatctatgaagaacttaaacaaatttacaaaaaaaaaataaaaataaaaaaataaacagccccatcaaaaagtaggcaaaggatatgaacagacatttctcagaagaagacatttatgtggccaactgtcccctttaacaaaacaaaatttcttttggctttccatcacctagcaaacttagtatagatgtattagcttgatatctgaggcaattcagaataaagttatcatttgtgtttctagctttttctccttcttcgtgctccagtaagacaaactactgtacgcctatgagtaactgtatgtattcttgtctgcgtgctgtttcctctctctggaaagctctgttcacacatatctgtcaattaaaacacatgcattttatcaagctcaatttcaaagacatctttgctttctctcttctcaatcggatgcagttgttcctgtttttcttccatggcagtatgtttagaggaatgttctgctgcttggcataatttttttttcctcttgttacttttttgaatcttacttttgcaaatcctatagcacaggcagagtttcctactcatacagggtgctagatacagaaacagaagaatgagtgataatgatactgtgtctacaagaatgtgaacatccattcattcatttatttattcattcatttgtttcactcaaatgttctttgaatgcctgtagtatgtaaggtaccatgttaagagcctgggatacagagatcaagatgacacagtacattccagttctctaagaactcacaaatccatgtaggaaaatcacataaataattacacagtgaaaaagtacaacaatagaagtgtctttaaattatgggaatgatgggactttacctctgttagagtggataggttgggggtcaaagcatggtggtgaggaggggattgagcaattagaaaaggtttcctgtcattggaaatgtctgattggggttttgcaaactgaataggagtgtacaaggaatatagtgagataaggaagggtggagatgcaatggaagagttcaagaaagcagctctgcttgctctcagcagcccagcacactaggacaatttggtcaccaaataattattttccatttccaggtaaaatatgctgaatgacagaatccttcgacccctatgaaagaaaaagagaagaataaaggaacctccttctgtgactgcctttgrttgaaagtcattcgttcttctttttgtttttttaatgttttgtagagaaagtctgtgattgctgtgagcttcatagcagcgttccttttcctgctggttgtgcgtcttgtaaatgaagtgaatttcccattgctactaaactgctttggacaacctggtacaaagtggataccattctcctacacrtacaggcggccccttcgaactcactatggatacataaatgtgaagacacaagaggtaagatcccagagggttacctagcagttggagagtatccatggtaacagcttttctttaggagccagagggcttccaactcactgaacttactctgtctgcccyggagagcttgcttgggtccctgacaacatcttctgtcttattattcttagacatttactgacaaatgtctaaatctgccacccctcctacattaaatcttctgattcactggcttcatatggagtcaaggaagcaattacttgttttcctggtggtttgtggcacaacgtacatatctctccatttagaagctctgatyagcagttaccagctggagaactagctggcttgatttcctgtaggtcaactggttggggagagctctttatagaacttcaaaaatgcatttatactccttaaaactctgtaatccttagacctggagctagaaaaggccaagctgattttaaaatttgcagtggctgcagagataatgggatttaaagagttttcaaatttaaaggggttaaaatcgtgtaaatcctataatcacagaagctttaaatctttgtagccaattggtagtacaggagaggatggaggtatattgacaactagaaagtgcacactatgctagcgcttttgcaagcaagcatttgtctcataaagtaaaataaaaataatgaacctcacaaaatatgtgatgtatatagaagtgcttaataaaattgttttcactattcatttctatggagttggatgaatgtgagtttaatattcagagacacaaagtccaagcctgtttgaaattgttggtaacaaaggtacaagctaccagtgtgtctacattactagggagagtcttggatcagctcccatcgaaaggtcattttgtaaagatactagagggtagagtcatgcatggaatgctactcctgtcctgagagttattcttagcattctgggaggatgctaagcttggtctacccccttttgtagtcaatctcatatctgagtcattgcttctggttaatttgattcttcgaaaattgtttctgtatctgcaggatttacaggcctttattagaattttatagttgaaaaaaagcaccattaataacacataaattcttagaatctttgatgtttatcctctaattggttttaaattaatttttttacagtgtctattgcttgaatttgttgagtgtcctaataaattgattacctatataaaaatgtatctctttgaggagagtttgtctcaccctcatcttttgttacttttatttctggctatcatttaatattctataactctactgtatggtgttaatcaattcacaagtgcctgtcacaggctgaaaatgaaacatgtgactaaaatgtctcacgaagtattctcatatgggaaatcccgtcaaatatcaaagaccctttcatttctttaaatattaatgaatttgatttcggagtgtgaaaggaaaaactgacctatggatgcagttatttaattagttctattaactgggctatctttgaaattattttgatgtagtttttaatacaatgattttacaaaagaatattgaatattattttgctcctgcaaaggttatttcttaggagaaaacatagttactggaaagaatctgggctttggaagcacacaggcatggtttgagagtcagttctaacatttaatgaacttaagcagtatatttgcttttgggtaacttccttaacctcagagccccaatttccttatttgcaaaataaggataacaacatcagcctagcaaaattattttgaggataaaataagtcgaagtatatgaggttcccagctccaaattgctattcaatgaatgaattgcttttgctttctctgtactttccagtatggyataaagtgttcagtatgaataacatcaaattatcacagtccagagtaccagaatttatatgtacattttaaagatcctggacttgggggaataaacacatgtaggggttctcaatctcattagtaatcatggttttacaaattaaaaccacaatgagaaaaatatttaaaaatcacaaagagatactaatatacatgaaacgccagattggcaaaaaattaagaagtctgacaataccaagtgttgmcgaggatgtggaacaacagatactattgtatacttgtagtgggagtaaaaattgtaatacccactttggaaaaaacagctccactgttgtattgagcaaagttgaagatttacatgctgtatgcccaaccatttctagtcatggatatctacactagaggtgctcatgaacccgtgcactggaaggcatggacagaacatgtagcagcatttttcctagtagccggaacctagaatatacctaaatattgatgagtaggagaatgaattagagtcgtgccacatacatttggaataccatacagcaatggcgatgaagaaactgcaagtatatgtgaccacatggaagataaagcaaagtacacaatgtgattccgtttatgggtcacaagaagagactaaactaaataatgttgcttagggacatatacaacggtaaactaaaaaaggaaaaaaaaagcaaggaaattattattatgaaagggggtctagcggttacctctgagaggagtgggcagcttgtgatcagaatgggtttctggggatttagcaatatactatctgttgatcctgttggaggttacacagatgttcacagtccatttattaagtataaatttatggtttttggacttgtatgtctattttattaaaaaattcaaaatatattctgatcccaggaaggatgtttatttaccatttaccatggggaaggaatcatacaaaacaattcacctaattcagcagcaggaaataactaaaaagaagcaatgggatattaagctatctaaagcaaactaggaatatttgaaataggcaatttgattttctataaagactaacagacacataagcaacttatttctctagttctggtctatgcatgatagaccccatattgcatcatgaatgcaggtgatagagcagaaaattttgcatgaaagttgaaaacattagaacactcaaagggaatgacagattttctcctaaattcaagtagttctaggctaactcgggagaaaataaaaactttgtgactttttaccacccttstcaatgatttcatcctttgttctgacagtcccacccctaccaccatgtctgtgccatgctcttactcccaaatgattgtgcatttgttctcactgtaatgtcctcaggcgcaatccgttgcagaaatggttacattaaataagagacacagtatgataaagctttcaagagccaaagtaatatagctgaaatgataggtggtgagttcagtgttctaggacaaatagcttaaatagtgaccacaaaaccatgcttcagagattatcacacactaagtccctattcattctattctaattctgagaaggtcaataggcttagctgaactgagtcaggtgatcaccaagctgatctacttatttcaagatcttggcccttaaagttttctcagaagactttccccttaaatgcatatggtttctggaaattactaaacttcttagtatttttttaaatatgcaggcatgccagcagtgatttccagacctagagcatctgcaaacaccatggctgttgatgatgggtttactgcctgatgcttcagcttggccagaagttgctgtaactagtcatagattttatgagctgaaatgattacaagaaagaatgtctctttactactgtctaaagaaaagtggaatgggaggcagcagaattaggtcaaacatctagtggacactgtggagtgtagggttgcttaggagcaaaatctgattstttagttatcttttaaaaatagatgactctggtccctttggattggcacaagtgaaaatatagctggtttgtgaatctatgacagcctgccctgaaggccccacatatagtaaattatacccagtttaagctctgcttcattttatcaattaatctgtttttttwwwaaaaaataatctgttcccaggggaaatacaaaaattaaaataaaaggaacacaggagagatgtggttttgcttatatttcaagctgtttatttttttccctgatgtagatccataaaaaagagcatgtgaaaactgtgatgactattataaaggggttaaatagaaagatcaaaatattcctcccactgtaataatgatgatctaaatataacagagttggtgattggctttaactctttacctttacccagtctccccttcactttctcaatgagtgtaagctaaggttcttttctatgggggaggggaagtcttgagaagcagggaagaaaaatgagtgccaactaactgggtgagtgctgaaattctgaaagtcttcgctggccacggagccccaaatttctcatcaacacgtgtttaagctgatagcaaccatgatttcaaaccaaagcttggatcaggagtgatttagattttgcaacagaccctgccctcgcctccctgctgtgtcattaccgtgtctataatgcaatcccccattttaaaaatgacaatgtggagattccacctatagcattatggcagaattactgtattatcaactggctttggatatggtaaaaagtatatgtcacccatgtatttttccagaaaaaaattaaaaacagaaacgtgcttcacaatatcctaaaaccctattttccccttgaaacaaatgctatttattttaaattattaattatagcagacagaggaggtataaaggactaaggtagtccagggcttggttcaaggtaatcttgctttctcctgttgagatcatggcagatttttgggaaaaaggagaaaacgaacttcaagctaggttctatttgyagttgcctatgagggactcagtcattgtgttgtcttttttgttgtgtgacctggtgtgaagacattgctcagagcaagcagcctgcagtttatttgcatttactgctagatgaaaggatccagcttgggtgatcaataggatgccaaggccagatcttattggtaatcagtgagggtgacagatgtcttccttagacctgataggatcttccccttaagatgctggggctacagaggatttctggtatttggggaagagtgccctttccctgggtgcctgaaatgtgccaagtggagaggtgcaagattgccagaacacaggaagcaagtgcagggctgcatactgacttactcgacaatttaatgaggctgaagtatgcctctttaaaaaatgagaacgttttaaaacctcaagtagactaaataggaatatttaggatcagttgctgtgacagacaggccacactagcctaattaaagatgtgcataacatattgatgttgcaatagaatttcccaaattatggttatagtaacaattaaggaagagagctgactttcttggtgataaaagcacacactccacacatttaaataaatgtacacatgtaactaaagctgacatgaataggttttctatatttggtaatagaggctttgggttttacgtaagtatattgagagcaattatgtgcaaatgtatgtcccaaaagtttaaaactgatccatttaattgttaattaaaatccgaacattcycatttatgtaatcataaagcaaaatgaaatttgagtattaaatgttatagaaaaggaaacagctaaattaacatataataaatcaaaactttgtgactttttaccaccctcctcattgatttcatcctttgttctgacagccccacccctaccagcatgtctgtaccatgctcttactcccaaatgaatttgacatgtgtgtattggatttgtcattttaaggataatttatcatttttctcaagtatgaaaggatatattttttgagtggagaagagatgactatgtttctcagtctggttgtgaaatagcaactttcaatcaatgaccatatctccagacaatctatgagtgccagatgagaaggacagrtgccactgtgggttagaatatttccaggaagcttttgtgggagaggtgagacatgtgctttggagaaagatttggatgggacagaggaagaagacaaagcagagttgggtaaaaaagcaaaggttcagaatatgtattgtgcattttccttcagcccctatgactcccagtaggccaaggacactatatggaaagctacagtaaagccctaatgtctrtgctggtaatcgtcattgcctcacacttggtggatccatttcatacctttctctggattcaatacctttagtcctaatcgtgtggctcttctttttgtttrgctggttatctagtcttgtagtgctcttaccttggccctactgccctgcatactatgtagggggtcacttctaataatgcttctctctgtgtacccctgacatggacacaactccccatttccaaggggcccctgaagtactgcccaggcctctgcaatcctctgacttccagagaaggaagtcaggcacatgtacaggtaatacataggtcaacctggctggaacttactctggaatatagaagaagatagaaaatgcattcattgggtaattatgatctgggaatgtgagtgggattatggaaagaccacactcctatttagacataggagtaatacatacatgtaatatatatatacattcatagttatgaatcagtatatacaagtatatggaaaatacatacatgtatgcatgcatgcagcatatacatgcatacatgttcacagatcaagttctagccacttaaatacaaacatacatagaatatatacaacatactatgttatacattaaaatggtatgtaaaatggtgtgtaaatggtgtaaaatggtatatatacacacacacacacacacacacattatatatatatatatatagtcaggtaggtgtatagtgtgccttttgcggttgtctactctccaccttccctttattagagaaggtggcccttccttttgaccacaagggtgagcagaaaagtcaggctagtgattggtcaatcaagtgattggttgaggggtgggctcatggcccaagatgagccattctgaagccttctcaaattttattatgtttttctgggacacactggcaggaaaggcccccttttctctggtggtaaagctgttgggatgtgattctctggatgtcagtagctgtgttcccaagacagaatgagacaaagacactgagagaagcagaaacaagttgcaaggctaatgtgaagacccagacaacacttcaggtcctgagctcaattcttgaaggcagcctcccctcccatcccccatggtttgggtgtataagccaatatatttgtcttctttttacttttgctggtttgaactgtttttgtcccttgcaaccaaaaaagtcctagctgatatattgtagttattttacagccaccaccaccaaatgttcagtaactcatctttaaacaaggtgccatctgaaggaggagaggagtagtctttccaaatctgcactctcaaacctgctggggggccaaacacaagtcacatccatcagtcagtgcaggtgtctgcaaggggtgaacgctgtctatctttctgcttaggtgcatattgcttagtaaactagcttatccttttgtggtagaaaaatgaaggtcaatttcccaaggttataatgccagaaaatggctggacaagactgactactacctgaattgctagtcgtactcaactgataaatcatatagtttcattataattgttagatgaaaatttctctattgctgtgaggcatcagcagtcaaactagattgattttcactttacaaatcacattttttattgatgaaaaatccattattatcataggttttaatgtagtgatcggttcctcaggaagatataccgcagttttatttattacagagccttaggtagaaaagtccccatttgccaactatcttgttaacgcacttgaaaggggcctattagaaattcaactatcaaattacctcatttgtgacaagcaaaggaaaacaaaacagtgtatctatcacaaataccttgatttgagggttgaaaaagatgatagaactcatgtcctgatgtagagagtttttctatagctcttctcaagctgatggcctggcagagtgactagtgcgaaaagctttcatcaaatggcaattggtattaaccaaataccaaatattttgaaaagtgcttattctgttccagacattgtgctaaggatcagcaatgaactgtaatttaaagaagtgttaaaattggggttcaccaaagaagagaacaacatggacccaagttaggagtatcctggaacaataccacctagaaggtgtttgcattgcagcctgtaatgatgatggctgagtaaccatcttacacaagaaattcatttcactgttctcaagaatagtgaacattcaagtaatttcaattaaacacttatatttaatgtctaaaaggtaatttgtcactaagtagatggcatcaaattgtgagttcttatttttcagagtagccttacaaaggcttattcacaaaagaaagatagccattacagaatatttcatttcaaaaataactatatgcttttatatcaaatgttatccaccaccgccccccacccccccacaagtttgggaaatagtatgtctggttaaccgagtcatctgactaataggcatttgccaagtatttaataaatggattctttatttattcatttattgacatggagtctcgctctgtcacttaggctggagttcagtggcacgatctcggctcactgcaacctccacctcctcggctcaagcgattctcctgcctcagcctcccgagtagctgggattacaggcacctgccaccatgcccaaaaattttgtattttgtaaaaatacaaaaattacctctagaaataccctgctgtggtgtttcataatatgtgtatttgagtatttgctctgttgtcttcttcaaatatgaacatttaygaatcccaaagtatacctggttcaaatgattttagataagggattgcaggcctgtgtcaaacacagactataaaaatgattaagaatgaataaaatacatgggaagcaaagttctagcaaaaataaaatatctctgaaaaataattgaatataatgactagaaataaataaataaaattgtaatacytcagtggttaggttaaatgacagtcactgtgttaagtattttatgtgccattttcttttagctcttacggagtacatactattttactgatttaactaatttttcaaggcccccaaagtattgattctatgctagtgtctttcattgtcctgtgtggcaaaacaagaacytaagactatcctagtcaacaaattcctttaaatggtttcacagagtgtctgccaattcatgaagtcagtaagttcatggaatcccatttgttgaatttactacatgcaacgcactgtgctaggctctgaaattgtaaaaaagaaaacactttttgcytagggataaataaaattttttcataatgttaaaggctaataaagaaggtagaataacatgtgaaagattattttaactctttaaatgtagtcatagaaagaaagtttggagataatacttcaaaatattaactgtgatggtctatatctgggttgtaaattttagaatttttttaaaaaacatgttttccaaattttctacaatgagcacatattgtatttattactagaattttttttttttgagatggagtctcattctatagcccaagctggagtgcagtggtgtgaccttggctgactacgacctctacctcccaggctcaagtgattctcgtgcctcagcctcccaagtagttgggacaacaggtgtgcaccaccatgcccggcttaatttttgtgttttagtaaagacatggtttcaccatgttgcccaaggtggtctcgaactcctgagcctgatccgcccgccttggcctcccagagtgctgggattacaggtgtgagccaccatgcccggttgaagaagtattttttaagcaatgtatatctgtgaaacactctagaactttcactatcatttaaagaataggatttaaaatgtctagataaatatattgtttggaatactttaaaaagtgaatattctcccattccttaaatgtgggtttctcctagtgactcccttaataggactacaatatggaaaggagaataaatagtaactgtggtggaaaggctgacaaacactatctcagctaagtgatcaaggttaacatcaatagtgacaaatggtgttggtagtatatacccttggtatgatgtgatgaaaccgacactttaccactgaggccatcttccccaaatcccataagcctgtttaatcatgagataaatatcagacaaataaatattgggggccgttctacagaacacgtgatgacaactcctctaaactgttcaggttatcaaaaacgaggaaagtctgagaaacccccacagccaagagtgtcctaaggaaacatgacaactaaatgcaatgtggtatcctggatgggctcctgaacagaaaaaaagacattagatcaaaactaagtatgagtaaagtatggacttgagttaataataattaattgtaacaaatgtattatactatacgagatgttgataatggagaaactgagtgtgggctatatggtaactatcttctcaatttttaaataaatctgaaactattccaaaatataaggtttgctttttttattaattattgcactttcatttttttaatttttcacatatatatatttttattatactttaagttctagggtacatgtgcacaacgtgcaggtttgttacatatgtatacatgtgccaaacactgcatgttctcactcataggtgggaattgaacaatgagaacacttggatacaggaaggtttgcttttaaaaaaggtatttaggtttttgacctgtgcatctggaaggttggaattgtcattgactgagatggagaagaccataggagaaggtgaattgaaaaaatttgaaatatactagtctagccccatagggcagggatgtataagatacatgcattgtgaatacatcactgttttaatattctgtatttaatacaataaatattttggcagagaaatagtgagtattctagaaataattcctgwcctctttaagaagtacaagttcttcaaagattccccaggaacagctgtgcaagtcagtgtggctttctaatctctttcatctatacttacacactataacagttttttctattgcaatgcagcccaagttttttgcaaggtaaattatttgtratattcttaggaagaaaaggtagaaagtaaataactttttggtggcttggtatggtgttgtattttgccaataactatttatttccaatagtgtttaatgatatttattggattgaagaaagttagctatctttcaggtatctttcccagagctcacaggacaatatttccagcatgcccccggaatggtagacatgctgaaaatattgtcctgtgagctctgacaatctagtacttgtcacaaataattatttttacaattattattactattattattatattattgctaccattggtatacatacacacaaatatatatatatatatttggtctttttgtgctctttattttgtttcattgatcaacatttttttggtaaatgctatttttatataattgttgcttgtagtattagacctacttctttttgctcatcttttttcagaaatctttaataaattcacctctgtatgaatttcagcatcattttattaagtagatgggaaatcttgggtgtgtcagaaaactatttgcataataatgctgtgtaagaaatcacccaaactcagtggcttaaacaattgtttattcttgctcatgtttttgtggaccagttgccatccaggctgagatcggctgtgcttagttccaaagctgcaagttgggtcctggtctgtttcatgtgtctctcttcaccaatgaccattgagccacctggggcatattcttctcatggtggaaaaagcacaaaagactaagttcaatcttgaaagcacattgcaagcttctggtggcctcacatctgttaacatcccattgatcaaagggaggcccaaaatgaaggggggagtaaagtgcacttcacccaccatgaggtcaagtcaagttacatgggcaagtccaacatcaatggagtgggaagtatactcctcctatgaaggtgagagtrgagagagtgactatttgccaaaaataatttcattcaccattctggtggaatatttatgggaattgcattaaatgttaacttgaaaacagacactattagaacaattgccttttctactaatatcttatctacacaagtaattgttaagtaatttgctaaaaaagactatgaatgtacatttcaagtagacttcctgtggtatctagtaggagcttaaaaaatgtttgctaawctgttattcatggatattttgtatttttcttatcttgagtgccagctcttaaaatgatatgtgtaactattttarcatgcaaaaatactattaattttatatatgttttcctgcatttggttgctatactgaactcttctaattaagttctggaagttttgggtttttttttttttttttgcattgtttaggtatgcaatctcaatgtttttaaataatctttttctcatttcttttcaatattgattgcattgactagagcttatcaaacaatagtaaacaatactgtaagatttttaaagacagtacttctaatgtttactcacttagtgtaaagctgacctgacctagttttctttaccatattaaggaagaattcaaatgtttttaaaattatttttctaaaataatgcctatgtgtgttgagtttttatcagatgacttcctggcatctattgaaatgactggatgatttttctcttggaacttctcaaggttgtattttcttattttgaaccaccactgccaattaatttcttttttttcatagtgtgtatattagtcattgttctctagagaaaaaggaccaacaggatgtgtatgtatatatgcgtgtgtgtgtgtgtgtgtgtgtgtgtgtgtgtgtgtgtgkatgtgtgtatagagagagatattgagaaggagatattttaaagaattgcctcatgagattgtgggagtaagccagtaggctggagactcagaaagatttgcagtttgactccaaaggcgatctgctggcagaattcctctttgctcagggacaccagtctttgttctattaaagctttcaactgattggataaggcctatccagtttatgaaggataatctgatttactcagagtctactgacataaatgttaatctcatctacaaaatatcttcacagagcatcccattttgagaagcagcctcactgtgtcgcccgggcgggagggcagtggtgcaatctcggctcactgcaacctccacctcctgggttgaagcaattctcctgcctcagcttcctaagtagctgggattacaggcacctaccaccatgcctggctaatttttgtatttttagtagaaacagggtttcaccatgttggccaagctggtctcaaactcctgacctcaagtgatctgcactcttcagcctctcaaagtgttgggattacaggcgtgaacccccatgcctggcccagaataatgtttaaccaaatatttgggtactatgatgcagtcaagttgacacataaaataaaccatcacaatgtataattcttttaatgaattgttgaatttgaatatttctcagaaatattctttgggttatacaaaattattatcccatataaaagaagaggcagttgaggctaggataggtaatacaactcacccaaagtcacacatgctcaaattggcaggactgatatttgtccctggctccaaagccccaggttttagtcatataatcaattacacagaaaggacatccaatatgctgatacattattcttcagactggccttacttcctttgctcgggagtcacctgcctataactctcatatgtgatttaatcttgattgtttttgttgaattggggaacttcacgaatgagaagtagaggagttgagatttttactttctggcatgagctaccgttaaactgattatctcgctgcagtccacatctggaccaagtacaaaagtgaagcctgacttcttactctgtggtgctgataggaataacagccacaacaccaccatttttgccatcttgctgatgaattgacctcatatttctctacctacatttttcaaaatagtgctcttttatgagttactcaagccccattttaaaagcagtgtggttgataagtatgtttcatacctgcttgtactgagcttttttaaccttgtgctcttgaaataatatgagcttttggacactatgtattcagtacagactttcagagtgaaaatgttgattttcccaaattaaagaactaggggatatggtaatatatgctctcaattttgaattaggtggaaattgacatcgtttgtcagaaatatactgaggataaaaatgaggtaaagttttaggtgctgagctgtgtgccaaatagcccttgtgtttctttcttgaacatctacttcaaagaagcagatttgcctttgatatccctgggagccacatgaatatgaactgactccaattgccctcatcatctccagaatttattttttatttttttagggcatgagtctgtggtcaatttgcttatttgcttctccaaaccagcatgatcattataattctccttttcatgaaataacccactctcagcctgttgttaatcctacctagaggttgggagtggagtcacctaacatgagggcattcatctcttcagtaagtggtgtgcttgtgtcagaaatttttatgcagacaaaaacacaggaatcatcatggcaacagaataatattcaccacctgagccaccttgacatttctcagctagtaggaagctttcttttttcttttgtgcttttaacatagaagaatgcctcctaagttttgcaggctacatagtcatgcccatgagcctcctcttttcaatgcatcctgcccccataaccatttttctctgtaagtgatgttaactatgcagaaagccaattaggagattctacttagaattccttctcttaactgtttctcaaagcttatgtggtataactgctagaaaaagatgtttgaaaaataataatatattctatattggccattcaatgtctcaccttcatgccttagctcaaactggcaagcttctttatgccatctctacatgtagaaaaagtctaccgattccttaaaatcccatccaaaggccatttcctctgtggtggtttgcctgtctcacctccttagcagtcacggctctctctcatgagtccttttaacactttaataataactaataattataaacacatggatcattctttaggttttacaaagtttgttgacacatcatttcatgtaacaaataatcttgtggctttgattatattctccatttttattctctttctctctctttatttatttatttatttatttwttttttgagatggagtcttgctctgtcacccaggctggagtacagtggtgcaatctctgctcactgcaacctccatctcccaggttcaggtgattctcctgcctcagcctcccaagtagctgggattacaggcatgcaccaccatgcccagctaatttttgtattttcattagagacgtgatttcaccatgttggtcaggctggtctcaaactcctgacctcagttgattcacctgcctcccaaagtgttgggattacaagcgtaagccaccatgcccagcctatattccccaacaatggagaatattaaacaaataaacacaggagggttaagtaattttttttttcttgagacagagcctcactctgtcgcccaggctggagtgcagtggcgtgatctcagctcactgcaacctctgcctcctaggttcaagtgattctcctgcctcagcctcctgagtagctaggattacaggtgcacaccatcatgcccggctaatttttgtatttttaatagagatggggtttcaccatgttggtgaggctggtgtcaaatcaaactcctcacctcatgatccgcctacctcagcctcccaaagtgctgggattacaggcgtgagcccgtgccaggccaagtaatttgttaagtgacacacagctgtcctctgtcttctgacatcaaatgtcttcctgtgctagctatatactgttggtctcaaattatcattatcttagccaaccgttctggaggacatctgtgtgctaggcattcttctaagtggtttatatgcagcagcagtaatagccaacatcttcttgccagatatccacttagtcttcaaagcaaccctatgtaatagatactattattattccaccatttagaaatgaataatctaagggacagggaagtcaagtaacttattcaaggtcagataactacaggaggctgctgcaagtgtcggtctttccatatccaaaatctggtgtcttagtcagtgaaaatgctgcaaaacctcaaaattgacagaggccaccctttagacataattgctacaggaatattgatcccatctcctcttgtatttcaaatcttcagagtgcattccacagccttttgcctgtggtatccaagaccatagaggcaagaatgtctgggaaatgtaggtgttagattgccagcctctgctgggtaagatggcagaagagcatagaggaaggtaaaaatgaatactgggtaccagtagacaatatctagcatactcgtgataatgatgtaagactactgccatttctttagaatgcgatcctggtgagatggccaatgaatgtttagtcactcagatatgcagtggtgtccccctaccactagggggagatgaacaaccggcatagtttgatgtcttaagaaagattatttgttcatgagtaatggaaaaaaatactgagaaagaagtggttgctttctatggcttatgaggagaagcttatgctgtctttaatgaaaaattaatcagataaacaaatgtccagaggaatatatccagatgtattcctatttacagtcacttagtggatgtgccagcatccaaatgcttccttaatctttcaactatctaagtaatgattgaatagaacctttgctccacctttcctgcttaaatgctactttattagcattacttcttgtccataaccatcattgcctaagtgctctgcaacttacctatttaaatactggatagattgtcatcagttcctcatctgaccaatcatttgtttcaccaattacttgcagattctcattctcgtaatggtcctaccatggaactgttgcatctccctgttttcctcaccacctccagctaatcagggtagagtttgctctaatgagcttatgtctcaggagggcaggtctttctgtgaaaaactgtcaaaactcttctaatgggaaacaaatattaatgtaaatgtaggcatttatttgccaaaagagtagtagctcaagaattgctagcaataattaccctacttgccagtgtattgtgtcttttttgattattcctctctttctatgtagagacctgcctaaaatatctcatgaatttttctccctcaagtgtgcatttgtgaagtttctcgaaagattgattggaacacaaggatttcagtttgtggcgtcctgttaatcaggtcagatttgttaaagtcattagtgttaaaaatttctttgtactcacaattctccttacccagagttagttctgtggcagtgtattagtgtgggcagggtatcttccatcaacttagtgtttttaatggagcttaccagagttaatgacagtggcagtccccccagggaaaacaagacagttggctcagatgtcttgtgggagctgaacctgctagaatgttcttctgggggtttcatcactaatctgccaacaactggagtctgtatcctattagtttctattcactgaagttgtgagatgccatgtactttctttttccagtcatctcatttttctcatcttctaattcgtgaaagggacacagaaatatttagaaaaattgggattctgcaaattgtgagattgattttcctatgttcatctcatagtgttcagattgagataaggtactaacttcactaagctcttaagttgtccactataagacaaagtcaatactacttccttggaaagaaataaggccatgatgagttaggttttcaccatgtgtaggttattctaagggtttcaggtctaatggcatcccctgaggtagtaggtagataagctggtcatcaggttagagcctgtattttgaatcaattcatgtgtagtccttmcgaccattcattctacagattctggtatctgcccacctctcaggcccctctctcattgcgccctgtacccacagtactcatgctttgcccattctgaatcattttgaatcctaaattatacagtatactttatatttaatacatttctgaattttcaagtgccagctcctcccctcatttacctggtaaactccttaccttctaggtcttttctgattgtcttcttcttgttggtgtgctcaggttcctagtgtagcttatacctgattcaaccagaacacctatagcaatttattgccatcacttttgtgcagagctcctcttatataaccataggcccctgaaaggctggaccctctttgcatctcaagtcttcttcttccattccctgcctgccattagtggtgtctccatgcaggaagaagcatatccaaaaatattttaaattatgtaaatttcaataaagtatttatttcaaccctcagagaaaatgagatcagatttgtacagagatgtggttctcctcaattgtggtaagtttaatgggtgagaatgctgagcaagatttgcattgcatacaaatcacaggaattaggaccagtgattggaaagttcaaaggaagatttaagctcagtataagtaataactttctgggcattaagactgttcaaaaatggaatgtgctatcttttcaactagtgaggtctcaatgactggaagtatttgtaccaagactcataaggatgctatcatatatgttctcatattggtttggaagagatgcttggcagtatcttttctaatcttaagattctatttttatttctgtaaatcagttcaaatgttaacttcttataattgccaattatggcttttatattcatcattattcatttgatattcatcatcagttaaaatttttctattaatcagtcaatgaaaaaattatcttttgcctcactcttcagtgaatctggctgtccttggttgtccatatttcctttcacttctttctatatacactataaaattaatgagacttttaaaaatctttcaattttagtcaataaatatttgaatgttgggccagatgcagtgggaggtacaaagaagatataacattgattacagtagctagtgtttatcaagtgattactggcattttacatatatggactcatttgtttctcacaataatgctatatggtaggtactattttcccattttatagatgagaatcctgaggcacagaaagattaattaattttccaagatcatattgctcttagatggaagaacacaagcaatctaacctaaaatctgaaggtgtaaccattaagcattactgcctcttgatgaataaatttaataagataccatctcttgccttcaaagatgattccacctggtagaattacatgtatttattattcactggataaggctgttcttaattttacttgttgtaaaaatttattctttcaaacttgtctgcattgttatcacttgatagtgttctggcactggccaaacaaaaatccatgtttatctaatttacaccacttatgatattctaaacttgctgtgtaactatatatgtctagtttgaactcaaggtgatatgattgtatctccatgattatgttaattatccttccctgagacttctccatttaccttttgcttttgtggaaatcacaacagcatacaataatccaatgacaaatagaccttttgatttggatatagccatcgttcccacgtattaaatgcatactacatgcagaatgtctaggaggaagtagaagatacatacacccaacaaaagataccatgttagaagtacaaataaagcgatgttggacaaatgaagtgaaattagtagtcacagaaatgagattcaccaatatgcctttctgagcatcttcgttggtatttgttttggagtggtcattatgttggtaatctcacagtaggcaggtaataagttacagtgattcttcccaatcttgcctgaacagactcctcctgtaaacacagctgaaaccctagaaagtataatttagaaaagcaatttttaaattttaatatgcatcagattaaactgaaagatgaggtaaaacaccaattgatgggccccagccccagggtttccgattcagtagatgtgaggtcagtttcaagagtttgcatttgcactttgaaagagctggaataatactaagaatatgcataactcctgggtgtgcattagaatcacctgtgattctggtcacaaaaacaatcaccaaacttctaaataaagacccaaagctcttctaatattaaaccctgagataaatatgagctgtatatatactttaaaaagatgaataaaataagtaaaggaatcatttacccaatttttgatgaatacgtgagtggcagcagttgcggtggtaagttaaatcaggaataaatgtttgcaaagtgaaaattgtaagaagcatctcctcttaccatgcagtttataaacaatcacaaatagggcaggcttgctgagctccttcatacctggcgggttattgtcatgaatttgtatgattattgtgtactttacaaatttttgttttacaataatttgtatttattcattcattcattttccaacccatttattccagctcagccgtgaggatggctggagcctatcccagmtgcttagggtccaaggtagtaaccagcctgggacaggatgtgatctcatcacagggaacacacacacacacacacacacacacamtcacactcagtcagattgggaccatttagacacaccagtgaacctcacgtgcacagctttgagaggggggaagaaactggagttccagagaaaacccacacagacatggggagaacatgcaaactccacacagacgttggccctggcaggaaattgattttttttcttcatgaacataatgaaatgctgttaaataaaatgatgtcgttcaaggacttgctgtaattaattgaggcttttagtatctccttttccaattatgttttccaattaccaaacattgctcatcacataatagatgctcaagtaatgtttgttaaacaaatgaatatctcttacgataaaaaatattgcaccaggtgggttgactgaccagatatttctaaccatgctggaatgacttatttctgacaaaaattattaattttattgatccaaaaggagccatgtaaaattgttttcctcttcttgcttgctattttcaatttttccaatttgggctcagctagcagtgccacagctgaaaaaagtgcatggattttaataaggactcctattgctgagaaggataataagtgagtctggagggcagggtcatactctcaaagcctttctgatgggagccaagattaaaatgsacagcaggctgagagggctgggaagaagctatgatttctcactgtggatttcctcagagtgccattagtgtaccaaggagaacacaggggagattgcatttacatgaggaaagcaagttagagttcagtgatcttgaattttttggcattatttcaattatttgttggaataatttaactttggcccaaaacatgtgtcttagtattgtatagatttgcagggcacagaatatttctggttttcccctaatgattgtcatggaatgcccttaaatttaatgaataagtgaatcccaagacaatggtatagaggtctctaattccaaacagtaatgtatttttgtgaaataaacaaggctcagtatttccattcgattcggtggcattgatggaatctgagcacattgggcacttcacaacacagtcatattcttattcaatcttcattagaaattcatgagataatcattgtgctattaacctcattatataggtgaggaaactaagtcactaaaagtttaaatgactggtccacatgaaaacagctgatgagtgatgagggctgtcaagacatctcaggttttttcttccctggctcaatgctgctctacccagcacctctgtggacaggaactccttttatcccccactcatttgatgagaagtatatgaggccagggaaaggcaagtgacatggccaagggcaaagggcaaggcattgtgagagtctgttcgggaatcacatctgaatctaaggagaaatccacatcgcctgccatcctaaagagatttcttagttgctccccctcctcattgggtctgtggtgtatttgtgaacaacagctgcatttgcaagtagccaggayttcctccagatgacatattgcgctgccagagtggagacaagcggggctgacttcacaggccaaagagggcatctgcatttgccactcagccccaattattcgaatctgctcatggcaggaggaatggtgggtcccttaggcacagaggccagcctctgatctccagactctctcatttctcctagatccgccccctcatgttgcttaagcaaaagcagggctaacccccgccccttggacaaggggcacatcattcctgcattccccaagcactctctggctgctgtatcagcaattggatgcttgcccaggctctgcaggactctagagtctagagcctgctggcccagaggcaagaggggtgccagatgtgcgagctagcaaaccgcggaagctactgtragattagagtggcacagaaatagtcggraaattaccctttccaytgggcttggaatccagggtaactgaggcagcaaacaaacttctgtgtgtgtgaggtgtcccagtgtaccagtgtcctccattcgggggtgtcttcttcttggaaggaggactttttcttttaacccctaaagtgtcagggatctaaaagctggttggcaatacttgatgcctaaattgtggcctgggggtcacgatctcctgggtgctagttagaaatggggaatcccctggcccagtccagacctatggaatcaagatctgcattttaacaagatcccaaggtttatttgcatatttgagaaggcctgccctaaacaacactcatgagcctggggagaatcttaaaggcttgtgagacaacttgagggttgtgacacttcctaggtacttttgtagcctacactggtcctgtgtgattgggatctacrtctagcactgggtctgtggcgatactaacttccctgtctttcctggcccagactgacatttccaaagggctgcgtgaggtggtacatactcaggcaaggcattaacagtcacacaggcgctccagggctttctcctggcagtgcttgagccacgtggccctccatggagcacctatctctatcttggaccttttagttagaaagccaacagctgccctgcgtgggggaactgcacagtatgctaatgaaggagcagcatactgaaaatgatgttgtggctattaacatttttatgggtggactgctttgcaaagcatagggaaagtattactcttctaggattaatatatttaacaaaaagtctgccaggagaggaggtttttgctgataaatataattctgctgttgatttatttagtaatggagacttgaaattacaggaatcaatgtgtatatggaagccattgtcatttggttaattatgttttgccagcaggatggggaagcactttatgctcgatgcagccaaatgtatttcagccagaatcctgtgttataaatgacgaacacataaatgtagataaagagaaagacccctataattctagattcctggacacttgatcctccagaagcttgacatccctggccccctgcactggggctgtagcatgtagcataagtaggtctgcttcctctatagcaatactccttaacggggcttattttgcacccatgggatatttatagatgtctggagacattttgtttatcatagctgggcagggaagatgggcaacaagagagtagaggccaaggatgatgctgatgctaagtagacctacaaagcaaaagatggcccccacccccacccctaatgaagaattatttggctcaaagtatccatagttctaaggttgagaagccctattctagggcattcctatttgagattctgactcaaagaaatggggtgaagtccatattctctttgttgacaaataaagaaaataaggtgtgggcatcacatctggttatgtagtattatcttccaagatatccacccaggatggagtcaagatgagtgtatagtaggagagtctggaatagctctccaaccactgtcacttatctgaagaggtctaacactgtcaattggtcgccatcctattgtgaagatcatccccaaccttcctttccctacattctgatgaaccagctgtggtttggaaggcataaactttgctacagtcacagctgtgctatttactgagtgatcctgagagtggtaggcagtgtaatggccctcaaagttgctcacatcctaattcctggaagctgtgacctttcatggcgaaggggacttgcagatgtgatttagtcaaggatcttgaaaagggaagattcccctgaattttctgagggggtccttgtaagtagaagatgaagacaggggagtcagattcagagatttaaagatgcactgctgctgatcttgaagatggagtgaagctgaaggaaggagccatgagccaggcatgtgggaagttcctaggaaaaagaaaagacaaataatcagattcttccctagagcattcagatggaacacactcctgctgataccttgattttaacccccaaagactcattttatacttgtgatctccataactgtaagataaaagatgttagtggtaatttattacagcagcaatgggaaaccaatgcattaaggaaggcatttttccttttgaatgtcccactataaaatagggctttatccactataaaataggtgttgctcatttatttgttcctttattcattcaacaatcatttattgagtgcctactatgtgtccaccattctaggcacttgggagagagcagtggaccacagagaccaagcaactcctctaatctagtgacaggagactgataataaacttccaaaaaaatacagaaatctacagtgataaatgttatgaattcaagtgaagcagggtaaggcaaccggagtccacatctatttcttacaaatcattcagagcaggttctgtgataaggtgacatttagcaaaaacctcaaggaagtgggagagaaagtcatacagatattcaaaggaagaatatttttaatagrggaaatggcaagaatacattccctgagctaggagcttgattctgagattcaaagagcaagggaaccagtgttgataatgataataattacctcacaaggctggtatgagaattttgggcaacatacatgaaaccccctggtgaatttcaaaacactatgcaagtatttagtcatcattgcatggtccctcggagtgcattttgggggctgccaagggatgtgtagggtgacctttattttgtgtctatataaaagcgaaagggaaatagctattggcctcaggccatggaaattatgcacagaggcctagaaataggagtattttcccaacatggagctgatgattgatgatgattctatgtgtgtccttcacagtggcaaaccttcaaggggcagggacatcattgctgctgtagtccttaaaccctgtggtccagaagggtgctcccaaggtgccaaagggggcccagagcagtcggcttttctgtcatgggggcatacaaagagagaaatcatcaagaaattcaaagacctcaactcctgcctggccagggcccagagagaagcagttaggatagcctctgatacccagccttgccagcaactaatstgccagatgatgaaattgaaatatttgaaatataatccatacattctttttccaagacaggtggtgaaatggtctagtttttacaaaaggctgagaaaattaaaatactaaaatgttgcacatctttgtgtttgggagtaggacttcccctggaagctggggtggggattagagaaggcttcccctggaagctggggtggggattagagaagacacctctcagaatctagagctggcccattaacaccttaggtttaaggagctttctcagcccattttgtatttctaatcttaaaatgaccaaggcaaggtcacagataatatgtgtatttcatccttctttatgctgaagaatccgcttgtaactgaaaggtattttgtatattaattggattatcaggttagattctttttcctaaatgagtttctttaggccgtttctgcttgcttttaaaaaactttagttttaattttagatttaaatggtacaggtagaggtttattatatggatacattgcgcgatacggagatttgggcttctgatgatcctgttgcccaagtagtgaatacagaaccctgtaggtagtttttcaagccttggcccccttcctccctcctccgttttggttgacagagtctgcagtgtctaatgtccccatctttgtgtgtgtgtggacccaatgttcagctcctgcttgtaagtgagaatatgcagtatttagttttccatttctgtagtaattcacttaggataatggcctctagcttcatccgtattgttgcaaagaaccttatttcattgtttaaaatggctgcatggtattccatggtgtgtatgtgacacattttctttgtytaatccactgttgatgggcacctgggtggattccatgtctttgtgagtaatgctgtgatgaacatactagtgcaggtgtctcttggtatatactcagtaataggattgccagctgaatggtatttcacttttagttctttcagaaatctccaaactgcttttctttctttctttctttctttctttctttctttctttctttctttctttctttctttctttctttctttctttctttcttctttctttctttctttctttccttctttctttcttttaattatactttaagttctgggatacttgtacagaatgtgcaggtttgttacataggtatacatgggccatgatggtttgctgcacccatcaacctgtcacctacattaggtgtttctcctaatagtatccctcccctatccccctgcttcctaacaggccctagtgtgtgatgttcccctccctgtgtccatgtgttctcattgttcaactcccatttatgagtgagaacatgtggtgtttggttttccgttcctgtgttagtttgctgagaatgatggtttccagctttatccatgtccctgcagaggacatgaactcatcctttttaatggctgcatagtattccatggagtatatgtgccacattttctttatccagtctatcattgatgagcgtttgggttggttccaggtctttgctattgtgaatagtgctgcaataaacatacgtgtgtatgtgtctttatagtagaataatgtataatcctttggtaatataaccagtaatgggattgctgggtaaaatggtatttctggttctagattcttgaggaatcaccaaactgtcttccacaatggttgaactaatttacactcccaccaacagtgtaaaagcattcgtatttctccacatcctctccagcatctgttgtttcctgactttttaatgatcgccattctaacggcatgagatggtatctcattgtggttttgatttgcatttctcttaatgaccagtgatcatgagcttttttttcatatgtttgttggctgcataaatgtcttcttttgagaagtgtctgttcatatcctttgcccactttttgatgttttttttttcttgtaaatttgtttaagtttcttgtagattctggatattagccctttgtcagatggatagattgcagaaattttctcccattctgtaggttgcctgttcacagtgactgaactgatttgcattcccaccaacagtgtataagctttcccttttctctgcaacctcactaatatctgttttttttaattttttatagtagccattctgattggtatgagatggtgtctcattgtagttttgatttgcatctctgatgattagcaatgttgagcttttttcatatatttgttggccacttgtatgtcttgttttgagaagtgtctgttcagtttctttgcccactttttaatggggttatttgtggtttttttcttgttgacttaagttaatcttatagattctggatattagccctttgtcagatgcatagatgtaaatattttctctcattttgtaggtcgtctgtttactctgttgatcttttcttttgctgtgcagaagcccgtccgtttaattcagtcccgtttgtctatttttaattttgttgcatttgctttggggatcttcatcataacttatttgcctagtccaatgtctagcagagtatttattaggttttcttctagttgttctctatttttttgataaaataaatgcctacattttgcagaactgaaatattaatgtgtacatgttattgtctgagtaaactttgtttttttagactcatagtaacaaaaggaaaatagacatctttagcaactctttcagtaacagaacatcttttgtataacctgaacttttatgtcagttcaggaatataagaggaaaagaaaggaaggcttggcaagataggtagctccctatcaggagaaacgaaaatgaaaagaccgtcggatcagtgtatactctgagttctgtgggagctgagtctgtatcctagaaagcatggaaaagtagtctagggcagaaataaaccaggcatgctgccaggatgaacaactagaaaaaccctttggaaccatggtctgtcaaatgctgatgtgcaggcagcttcctctgtccccaaggtcagaagaaattcctatatcgctacttctttcttctcctcaacatctgaagcaaaaccctacagagtacaaaggtaaagtgaagacaaaacaagtccttctagcttcaaaatgctttgatattctttgtcttttattttcataagacttgatagcatgttaatgccacagaatagcaggattcccttccattatatgataaacatgctagtgaaaaagaattataaaaaaaagttttaacagaggaattatggcaacctatgagaattgcttcaagtggaatatatattcatgtattcatcaaagagttgtggtatccactagatgtcaggcattgagcaaaggattggacaaggggcaagtagggcaaggccctattctgggctcctggaattcataatataaatggcagcatagacaaatatgcaaatgaacaaatatgcagttgagttacaaattgtcaaaggtgttatgaaagaaacaaacatgatattctgctagagttatgactgacaggtaaagggtgagtacccaggaatggccttgctgagatttaatctgagagctgaatgatgagagggagccaagtatattgttataggtcagaaacagaaacaatttttactctggctcttctgggaagacatgaaagcctgtgtttacaaaaggagattttgacttacctagtcacatgatctaaagaaacgcttttactcttattcttctaaagcgacatttcctggtcccccaccctcctgaccacatttcatattctttttccctgcattatttttttctccccaggtattataaatatatgacatactttttcatttactaatttgcctggtttaatgtctgtctccaccactagaatgtaaactctataaggaacttgtttcatccattttgttcatgatggctgtctctactgcttagaagagtaaccggcacatagtagatactcaatgaatatgattcctgctatactaagctatttctttttgcccctggagagggagatatggaattttgaaaactgccaggtctggaagaatatgctatactttccaaggttgttagatttgaatgagaaaaatatacactaaagtgagttccatgctggtgtatagtaaaggctgagtaaatatcattcttgggtacttccctgtctcttttttcctaagcacactcagtgaggtgggagctgtgaaacgttatgaggtaggagaaggtgatgtctaatgtttctctactgccctgttggcgccccccaaccaagtmtctctcagtgcctttgcccagccttcctctgcacacactacagctagctctatcatttcctcatgccccatcaagtcctacctgtcttcgcagaccctcaggttccttggctgtggcttacaagggacatctgattaatctgtaaccaattcatgttgatcccctagctgattgcctctttgtcaccatgaggccagctccttaccatgtgtgggtgcagcaagcaggtacaccatcaccctgcttgtgggatcaggctccttctcccccggacagtgatgaggagacactgtcttcatttgcctctttacctttcccattttaaagctgttgactaacttcaaaaagaatctttttgaattccttttactcatagaaagmagaacaatggaatagtaaggaagaaaagagaaatcaaggctgcagaagagaagacagaggcacagggagagcacagagtagagagtaaggggtaagagaagagaagacaggagaaaagagaatgaataaaagaacaagagagaagagaagcagtgggtaaacagcctgttagatggtggcatagcttttacccactgaaaagatgttcacagcaaggtctatcaaaaccctaccacagtatagcagctctaccttgaaatagtatttctaatgataaaaataataacacaataaagtttagtaaacagtatgctaagagctttgcatatgttttctcctccatgatccttttgattgaaggcaaattttgtcatcctatgctcaaaattcttcagtcacctctcatcttactctgagtaaaaggatggggatctgctccccaccctttcttccaagtaggacccattcctcagccccagctcagacagtatgcccctcccactctctctcttgctccctccattccacacacactggtctccttgctatttttgatcaaaccaattgtccttcctcagggcctttgcactggctattgttttgcctggaagagtcttctcttagatgtcctcctgactctctcccttacatcctgtgggggacttcttcctttgcttcttaagcaaaagtctcccatggccaccccctataaaatgtcagcccccactaccatctcttcctcctgctagctactcccccactttgctttaattttctccatactacttatcaccaccaggggtataatgttattttatgtcaattgtttgtcttttgcctccagattatgagtacagggattatgtcagctttcttcttgattcatacatcgtcggcacttacccctcgaaggtggatactgtttttccttccgtagtagaggggaaaaagtaagctcacaccaggtaagtaaattttccaaggtcacagacaggaggtggtgaagccaggtttccaacagagctgtgtccatgtccaaggcccatgctttcaaccactgtgctagaggattccccaacggctttccacactgttaggacacctgtccgaaagggtaggttggcatttcaggagatgcctttctgtgctcagtcaagatcaatgcagatgtaattgtgtaaagcaagacaggactataaggcagatataactgcgtaaagcaaaacatagacttataaggcaaggttggtacaaatgcacatggctaaagcttgacctgtacgatttactttggctgcaatgcacagctacagaggcagtggggtatggtgtgtggtggttaaggacatacgttttgtgagatagatgtggcttccaattcctacggtgccactacttagttttgagaccttggccaagttacataatgctcctgagcacccagttccttctacatgaaatggggctggataaatggaaataatgcctacccttagagttgacttaaaaattaaataagggaatgtatacactgttcttagcatagtccctggctcatgtaaatattcaataaacactaaataaattactattattataattattatgacgtttacttagtatatagacgtagagaaagttttagttgaaattgtatctgttaatacattattattttctgttaagaatgaayatctacatttggaaatagaacaaaaaaagagcttactgcatatcctttcactgtcatgccacagcattgtctaatgagccgtccgtcctaagggtcatctcactctgtcagacaatgtaattttgtttggcttaaaattaccactgattacagtctagcctctgcaaagttgatgttagcatgtagaaaattaataagatgcaaatcactgctgtccaatagagaggcaaatgatttctaacaatagagaataaaacagtagagaataaaatgttaggattttattgccctttagactattaagcagttttggatatatgacttaaaaacgttattccagcagtcttttccccatccatccattcatccacccacccacttacttacctacttacctatctcagtttcttgcattctccttgaatccactttattattttgttggttcctttattaatgattttaatatatctttgatacatccccctatgtatttgtatgagaataagtttatatatatatataccaaaatacaatacaatacttacataatatagatgtactcctagaaagcaattgatggtatctaagctatttaatcttggcaaaccctatcagatacctagtttctgtgctgctactcctgatgatattgactccttataagttttactgtacttttgcttactaaatatcagaaaggtataacatagtgtttaagatcagtggctctggagtcaaacttcctgggttcaagctcttgctctatctatcactaattagctctatgatcttggaaagttgcttaacctaccaacaaaatgaggccatatgaatacctcttatctcagagaatattttgaggagtaaatgcaataatgtatataaaagtgcttagcatggtgcctggtccatggtgtttaataagtattggttattatgatttatgattgatcttcattttggaacttaataaagaaaatgaaactttgcaattctattgtgaatgtttgattttaatacttcctcagcaaactctggtagtaattgcataatacgacaactgtttttcgtagaagcctaccaactagaagttctgaaagcaagtgtttaccatgaaaggtgtttaactcttagagagccctacaaattaaaatagcctacacagaatacaactgaaaaatggcctctactgtttattttctaactttctacactatggtacagagataacttattgtttagtagtgactggtctagtctgttttattgacttgtgcactttctgaccctgtctaatttagtgtcagagatcacctgtgatttttgtatatttccgaatgtgtaagtatctttcccagtaacttgtacattctgatttcctttgcacatgagaattgatgtggaaaaggcagctgagcagaggttggcaacctttctgaagtgctatgccaacttcccatttattcactctaatttaaggttttccatgccaggatgaacctcctatcatccaaaccactggagactgagaacttccaagacagagcaaggctacagaaattgaaattttcattgtatgatagattttccaactttttttctttcctgaaaaccaagaactttgaaaatgctgatgccaattttatgcaacccagacagaacgatcatatatgtagggaaggggttggtgaagattgcagttccaaaacctcctgaagcttttcatacaacatttattcattcatgcatgcatgcctatatatatatatatgcattgtgcattcatttagtaattcattcattaaatcaatgttgagcgtctaacaatgtgccagccactctggttatgtatttacatatacaatacttaacttttttgactaagtgagagaacatacttcatgcacgtagcagagtgcctggctcatagtacatactcagtaatgaaaaccattagttttaatcttctgtttaaaattttacaaaagtaataaatgtacatagtaaagaatctaatagtgcagaagagttgaaataaaaagcagcaattccccatgctgcttctgttttctcccaatcatattctccagagccttaattttaaaaaaatcagttcttctgatatttacatatgtaacattaaataatgcaagtaccagtggtgtgtatcctcccctagactctcatagggaaattctctgcttgttcagcctaggttcaccttggccaggggtagagttccctcttatcacttttctaatgagattcttaaaagtgtccatgactgttgaacaccagacttgttgtctaggggaataaattggcgtggaggagaccactctggaggacagctcatcttctaagtcctttttgcatgcactgctttccagacctgtgtggaaggcaatatccttttcatcccttcagaatttcttctctcttcttgttgcctcttgcttttcttacatgtttctctgtgttctgggctttccaagaaaaaacaccctgaaagcctcttagtctggctttttgaatttttgttttcccccttggtaaggactgggggtggtatggcaagaggaaaatgacccaaaagatttggagggaaatgcgcagaaaacagctagattaatatttcaagatagaaccatcctgatatattttcttattttactattctttgatttatcaacttcagacattatttattgactcctctctataaaaaaggaggatttatctcatgcttctttctatctgctcctctccttcccaaagttggatcattatgttagcattttggttcttctgttgtttctctttctaggtttaaataacaaacttagatctctttgcatcaccttgaggcagtgtctcttgtctgtccagcaagatgagggtatttgctcccctatgcttttctcccctttttcattgtcaaggttgctagtgttctattctatagatgtatttaaagtttctaagttttatatatagatagcttgactataaaagttgaaaaatggtatacaagatttattttataatgtcgcttagaaaaatttgaaaattgactgtgtattagaaattattcactcaaatgcattattcatrtaacatttctgttggttttttttcaacataaaaatttcaagagaaaacctagctcatttcaaaatccagattttaaaaagrttatttttgatttttattttttaaagcaacggggtctccctatgttgcccaggctggtcttgaactcctgggcttgagtgatctttccttctgagcctcctgagtagctaagatgacaggcgcacatcactgtccctagcacaaaatccaaattttcaaacaagttttaaataggtaaactttatcatgcttttatctccctcacaagatttactaagcattgggttcaaaaagaaatatttaarctttaatttttaaaggaataactactgacagttaataatattaagaaaaagaacatgaaaatgtcttttgaatgacacattttaaaaacattagtttgaatccgatttcttcagttcaagtgcaattaatagtctaataaaagaatcatcaataagatgggtaaatgtgtgaatcatgtcttagatttttaaactaagacaagttgaaaataaacacattttctggcttcatagataagccttgtgttatatcaactctgtgacatagattaaaattacaataatggattaaaagtattattttatctcatctaaracatgtaatattagtactgtaatgtcttttagtacttacactaatatatgggctgacagtggtgaaacaaatactaggttcctgaagctttcctaagcattataattctgatatatgatcatattattttcaacaccacatctcaattttctgacacattttttacttttataattctaggatttgcagcatcacattcttctctaactccttgcttatgtgactaagaaaagtgtttaactaagtacaaaagttcagagtgtaacttagtgttaagaagtaagccagattttgtcccagatcttacatactaatcagctttcactgagagattaatttactagaatttcttttgagtgtgcgtgtctccattcatacaaagattcggctacatttttcttttttgtgtattagctttgtcaagtttggcattaggcttatgctggttttataaaatgaataactttctatctttttgttcagcctgggaacaaattatgtagcatagtcattttttgaagatttcaaagaacgtttttcaaagaaatgtgtgggcctaaatatccttttggaaatatttcatttataacattttcaaacattttcataattatctatattgttttaaactccttcctgagtcagttttaaacacttgcacattcccagaaaattctctttttatctaaattttcaatttttttagtataaagactatatggagatctgtgatatactttaaaactactataacttttttttataacttctaacttgttttgtgctttctttttttgtctttgttagagtctccatgtttgcccattttgttcgtttttctgacagcctagctgttgaatttatttgtccactttagaattaaaatattgccaaatttattcttataattaaaattttttcagagtttatgagaagtaggataatcatatatcccagttgcctggcatattctggtatatgccttctatcccaacgtaattattagtagtactctctttcctccccaaaatacatcagttgggtaataaattatgtggccactctaatgataagtgaaacatacattttcctctcaatacaatagcaggctataattacaatgcataattataattacagatattgtctcatcccctgggatgtgaaaattcatgttgaggaggttggggtgggggaaggtcaaaaggcttttgatattataaatgtttgtggccatccgaagggccatagtacctaagtagataacgagtttaactgcagtatcaaatttcatgtgggagggggtataagtaggataaaattgtcttaaccaggctccttagagggacaataawraaaaaagaaaaggttgagaaaaatgttataatgctgtttgaataccaccattgattagttcattttatttttctccttaatagtcatttggtgttttctaatttgtaagtaaatatagtttctgtttaaacaataagttattgtttcaacactgaaatacccttgttgacatcatcagtggtcaacattgtcaacacattgttctgtgtttttggctgactctgcttttcaataccgtctgtccaacttgactatttcctccttttttttttttattgagaatattattgggctcataggattaaatgaaataagatagtaaggcattcagaactgtgcctgtccctcctgctttccctctgtctcactggttattttcaaactttttggtttccttttttttttttttttttttttacctccggccaatctctaattgctggagtgctaaaragcttgagctctttttcttctctatctgcattttattcctgaatgacctaatctaattacattgctttaactccttctgtataactttatacctccagccctgactcgtaccatgagcctctgacttgtatattccattacctgcttgatatttccatgtggatgtataataattatcagaattaggtacaggctcaaaactgaatttttttcttcacatctgttctacattcctcctcgttcctataaatggtattgccattcactcagtttcttaagtcaaaaacctaagatgcattctagacatttctctgtctgccttcctccacattccatctgccatcatgccagctggttatatcaccaaacctgtccacttctcttgattttccttgttactctaatccaagacaccatctgctgtcacctacattctccactggtctcctgcttccactctcatcttccagccctcaccctcatcatccattctccaaagagatctcttaaatatacaactagaattactccactccccttcttaaattctttattgggctttcactgcagtcagaataaacactgaactctgtatcatggccaataaagaaccatgctcccatctcctctccagccaccctggccttctattcycttaacatgcctaaccagtttctgtcatgggcttgcttgctgtttcctctccctgtacgttcttcgggcccacgcgtttctgtggctggccattcttgtctgagcagtctcagctcagttgccaccccttcagagaggcttccaacctggcaccataactaatgtcagctcctttctaccaatgattattgagttgccctgcccaacttttttttttgtcaaatcattgttcgtttgttttgaactggagtgtttattgcagaaatttggccaaggttccaattgagtgactccagctgaggttagactggggccccttgcccagggctgggcacctgagacaggaaacagtgaagggatctgggcctcagagctgtgagatagaactggggaccaggctgcaggtgaggcctgtrtggtcaggttcatgcaaggccttcaccacaccatcctctatcaccaggaagaacctctcaagctctcatcctcaaagagtggcaacagcaaatcatctagtaacaaatcagtctccttcccagaggccccagggctgccacccatgagctggccttggccttctgcactgtggcctgtccccactcaccagtcacaaagacacaaagacagtggcacttaaacatggatctggcccccctttaccttcagaaccccagcctactccccaaacccaagcaggtgggtctttgacagttggggtgaaagccccagggattctaaacagcacacccttctttccctggcatagttctgtcaggtccaccttgttcccaggctccctttcaaacaccactaatgccaggatagcatctcccaccatgacaggtgccatggctgcaaagttactgctgaaatcgtgggtccccaagcatccactctccttctctttctagtagtcacgctgctcctgctgctgctgttgctaccactgctcctgctgctatgattctatcatagcagccccagtgaggaccaacccagttcaatgtttcagggcgcacagttgtgccagctccaggctgggccctgtggctgcgacagtcctgtctctgtggttaggcaccacctatcctattcagccttcttagggttatcttagtatttggtatagctccttcttttctgttgtcctcccagcgctatcatgtcagttccgtgaaaaaagagacctgtttcttcattcacaatgcacatgttctcagtacctggaacagctcctgtcccacagtaggtatttgtgtgtatattttatgtaatagatttttggcttaattctcatggagtcaaatgatgaatgtgaaattcttaaatgctgaaggtttgctgtatttagaagtttttgttgactgatgggttggttggttggctttaaagtgaagtaatccatcaggttttatgtatgtgaacttttatggaatttggtgaagtgtgtgcctgtgtagattagtatataggagagaagtttttatttcttttcagatgattagttatgctttgccagtatttcctcagaacttctaagmgtgttggtttggggggatgtattcagtattgacaattccacgtttatctacattcagctgtcaggttggttatttaaccattccgaggcttttcttttctattatggtcacttaaaacaaagtaaagcaaaatgaaactagactgttttggtaagcttttattgaaataagaggggaaaatgtaaggggtaaaaattgctaaattatttgaaattatttttggatgcagaggttgactttattgactgaaacagaatttaagtccttagcatcttatctggatgttaagaattgcctatcttttggttgtttccagaacaatcatgtaggttcctttttgcttagactgaaaatgatttgggatgaagtaaaaaattcactccctcacaatggattaattttttttctcagtggagatgccatgcggtcagaatttcttgaaaatgacccacaagcttaytactaagcagctttgggccaatgagcagtcttttaaagaaaacattttatttatttttctaattggagaataatctatgttcattgtaaagaaagaaaatagaaattatgtatattcctaccaaagacaatttccattttagtgtatttcctttcagttctttttctgatatactatcttttctcttctgctttgagatgtgcattgtgacttccctttgtgataaagaggataaatctgctggctcatttccttttatagactgccaccttctctaccaacgaagaaaatgtgcattttggattttgcttgagttgaaacaatttatgctggaacaattataaaaagtagcatctgtaatgtgaatttggcccactctgtatcagaaaaaaataacttccaccatagcccgagaggaaactttaggtatctatcaccgatagagccaatgcttttaatacatatttcatgatcacagctgaggcttttccaaactcagagtgctgtatcattcattcactcctttaaactacaagattatttttggctctttgtgttggcacataggcctttccattgctgatctgcatgaaccatttatcaagtcaagggtttaatctatcaaagtcagagtttcttttttctgcctgtctctgtctcgctttcccagatggtattgtctcatatgtgtacactgttggcttaaaaaaggctatttggaatgcaaaggtttatcaagtttctccattttttttcaaaataatatattatggagcaaagtgatattttataggcaataataattatagtgttgatcaggttctaaaacattacattaactataatgtcccaaacctccttcttggctaatattctggttccgttcttgccagtagctcctattttctctactcactcattctgaaaacttgaatcatctttgattttcctctctcccctttccaaacatttattgaattgtcaaattatttggattgtatctcctggatatttcttgaatccatcctccattgcctttgtgtactggactcatgatgttgcctgttgtcttcaaagaagcaggcaattcattttgaatgcttttgatcggatccaaatataaaggccaaaacaaattaagtaatttatttaataacactgactccttgccgcatgccaacccccgatctagactctggtgatatagcaatgaacagtagggttaaaaaaaaaaaaaaaaaaaagcctaatagaatttacatgccagtgcaggaacaggggagaaagggacaaaaataacactagtaagtaaattataggatgttggatttgttaatgttgttatgaggaaaagtaaagggatgaaaggctgcagtgagacctagggtggacagggaagggttagagttaaatcaggtggtagggatgataatgaaagttaactaaaacttaaacaggcatcataaacaaagagaatacatcmaaaagcattctaattatgtcagctagtgtcctgaatcccccagtcctgatacctaggatacatagataatgcacagggatcttcgrtgcctgagcataacgcaatgagaactattataatagccaccaagctgttctccctctctttgagccattcccttcccaggtcagcactttcagcaaaaccgtattgcggtctaaacataagaattgtgcttaggagaragtgctaaagttgrttcaaagaggcatgtccacaataggtaacccaaggtacgcaagaagaaattccaggggccacagtaagactcaaatcaaaatcaagaataatatttagtgaattcttactgtcaaatgaaaaagtctaaagtctttagcctaatattcatggctctccagaaaatagcttaatgctagttttcttttttcttttctttttctttttttttttttttttttcatttttgagaccgagtcttactctgttacccaggctggagtgcagtggcgtaatctcaactcactgcaacctccgcctcctgggttcaagtgattctcataattcagcctcccaagtatctggatttacaggcatacaccaccatgcccagctacttttttgtatttttagtagagacagggttttgccgtgttggccaggctggtctcaaactcctgaccccaggtgatcaacccgccttggcctccaaaagaccatgctggttttccaaccttatttcctagcactcatcttcacatccttccacatgtcttccaatttccttccttgttgtctttatttggatggaagatcttctaccacatttttaggttccaaattctatccttccagtgggactcagatcagatgtttcctcttgtatgaaagcttgacagaaatcatcacctcctctttagaatgttaataacaaactcttttctggcatctggtattatatttactatatgtgtgtgcctcaacatttctgttagactaaagctctttgagggtagccatctggtccggctgttctttgatcctttccccttggcccacacagtgttcagcacagatgagggaatgataacaaagtgctcagtggtattktcaatggcctagtttttcaatggcaattcaaaaatattgttgcactggagtgcctccagatgaaggtcctagaaatggtaaaatgtcatgaaatacctaatcagtcaaagacagggaatgtttagcttggagaagagaaaagtaataataggcaaattttttcagtattcagccccctacctgcctccctgccaacatactacacctttttcatkatttttattaactgaccttctggctatattcatcagtgctcaccacttctttttttaaaaaaccattttctcccctcagtgcatagggtatgtctcgaatctctccatctcttttgctggcttttttgcccctatcgaatctttaaatgttagaatctaagctcagtcttagatgccctattctcagttctgattaatcgatgcttgtggcttcaattttaacctacatggtggagattcacaaaagcatacattcaacccaggcaagatgtcagaacttccaactaccaactcaacatctctctgaaaatgcttcagaggacccaacatgtacatatggaactcacgaaacctttccacactttctaattttaatgaatgactttgcagccttccctgtattaagtcaaaattctggaagtcacccttgacagcttcttctcccttactccttataaaaaatccatttccaagcctctagtttttacctcctaatgtatctaaaatctacttagagatagatcatttcctcatataggacaccaytgtcccttgcttacctagatttctgcaaaaactaggctacccccatccacatttgcctcctccactctgttcttcactcctctacagttaccatggtgattttttgaaatgcagattttattgccttatttccctgggtaagagtctccgggattcttctgtgccatctctaaactcctctgaatatggcccacaggtctctgcttcatctggacctccctgccactccaacctcatctcataccaygttgctcttatcttcctttggttcatccttcaaacatagaggacaaactgcgtcttctgtctgggatgctcttctcttctgtttccacctatttagatcttttacctyttagatcaatcatcattcccttgaagaagcaccttctgatcttcctgaatagatcaaatccactattagagtctgtactggcatcaggttattaaaatacatattgcaattgtaattttacatttattgctgagtatttctgagagtagggtaggaagaaggagagctgcaagacatgaaacaagagaggacctagggaccagaatatgaagcacttagtaaaccatgttaagacattttggatattatcctgaagacagtggggaaccattttaagaggaaatgacaggatcctattaacatttaaaaaatatagtggttgaattatgtccctccataatttttatgttgaagtatcaatcctkttacctcaggatgtgaacttatttggaaattaggttattgcagatgtaagatgtagtaggatgagtaagattagtaagatgaggtcatactgtagcagagtgagcccctaaaccaataagacttgtgtccttatttttaaaaatatcatgcggaaagatakaaattcacacaggaagaatgctatgtgaagactggggttatgtttccacagatcacggaactaccagaagttagcagagaggcctggaatagattcttccctagtaccttcagaggtagcatagttctgccaacacattgatctcaaactatagattccagaactgggagacaatagaatgcagttatttaagccactcagtttctaatactttgttacagcagccctagaaaactgatatagtaaggataattctggctgcagtgtagagaatgttttggaagtgggtaaaactgaatatggtgagacaatttgaggctactaatataagagatgacagcagctgtggaaaagattagagaactaatttgcaagtagaatcaatgaagataggtgaatgattagacttacagagtggagagaagaatggcttgagaaatgatggaggattttaaatcccatttattgagtgatgactcccaaacatacatctttagctaagacttctcttcagtcttccagattcttatatccaaatgccagttaagctacacttggtttttccacagtcgctttgatgaatgtttaaagaaagaaattggtaactaatagttaataagagctaccatatagattacaaaggagaattaatgtattatttatctgaataactgtatgttaaaggaagataaactttcattctacctgggaaagagcttttaatcaaccatagctcccaggaatagaatggaatagaaaacctacccttgtgaggtagacttctgtctctgattacttcatgcagggtctaaatgtccataagtctacaacttcagcctgtttatccttctttttttcattcacatggttctttgtttacagctctcatgttgttctctttacattcaggttatatagaggcctgtgatagtcctcatatgatggtaaggtttctcacagcaaagaccaagctttgttaattttgtcagcatatggtgcctaacactaagctgtatacctaaccagttaataactgctgctttgttgagaatgaaaaagtttaggccccaatttcaaatattttctaccccaactatgttatgcaatatattaatactaaatatgccagtctattttcttgcttagtaataaaaatayaacgtgttgagataaaatatttctggtagctaatcaatattccagttctcaattatccatgctagattatattatgcattaatttgattgcatgctctgcagtatattgtgtatgtgttgtgcaaaggcataattgctcatgttcatacataataagtaggtttgggaatttgtctggaggtatatcttagttattaatagtgattgtcaagtgcacatttcaagtttagaacctcgttggccttctgggagtcagagtctcaatttcaaggaaaatttaaacctttcctttcatgtattcctgttcacttaatcctgtcaaaatagaagattttgtgtctaagaagaaagagctagaggctaattaaaggagtgaaggccagggtttcatggacctctgatttctctccaaatgagtgatgaattaaatgtaaataagtcagaaacataccttaggttttgctttttttttwaattgttataaaaaattaatgtaaaatttagcatcttaaccattcttaagtgtacagttcagtagtatgaagcatatytgcattgttataaaatagatcttcagaagttttttcatcttgcagaactaaaactccatacacattaaacaactccccattcccctgtcccctcatttctctcttggtaactaccattctcctttctgtttttatgaaattgactactttagatgctgcactactgcatggaaccatgcagtactggtttttttggtgactggcttatttcattttatataatgttcttaaggatcattcatgttgtagcatgtgacttgatttccctcctatttcccatataatattccattttacatatataccacattttgtttaaccattcatctgtctataaacatgtgggttgcttccacttcttgactattgtgaatttcttttttaactaagtgtatttgaaaatatacagtttctgtatcrgttccattttaaattttctctctatgaagatgaaggaagaatatttttatacacttgaaaacttaaaactctttgtcacttaagccttctgtattagtacattctcatactgctataaagaaatacctgaggsccaggcatggtggcttatgcctgtaatcccagcactttgggatgctgaagcaggtggatcacctgaggtcaggggtttgagaccagcctgtccaacttggtgaaatcccatctctactaaatatacaaaaattagcctggcatggggcacacgactgtaatcccagctactcgggaggctgaagcaggagaatcacttgaacccaggaggtgaaggttgcagtgcgctgagatcacgccactgcactccagcctgggcaacagagtgagactctgtatcaaaaaaaaaawaaawaaaagagagaaagaaagatacctgagactgggtaatttataaagaaaagaggtttaattggctctgggttccataggctgtacaggaagcatgacactggcatctgctctgcttctgagaaggccccaggaactttacaataataatggaagacaaaaagggggatccagcacttcacatggccagagcaggaagaagagaggcggaagtgctacacatgtttaaacaaccggatctcttgacaactcactcattatcaccaagacaataccaagggggatggtgttaaactattcaggagaaactgctcccatggtgcaattacctcccaccagaccccatctgcaatatgagggattacagttcgatgtgagatttggtagggacgtagatccaaaccatatcattccacccctggcctcccaaatctcatgtccttttcacattgaaaaatacaaccatcctgtctcaacagtcccccaaagtcttaactcatttcagcattaactcaacagtccgaagtccaaagtctcatctgagacaaggctcatactttctgcctatgagcctgtgaaatcaaaaacaagttacttacttccaagatacaatggggttatagacattgggtaaatactcccattacaaaagggataaattggccaaaacaaagggctacaggccccaggcaagtcctaaacccaacagggcagtcattacattttaaagcttcaaagtaatctcctttgactccatgtctcacatctgggacacactgatgcaaggggtgggcccccaaggccttgggcagctctgtccatgtggctttgcagggttcagcccccatggctgctctcttgggccagtgctgagtgcctgcagcttttccaggtgcagggtgcaagctgtcagtagatctaccattctggggtctggaggacagtggctgtcttctcacagctcctctaggcagtgccccagcagggactctgaacatgggctccaactccacatctctcctccacattgccctggtaaaggttctccatgagggatctgctcctgcaacaggcttcttcctagacatccaggcttttcttttctaccacatggacaggctgcaaattttctaaacttttatgctgtgcttcccttttaaatataagttccagttttaggtaatttctttgctcacacatttgagcataggttgttattaacagctgggccacatatcgtacactttgctgtttagaaatttctcccactagatactgtaaatcatcactctcatgttcaaagttccacagatccctggagcaggggcacaatgcagccaggttctttgctaaggcattgcaaaaatgacatttactccagttcccaataagttcctcatttccatctgagaccttcttggcctggacttcattgttcacatcactatcagcacttttgttgaaaccattcaacaagtctatcggaagttccaaacattccctcatcttcctttcttcttctgagccctccaactgttccaatctctatccattacccagctctaaagttgtttcatattcaggtatctttatagcaatgccccattctgtattmattttatgtattagtcagttcttgtgctactataaagtaatacccgagactgggtaatttataaagaaaataggtttaattgatccacagttctacaggctatgcaggaagcatgatgctggcatctcstctgcttctggggaggcctcaggaaccttacaatcatggcggaaagcaaaaagggggagttggcacttcacatggctgaagcaggaagaagagagagaggagagaggtgctacacacttttaaacaaccagatctccttagaactcactcattttcaagaaaataccaagggggatggcattaaactattcatgataatcttccctcatgattcagtcacctcccaccagccccacctcccacattagggattacaattcaacatgagatttattggaaatacagacccaaagcaccttagcttcttattgtagattgttattctctgataaaaactggtaccaaatatttttagacagaataatattatgaaagtcagtacaaggaacgtataaaactctgaaaacagatattagatttgtttggcagattggtgaataggcaatggaagtgaatgactctttatctcctgaaggaccaaggaggctttgaagagaattactaagacacactcataccttttaaaaagtaactcttggtcaggcgcggtggctcatgcctataatcccagcactttgggaggctgaggtgggtggatcacctgaagtcaggagtttgagactagcctggccaacatggcaaaaaccccatctctactttaaaaaatacaaaagttagcagggtgtggtggcaggtgcctgtaatcccagctactcgagaggctgaggtagaagagtcacttgaacccaggaggtggaggttgcagtgagccgagatggtggcactgcactccagcctgggtgacagagcgagactccacctaaataaaataaaataaataaaataaaaaataattcttcaaaattcaatattttccaaacttattagaatctacaaggaactcaacaagaaaaaaaaacctcattaaaaagcaggcaaaagacatgaaaagacatttctcaaaagaagacatacaagtggccaagaaacatatgaaaaaatgctcaatatcactaattatgagagaaatgtaaactaaaaccacaatgaaatatcatttcataccagtcagaatgactgttaaaaagtcggaaaatgacaaatgttggaagatgtagataaaaagatatgcttatacactattggtgggaatgcaacttagttcaggcactatggaaagcaatttggagacttctcaaagaactaaaaatagcactaccatttgacccagcaatcccactattgggtatacagccaaaagaaaagaaattatatttaaaaaacacctgcattcatatatttatcacagcaccattcacaatagcaaagtcatgaaaacaacctaagtgttcatcaatagtggattggataaagaaaatgtggtayatatataccatggaatactacgcagccatagacaaaaaatgaaaccatgtactttgcagtaacatggatggagctggaggccattatcctaagtgaaatagttcagaaactgaaaatcaaatactgtgtattcttccttataagtgggagctaaacagtgggtacccatggacatatagaaggaaataatagacactggggactccaaaaggtggaaagtggttgggtgtgagggttgaaaaactacctcttgggtacagtgttcactatttgagtgatgggtacacaagaaacccaaactccaacattatgcaatatatccatgtaacaaacctgcacgtttacttcctgaatctaaaataaaataatatttcaaatttaacttcttttccacctttattaaaggtaaagctattacttttgttttaacactatagtgaatagaattttctgtgttgttttaaataattccgtgatctaagtatctgatgcagagatctttaccaatgaacatcaatggtttttccacaaaattaagatcttttctaagatgaatttacaagggctttgagtgtgtatgtaaaaataagtcctagaattcttttacaataatgacaagcatggcctttcaatttttcaacattctgaaaattgataaacaaagtcatttacccwgtctctaattttctgaagattagattcattagtttaactcatggttatagtttttgtgtcaaccgtattgatgtatacatcaataaacacaatctttcacyttcactcactcttctgtctcctccatctccttccagttcctacattattcagaatccttggcaattcatatgtgttaggtgtgaagatatggaattgtcagcatcaggaaaagctattaccttgctacttcagactgagtctttctcttttctttgtttactttagatgatttcttttttttaaagactgagttcttgaattcttattctctgacttgcttcataatccatttcagaatttcttgctcctacactttgtttctttatgaatcagtctgtgcatgagatattccatttttaacccagcttaaatttctccaatgtacccttgttttgctttcaagacagttagcaactctgaattcaagcctatgatcttcttttagaaacctgatctgactgactcctgcaaaattctaccttttttcctggctcttaatttagctttgaaaatgaagtacatactatttatctggttatacattttaaagtagattctaagtgcaaaaaatgtgcctagtcaattcaagttgactcctgattttttgaaaaaacattaagaattgaataacaagaataagaataaatataaggctactgactgaaatgtgatctttctcttattttgaacatcttatttcacaaagttctaagtccttttctatttggcttgaccgcttccatatgatcatggatataaaacgattaaacagaaagttcacattcagcaaatatcaaggtgttcttaatatcgtaacttgaaatcaatgaagaagtcacattttctgctttgtaaaaactgcctcacatgtccctggtctggcaaaaaatacacacacaagtactgaaaacagaagatgatagcaccagctaaatagcaccattgctaggcataagatttgaaagccagcactttgcagggaaaatttgagtaaacaacctctgtggaaatacagttaattaaatctcgattctataaactgtgaaccaaagtttatataaaagagagactaagaagtctttgttgtaagtattaaaaattctgacataaggaagtgaccactctagccatatcagtgtcagaaaatgacagtgtggggctccaaggctgagaatcagtggggctgcaaaatctggacaaagaaaggcagaacaagacatagactacagaaaagagaacattatctgagcaataccaggctaatcccttggtgtgaagaaaataggagttaataccaaaaacatatggctcattattcatgtaattatgcttgcaagctatatagtaaactatatgtgaaattttcataccatagtataaattcagtcattagtttttccttttcatatatacattaagtaaatatgtattgaggaccctcagatgtctcaggcatggacctataatggtgaaggattcagctttgccctcaaggatcttacaggaatggggcagatggcaaggaaagaaacaataccgtgtggtaagcacagggcactaggggaacaggaagtagtgatctatttatctggatccttgtgggcagaggaaataaacataactaagaacaatgaatgataagtttacaggagggtaggggagaagattccaagtagaagcatygtactaaattttgagtggggcaaaagttcagtgaaacttttatttttattataaacccaccaaagtaaaagttctcagcttacatattatagatagctctctgaactggatgaatgtcagctgtgatttcaatcaagcaatgatgatatggccagatggagtgtgccacctcccttcagcattttgtcttaagagggtttctaatatggcttgtcagacagtatgtgtattccgtgtgttgctggaaatttgaagctaccgtctagaaacaaaggtcttggtctcagcagcattcagtgagttggtgccccccagtaccttggataaaaaaatgtatcctataaagggctccatgaagcacaaatgtaaaaacatgctacaaaagcatctcttcttttcattgtgccacaggggctatcactgtgagtctgacttgcaaagtgcacagcaaagcgaacctgtggtctcactactttgctttatactattgcccactccagcacctgcataaggctgaaggatatccaccaagagaatgctcatcactttgccaactgccctctgtgctctagcccagggtgggcattttttttttctgtgaagaccagctggcaaatattctaggtttcatgtaccttacagtctctgtgacagctaatcaactctgccgtcgtagagaaaaccagcacaaaaccatctataggcaatagacaaatgaatgaatgtggctgtgtttcaatcaaactaaatttgcagaaacatgcagtggtcccaggccatagtttgctgatccctgctctcaacaatcctttaaggtgtggtatctggatcctagcatatgctgtttctgtttcatgaaacattcctccttcatctctctgcctagctagattttagtaattcttcagctattagcagaggttattttttgagggcagatgcctcactgatgccccaaatctgatggtatgccacttcctctccagagtactgactgatttctggttgtctggagacttgctctctgcacttcagagtatgagcttcctaagggtagaaatctgcttccctttctgcctgctgaatccctggcacctaacacacaatgcctgggacatagaagtgactaaatacatatttgtttaatgcttaacaaatgaaattacttacatcttccttactttgttaggatcataattctagcaggtgaaattatttatggtcttatagtttatgagccatgtcaccatgttatcacattgtaacaaagcaaaggtttaactatatctcggctccagtggcattcagagggctgtggaaatcaatagttttagcttcatttagctaagtggagaatgccatttgggcagtctgtgtctactaacaacttggtccacacccactgctctgctgtctcgaggtggagaataacacctctctgtccccatcagtgtcttccactctttttagaagtactgccagcacaatgctgtctatgctccaatgcttaacaaaatttttagtgaaatgttgcttacctttttgatatatcttattatcatcctagagcccagagaagtgcattagattaacatggaatcagaatccgatgtaaccagaataacttccctccaccaagactaatgctttgttactgggtctaaaatgttgggctcagttcttgggaagacttacttcccaggaagctcctctgtgtctcttaggctcacacttcaaggaggctgctcattaatttttcaacatgctcaggtatcactgtgaatcctggccagagcaagctggtaccttgactactcttttttcctcttccacttgcaggtagaacaacaactaataacaaatgtatatatgtagctcactatgtgccaggtattcaccatctgtaagtgatttaccagtagtaacttaattgaaccttgtggtgattctattgcattatctttatttcaccaaggaagaagctgaggcacagagatgttagttacattgcctaaagtcacacagctagtaatsatggagctaggaatataactcagacactctggttctgagtaaatgccctaaacccatgctgctggtgctgtgatagctgagtctcagcctcttcctttctcctacccctaaagaatatacagtcttcattctacccacttctctctcagaatctcagaaactaggaaaaaaggaggggtagaaaacacataacagtgcataacttatggtacagactgagacttgaggggaaatattcagagaccactttagatattaggcaatgctagctctataataagtagaaaattccaaattcaagatattctgagccttgaaaatcatgagggaaataaaaatgcccttgaatggctatgctgctttctctattcaaagagctagcttggaacactaaaaggatgttcttattcactaagtgtttttcactgtttgagtctgcagtggagttttagccacaaataaatgtttttcctaaaattgaaatcaatttgtaaaataatgtagaaaatataaagcctcttgctgtttttctcagtgataaagcagcaggaccgcagcaggaaccaaccatgaaaaatgtggccayctcgttgagctttgcactaggaagctacttcattttcacatacaaggattctccctattccgtgttgcaaataaaaattagtaaattagtagtactaagtttaatgaactctactgaactctgtgtgatacaggaactgacaactatgggtctgaagatattacatccctgttgctttgtgaaaattatctttactccagacttgatagaattagcgtaaacagataactcatccatctttcaatttaaagaccttccttttcctcccatctttttccttttcatcttcaatggttaattctcatttgaaaggatcattcccttcatagacatatccccggactaaaacatgctctttctaacctaaagaaatggtttcttcataaactcataggcattaacatatttttgtaaggtcaccaagagtgacttgttcggggtacctgaaagtcaatatggcgataaactgaagaatcagatttttcttcctgatttttctaagattattgtgggtaagatgaaccatcactttttgggccctagaaactgatttatatagagactagaaaatgttttacatagagaaactaatttatatgcagattagaaaatgtttttggagtttattttcccactagtaaagccaatttttttctrtgtaatgaatccattcacctacccatctacccatcagtctacccattcacatgtccatccatccatccattcatccatccatccatccacccacccagtccaatctataattctaaccatcttgaccctttttatattgcttctctgcttcatttttatctttgcccttgtcatcttttactatttgacacaagttttttatttcatttattgtctgcctcacactttagaatgtaaattccattaagtcagaaattccagtccattttgttcatggtgtatccccagcacctagaacaatacttgacaataaatgataataaatgtgagaaatgttgcaagaatttttattaaatatttatttagcatttactacttttaaagcactggattgagtgccaaaaaggatctaagatgaagcagatatgggtctcactgtcaaggaattccaggccaagaaagctatcaccaaaatatattattttaatggcatcattatatagggggcaaagttgttttcatgagaaaaatgaagcatatgtggtatttatactgtgcctgagtgaaaggcttccccaaggaagtgacacatgacattgaataaggggaagtatttgaaaaccgagagttgtagtggaagggcatcctagaaaaaagtgacaactggaattaacaagtggaagtggaaaatgcaggatatgttggagacagaaaagcaattggttcagtttagaggaagcctagaggccagaaagataataatggagaagatctatttggaaagagtggttgggtcagattatggaggattttgatgtcacctgttggcagtagcgagtccgagattctctcgtatctgaacctctctgtctcccctatattataacttttgaatgacaatattttatgcttcctattctggtttccaaagcagcaatgtggccatcccagtttgctagagcctggaaggattcttgtatgaaatgcaaattyagtctttgatctacattttgtaggtcaacaacctcagtttcgtggtggtaattacagggctcacaaggatgttgttcttgagtaatgaatctaatatattagtcacaaacagtaagcatctcacttcccctactcctccttttggttaaggagcacaaattgtccccagttctttgagatttcttccgggttcatctggagcatggatttctacctttgcaaacatttaacttgcagccctagagctgtgtaataacagatagtattttctactcctagccttatctggggagaacacacacaaaaaagtgttttttattttggcatgtgagactatcgagtgtgtccttgttccataagtgtactttggcaccaggaagcagagacagcagctttcaagtgatgggagaaacagactgattaagagctctgcctgggcagacggtactgaaactgggtgtgtagtccttgcctcatcatttcagtttttttaatgtaaatttttatttttgattgaaaaataataatgtatgtatttatggggtacaatgtaatgttttattatacacagacatgcacacacacgcgcacacacacacattgtattgcagtattattcacaatcgccaaaacagtttgggggttttcatgaaaaaaattccaattttgggtctgttagtatattttatcatttcccccattctcaattctttttcctctaaattcctttccctctcagttaatgmcaccactgtcctatctttccatatacccagaattaaaacttcagtgtcaatgggaaaaactggtcataacatcatctattttaattaaatttaartaatttatttacttaaaaaatcaagatgaaaatacctaatttaaattaccactgaaggctagcattcatttccatggcatggccatttatttgttctttgacttcatcttctcctattattttcactcctatccattgaataaattctgaaatgggaatagtatcaaatgggagtgttacttccacactttgctgggtggagcaaacctatctcctcacaaaagggatagaagtcagtttgcagtgacttccctgatcctaccagccagacatgctccttgcctctcttcttgcctcctcctttaatatttaaaatatttttttwaattttatttatttatttactttttgtagagatagggtcttgctatgttggccaggctggtctctaagtcctgggctcaagtgatcctcctgcttcaaccycccaaagtgctgggattataggcgtgagccacggtgcctggcttctgcctttttgtgataacagatggtaacaggaatgacaccacacttatttgtaccactgtcatggctctaatgattatggctttgaagtagcatcatttgtttaaagagctcaggttggtggcccagcaaactcgggttcaaattatgcctctagtgctgacttaatgacatggggcatgtcgcttgaccttgctgggcctgttttctcatctgtaagatggagattacaaaaactttcaaggtccttgtgggaagtaaacaagttaatatatgtaaggcacatgcacatagcctgggacctggtaaataggtgccaagggtagttattactgtggttgttattgttagagtttttgttttacttgtgctaaaaatagaagattcccaaggacagaagcttcgtcttctacaccttgaagggtagtgtttttaataagcaaaggtgagtgtgtgaggtgtcaggtatgagcactgagctgtggaggctttcttgatcttttgctttgtattttaatagatttcttcttccagtatcctgcctcctggtaatgagaaaggggataaggtaacttacacataaatttggttcaggtacatcattttttgtccctagatcatagatatctatttgcaaggatgcaatctgtgatagctaaatgtttgctttgttttataaaatcaagctaagagaaataaatgttaggtttcacataaaaaaagtccttttcagaaagagggtgctgtaagtatttycattctctcaaagcattctagagacagaaaaagtgttttctaaccccttcccacccccaccattcttttcttttggtgcctggtgaagagtacattaaaataggaaggaacattccagagtgctcaattgcctctgttcagggtccacagctgaatttctaagttctttctcctgtggtttatgcagcctatactttgactacttctagttagacagaaggaaagctcacacattttgcagtgagccaaggtaaaagagaactcttttgtcaaagtaataataacacttagcacttatatagggctttttatcttcaaaaggccttgcaaacattagctaattaagaagtctgctcaatgtgcagcagctgttgaaaaaataaatgtgatgcttgggtgtattaaaaagaagaacgaaaacatgaggacatcctatatcaagcagctgttgtactccgtctaatttgtttgcttcacctggtggaatacatcagacgctaaaatagtcctgccccatagagtaataatggttagggatgaggcagagcttgtacataatggaatattgcaagggctactggatatttaccggaagaggaaaaaccaaagaaaagctgcatcgcctaatttttattacacttttataatcatgggctcatgcagcactaatgaaacagacatctgacatgtctaatgacatgaacatatcgtagattctttaagaagaacctatttgcaagagcaagcattctcatttattcattcaaatttactaccaaatatgtattgagtacttaccagacactggagacatgcatttataaattacttggggacagttttgaaacagctgtggctctatcatcttacatgttatttacctattgtaccttaattttacattaatattgacacacatccacccagacccatattaaattcaatcaacatttttattcgttgattctttggcagaaatgagctaatacaccattgcaagagctgagctattattttggtgatgaaaacaaaatttagaaataaccaaaaaatgttttttttgtggttttctgcaatgggcatttggatatggtcctcttttctttttcttggtttttataacaacagtcattgagctatacctgctgttctgttttaaatacctgtttcaagaggttgcaaattccaaaamcttgcaaatttcaagaggttccaaattccaaaggaggtggtacatgaagagaaaagggacagagatcatataatgtcaaaatgtaagtgcctgcatcccattagagtataccccatgttatttatcaaagtttacacacatgcaaggcgtattagaataccttacttccattgtacagaaggagatgggggaattatactttggattgagttgattgttaaaatggggttgtaagaaaaattatttcctcattcaaggaggacaaattataaaagagatagcaaggaagtgaataaagaagagaaggtgttctaggtattgggaaaaaattgaaacagaaaatgttcctagacaggagaaaaatgtctgaaggaattagaaataggtttatttttgctaaggaaaagttacaagccaccaaataaagtaaagtagcaaggagaagccaagtcatgcaaagccaaggccatagttacaaagataaaaaagcatctacttgtcatttcccaagttcagaggatggaacagcgtgaagtgactagaagcccaggaccaacggttgattttcaaaggtaaatggttggggaggggttgactcggttagaaaaaaagtcaatttcagtgatcacaggctcatcctggagcattgcttacagtaggaaatatttggaaataaatcaaatgtctattttttgttcgatcatatttttctgagaagaaaggattgattaaataaatsaggatttattcataaaatggaatactatgcagctattaaaacaaggaagctctgtcactactcaaagctcaaatataagttgataaagcaaggtaggggaaagtgtgcatagtgttaaaacttgtgtgaaaaatatagatccaaatgtgtgagtgcattcatgcatatttatatatgaagagactatagactaactctggaaggacatgtatgaaaatactacagtggttacccctagtgaagggaatggagaaattggaagactaggtagatgctagactcttactttttagtgtatatttcctccttctcccctaaacctttttttttttaaaaaaaagaaaacattttattatgagataattatagattcacatgcagttgtaagaaataatacaaagagatcccatatatctttcatccagttttctccaatgatracatcttatgtgaggagtttaatgtcacaattagaaagttgacattaatataatccactgaccttattcatatttcaccaattttacatgcctttgtgtatttgcatgtgtgtgcatgtttaatgctatataattttatcacatgtgtaagttagtgtaaccaataccacagtcaagatacagaacagttctatcacaaggatatctcatgctacccctttatggccacagacagctccctccttctctcccctccttactcctggcaaccactaatctgttctccaaagccataattttgccattttaagaacgttgtataaatggaatcatgtagtatgtaaccttttgagataggatttttatattcagcataattcccttgagagttatccaagttgttgggtgtatcaattcttatgaagggcatgttgttggattgttgtttttatccactctgcactccacaaatctgatttttaattagtgtatttagaccatttatatgtgaagtaattattgatatgctagggcttaaatttgccatttaattgtttgttttctgttcgtttccaccatttctcatgtttctgtttgtcttttcttatcttcctccgggttacttgaacattttttggatttcatgtttatatatttacagtgattttgagtctatcattttgaatagttctcttagtggttactctaggtattataatatacatatataaagtagtaatatctatgtgaattatattccttttttaccttttgggctactttgtcttacctacaagttaaatttaaaaataaataaaactagcaaaccaaaacactcctacatgtatacctacttaaaacaaataaaactcacctctgtacagaaagattgtagacaagaaaagaagtgaaaaccaaagcacttcagaagtcatgcaaagaaatcttgaataagaagaaaggattaaaccaaaacttttagggcatgactgagaaattgaaaactgggggctgtccaggacattagaagcctggagcagagaaagccatgttattgagtatgtaagtttgttctcacattgctgtaaagaactacctgagactgggtaatttatgaagaaagaaggtttaattgactaatggttccacaggctctacaggaagcatggttgggagacctcaggaaacttacaactgtggtgggagggcaaaggggaagcaagcacatcttcacagggcagagagagagagagagagagaaggggaaagtgctacatacttccaaataaccaaatcttgtgagaactgtaccatgagaacagcaagggggaagtttgcctccaatagttaaatcagctcccaccaggtcccccctccaaccctgggaattataattcaaaatgagatttgagtggggacacagagccaaactatatcattgagtatccaggccttgtttttttatgacctactgcttaccacctggtagacctcatttcatttcttaaactctttaggtttcaaatataaaaggaagttaataatggaacctacctcgtagaattgttgtgaagattctcaacatgtatgtaaagttcttagtgtcatgtctgacacatagacaaactcaagtaattgcaatcatataactgaaccttttcttgagtgtctactggggtcgcaggggttgcaggttacaatgatatggtgccattcctcagaatgagaagatagtgccccagacatgtttatagaccctttgatacttccctcgttggatgaaaccctcttttcagtttctttccactaaggatagatttcagcatatcactatgcttgaagtaaaaagagcttactccaggcctcttggctcttgtccctaccttagactgatggccttggtatttggtatgtgaagtagcagtttggatatggagtacaaagagtgaaaaaaaggttggatatggatttttagactcttactttgggaggatgagaaaaagttctcagaattgataacattgtccctagtagtaagaaatatcatttttcctgtctttctaggcatccttgttgatagatctttggatagaattttttgcagagaatggatgatgtttactttttttatatgtaaatgattctaaaagttgcttttttaaggctgagcacggtagctcacgcctggaatcccagcactttgggaggccaaggtgggcagatcacctgaggccaggagtttgagaccagcctgaccaatatgaggaaatgccgtctctaataaatatacaaaaattagctgagcatggtggcatgcgcctgtaatcccagctactcaggaggctgagacaggagaatcgcttgaacccaggaggcagaggttgcagtgagtggagatcacaccactgcactccagcctgggcaagaagaacgaaattccttcccccccccaaaaaaaaaaattaaaaatttgctttttttagtgtttttgtacaaaggatcatcgtggtatgatggcgcttcacacatgcagaatggtcatcttaggctattgtaaccatgtagagagcaattccttagggtggtgtttttttgttgttttttatttccttcattcccaacttttatggtgtagagctctggctccatttcaaatcagcggaaaaattatcatcagacctaagaatgttttcttttgagatggcgtctcactctgtcgcccaggctggagtgcagtggcgcgatcttggctcactgcaacctctgccgcccgagcggcaagtgattctcctgcctcagcctcccaagtagctgggactacaggtgcctgccaccacggccggctaattttttgtatttttgtaaagatggggcttcaccgtgttagccaggatggtctccatctcctgacctcgtgatccacctgcctcggcctcccaaagtgctgggattacaggcgtgagccaccgggctcggccaagaatgttttatatttcctagtttctcttccttttgtggrtcctaatcttttgtttaacaattgatttctacttcattttgactatatattttcttttcaagcctttttctccctgcatcttgccaatatccctaaccccattcactctcggcaaactcgcctaaatctcccaccatgaattttagtcccaggttagacttttaacctcatctcccattgaacaaactgcaaaaaatattaatacaaagggcagtttagagtcaacaaaaattgagaacacttgcagctgatggtaccatctgtgcctgtcaaactctggccaagtagttttccatggtggagaaagagagaatctcatgacggcttttggtttggggttattgagaactgagcctgcactggaggaagactagaagagctgggaggcagctctttctctttgtggtgtgtrgctcatctcccagaaaaacaggcctctcccagaaagtggtcaaatttggcatctgagacctgagagtggcctcctgtgggtcctttctctcctagcccatctgcgaaaatcaatctgtgccaggtgctccacatggcagaggggagtggtggagtcatgaaaaagaattaagcaaacaaacaaacaagcctcacagagcacacaagaaatttctgaagagaagtttcccaggcttttgatgaggcgaaacaggaggaccatagagcagcagaggaagaggaagggggaggatatggaggttacctgatggcctaattggttccgacaatgcactcctttgttgcagagaatctgaatcatggaagaagcaaataaataaagaaaaacatatggcagctaagtcatatcaatctacattaagaaaaataaatgagaggatattagggagaagatcctgagaggagaaaggcagatggggactcttagaaagtattcttaaaatgggcaggaaatgtgaaaagggactttaaaaagaggattgtgggatgagcaatgaataagtaaaagggtrcttaacctcatcactcatcagggtagtgcaaattaaaaccacaatgagataaaaatactaccagaataactaaacaaaaaatgatggatcaaaccaagtgttggccaggatatgcaggaattgaactgtatgacagtgccgktgtgagtgtaattagtgcaacccctgtggtaaactatttattgctattgttmgaattgaacatatgcatatcctacatcatggcaatgctatttctaggtgtatacccaggcacaatgagaacatatgaccactgagcatcatgtacataaatgtttatagcagctttattcacaatagccatatttgaaaataataaaaatgtccaccaacagtagaatagataaatatattgtatatgtcatggaacactatgtagcctgaaatgaatgaaatgagaaagaatgaaatgtggatgcgtctcacaaagataataacagaaaaaaatcagatgacctggatgacaaagaagcatagtgtttggggtgttacatgtatttagcacattatggagaaaatagagtgataacttgagttctagtgagctccaaagggatggaatgatatgtaaaaatcaccagaaatttgtttaagccatactgaacctttctataatgagacctaaatagaataaggtactgggtaatgaatgtttcccaaattatggcatgaatgtttaaggactatttcattttaagagatgcagtgtccagaaattgtcaccatggtagtagtttttaaaatgtgttcctcagagctgattggctccaggagtgtgtaactcaggagtgtcatctaccatctgtttatctatctagttaactatctattgtagagacggttgtggtggagtaaaccaaacaggcagcttgggattcatttgttggggatctgcacaagatattgttagaaaatagtttgggctgctaaaaaaaaaaaaaaaaaagaaaaaaaaaagaccacttctttagagaactgttagtgtgatgataagagattatagggcaccaggaaaatctagcaaatacagccatctaaccaaaaggcagtattaccatccttgctttgccaggggcaagtgttgatatagacaacatttggaatttggagtctggagtgaggactcctcggaatatgacacttaaagaagcccctgataaaatctagctaataggtagcaataataatattagtaaacatttattgaatatttactattatttagtgatgtctgctatttttatacatcatttaatcttcacaagagcacagaccttgtagtcatgaagtagctgctctcaggctcaccctcccaccaagaagctgaataaattactgtttgtaggaatcagagtacaccaaaatgggctagcatttgaaagatcaagaattctcaaagaaggaaatgcattgaggtgaatgggacctctgtgggttgtttcctgtgatgcatatgcaatacttagaagaggcatagtagcctagatcttacaggaattgcagtgggactggtagatgaaaattcatgttcagggataataagacagccacaatatgagggaccaagattctggagagaaggaaccacagagatctgagccagaattctgcacgtgactttccctgaggaatttgcagatttctacaccacactagcagtgagatactgagaagccaagaagaatgcagtagtttaaaaggccaaaaatctaagcagaaatgtaagcaatcccagagaactgaagagacagaaattgtagttcagagcctcccaagcaagaaggatctttataaacatggcagattctcaattgagaatctgaagagctagattctaatagtatgggcaaactgaacatagaccattctctagtggatcaagataacctgtgtatgttctgtcttccagaaaaaagtggaatcctctatgtaggatttcagggtctaaataattattttacttaccatgtatgataggcaatagaacattaccaggcatgtcaggaaatatarccaaataaatgaatttcttagtgaaaacaaataaactgtaggttattgatatattgggattatcagacagatttcaatacaactatgattaatatgtgtaagaaaatagatatcagattgattatttcacaactggaatctgtagacaagaatacaggggaaattctagaagtgaaaaacttaagaatctaagagatatgtttaatagcagattatgcatagtagaagagttgattagtaaagctgaaaatgtttataaaaataacggatcaaagcatcaagattaaaaaggtgaaagataaagaaaagagcatagcagacacccagtgaaaaatggtgcttctcaaagtatggtcctgagaccacttctggtgctggtccctgacaacatagagtgttcataaatgtttatagcaattgattttgccacaacattttaatagcatattttatgacaaaattagactctaagggattataaataaaaaggaaaaatattaatcacractagtttcagaaacattggtataacataagtatgttggagtcccagaaatggggaagagaaagaataaggcagaagtaacatttgaatctctattggctaagaatctttcaaaactgataaagcctcaacacacaacttcaaaaggctycatggaccctaagcagcataactacaaataaaaacttacctaggtacgttagaacgaaactgctgaaaacctaagaagaagaaaagaaaatcttaaagtctgtcagaaaacaaaacaaaaaaaaccaatcttcaaaggaactgtagttcctgaagctgctgccttttcaatggaaatggtctagaatccagaagtygatgaagtggcatcttcaaagtactgaaaggaagtaaccaccaacttaattctatatcaagtgaaaatatctttcaaaataaaaataaaatatttgtggataaacaaaagcaggtaatttgtaaacagcaaacccacattaaaatattatttatctatttatttattttttttaaagttgtagagacagagtcttgytctgtcacccagtctagagtgcagtggtatgaccaaagctcactgcagccttgaattcctggactcaggcgatccttctacttcagactcctaagtagctaggattactgttgcatgccactatgcctggctaattaatttttttttttttttttgtagaggcagggtctctctatattgcccaggctggtcttgacgggctcaaacaatcctctgacctcagcctcccaaagtgctgagatttaccggcattagtcactgcaattggcccccacactaaaatattgaaagaagctgctcaggcaaaagaacatgatcccagatggaagtacagaaatgaaagaagcaatgaagagtaagagaaaggtttaatataaaggagcatatagataaatgttgtgcaaaacaagtaataatgtctagtaagattaaaatactatgcattaatagccaaaaatgcaggagcagggtaaactattaaaatgttgtaaggctcttgcaatgtttcagaacttatgaaggcatacattatattatattctagtaagccaagaattaataatgcaattttaggatgattactaaaaagaataacaaaagaatttagatgtaacaaactaagagataataaatgggaaattttcttaagtacttgataaattttttaaaagccaggagaaaaatataggaccaaagaacaaatgaaatagagaacaactgtgaatgtgttagatttaaattcaaatatgtctgtatttacattaaatataaatggcctaaacattctcattaaatgacatattgcttaactatgtaaaaaataattttaggctacataaagagacatactcttaaatatcaggcacagaaaggttaaaaataaaataatggaaaaagatatactgtgcaaacaccaatgataaagaagctaatacagctgtactgatattaggcattatagattttaaggaaggaaatcatgttaaaaataaaagatgccatgacatagtgacaaaatgggcaatttgacaggaatatttaatgatccgaaaagatatgcatttagtagcacaaaatatttaaagcaaaaactaacgaaactaagaagagaagtagataatctgacaatcatagttggtggttttaatacccttttccttctttaactatcagcattagccaacaaaactatgagtgaagatttagtagatttgaataacacaattaacaaacttgatctaaatgacatatagaactctacatccaaaagctacagaatgcatttttttcaagtaaacataacacctttaaccaaattaatcacatactggtcaataatgcaagtctttaaaaaattcaatgagttgaaatcacacagaatatttcctctgatcagagtggaaataagccataaattaataacaaaaagataatgagaacatacacttaatgctgtgacccagtaattccattcctagatacctcacattcatgggtacatttggcatgaaaggaagtatacaatcatgttcatgcaaatcaaaaataaccctgtgctcattaacagtggaatgaaaaaaktatatgtcaaaatgatacatcatatattcatataatgaaatagtgaatgagctagtggtatgcacagcatgcatgaatcttgcagatacaatggtaagcaaacaaagccagatgcagagaatgcataccataatatttcatttatataagccaaaacaggtaaaattaagcgatagtgatacaagttggaatagtgttctgttttccttgtgtacttgttatacttcattaacacatgtttaaaaaaaamccaaaaatatcgcaagataaaaaatgcagaagcattttctgggtaaagaaagatgggcaaacattacaaacagaaggaaatttggggggttcaaattctgtatcagtcatgagacttctttcctccaaaaaacttacttttgaacttttaaactctattaacattcttatctattatttattatggaactagatatamccacttatagtaattgtctcaaatctgatttctttccatctatattacatgtagggtagtacgatgtagtggttaaggacacaactctagagagagactgaggttaaatcccagttcaracatttgggcaagtcacttaaactctctgcatctcagtttcttcactgtaatgtagaggtaatagcaatatctatgtcagagtgctgttttgagaattaaaagaatcaatataattagttacaacagtatctggcacaaaagtaagcactccataaatatgtgtgattgctactataattaccttggaggatcggatcattccttatatttgttttaaatccctcgaatacctagaactatacaagcaatcaggaagatgggctttctggacagcgagaagggaagwtattttggaaactgactctgttttctctctgtgggtgaggatgagcttacattgatgacaagtttggcttatgaactaggaccttaagtagagctgcataaattagtgtaagtgttattaataagatgggaagaatttgctttctcagttctggcaggaatttatgaccctgagagtcactttatgaccctgagtttgccataatcagcttagtgttctgataggaaaccaaatggtaaatgccaagaygctggggcattggtctcttgtctgcwtagtcaccttactttcactaggatctttattcatgttctttatttaagttgggaacttctagcaaggttatgtgtgtgtcatctacagatatgtaagcaacctggactctgaaagcctatatattaaaaaaaaaaagtttatggattgaattgaattgaatcatactgacttgaactggagtgaatcttgagagatggctaagaaccaggaaggcttagtggcttaacttgtaaggctatgagtttgattcactagatatgtaaattttcacaagacacttaacttttcaggcccttagcttactcctttgtaatttgtggctaataatcataggaaccccacagggttgttgtaagaactaaatgaaaaatgtgcctggtacatgtattaagcattcagtaaattatagcaattgctattattgcggttgctatttttatttctcagccaagaggctcaagccagggtgaactgaattgtgaagctgcaagcttttcaaatgtgctccttccttattttaaaatcctttttgtttttattctcctgacaaccctgagagcttggacagggtaggggctattatctacaggtggcatttgagataataacatagagagataaagtgatttgcctaatgatctcataactgtgggtgttagagttaaacctagaccccaacattccctagagccagccttgagatttttattaattcctgctctatctacctgcttatctcctgataaccagcaagagatttttcttcatctctgtgtagaagatttctgaaagaggagtattatccaaattaccagcaaaagaaaatcttatcttttcagatatgatagatggctgacatagatcagtagaggtttttargagttctaaraagttaaacatggaagttttattttagggcctggcatcctcacttacccatactgggactcattttacccttaacctctctccagcatggtatttcatcttactgcattcttcttgctttatagtgggctttttccagttctctgcctaacttratgaagaagattatctcaaagttcccaagattgttacttctcatttcaagctaccaggagagactcagcaataaatttttatattggggattcagtttccttgagaaatctttaagtcaataaccaaaccctttaaatttccttaacaatggtgactgtagggctgtgggaggtgttcttttaccttccctctcggcactaaatgtaagctccctgaggacagggactttgtctatcttcctgcaaaattcctcaggggacagtacagtgcctggcacatagtaagtgctccttacatatttgccaaatgaagggatgatgtcccaactccaaaatttgttatattttaattaatttcatatctttgttatcttttgctatatggatagatttttagcttagattctgtttagatgctttttggtttgattctggtttkggcagcttgagaaggctgtagaattttttcgtgttctagttagattttaaatttcctagctcctcagtagagttttctgcctctcccttggcccaagtatttaagtccccaaatttacttgcttttgaagactggattttgaatgtaaataaatgaaaaataattattttgtcttaataataataattaaattatagcactaagtaatttaggaaattttagatataggtagggtattctgttgactgaggtcataggatattcttaaaattggttttttgatctgagatacagcattctattcttgccaggtcatataaaatagaatttgctactattacttgtatttgatttcccctgataggctattcagctaggccagccttctatgactgaaaaaaaatctttaacaaacaaagctgacaaaacaaagtagtaaactagcctgctttgggtttcaaggtgagtctccggtggactctggagcagaaatcctaagtttcttctgactccttggcctgtctgatgccataagagggtgcagggggagatttgctctgcttctcttctgtgtcaaggcagactgagaagcttttaatccactatatttcaaacagttgcaagtaaaaaaaaaaatgtcatgggaatacccagatgtgggcagataataaccctactttttactcccacttattaatccataagaaggaagggggtgagaaatagtctttggacggtcagctatccatgtacagtagttggatgctgagcccttttcaaatgtactcagaataaaagtgaaaccctactacttgttttgcccattagatagcattatctccatggaacgccaattcatatctctttgtgctgtgtgtggttctcacatatgggattttaataacctccatgctgtgctatgaatttataagcagagctgatagaggaaaagcaccacaggactttattttttcattattactcttttgaaaaacagggtctgcctcatttctgtaaggttctcacagtactggcaatgttgcagccagaggtatagttgttactatggaaaggactaagctctttatttatttgctatctatttttttccagactccctttcccactgctgtcctgcctttagccacctccgtaatatccactggcattgtacttgaagcttcagtgaactgattgcaaggaaataggctccatttgttctctagctctgtggtttatcttacattctgaatgttttttctgcccatccttttaaatgtggtcacatttctcctctgtataattctgcaggtccaagtatcttatttagtgcagtggctaagacaacaggctctgtagtcaactagtcatggatgtgcatgctgacattgctctctgatccttgagaaattatttgagttttgtaaattcatctatatgatggtaatgataaaccttcctcctaaggttggtgtggttgttagttggtatggtgtggttgttagttggtatatttccttttttttttttttttttttttttttgagacagagtccccctcagtaacctaggctggagtgcaatgatcttggctcactgcaacctgcattctgtaaaagggactaaaggggaggatttaccctaagcttgattgagtgttcaggaaaatacttctttgagaagctgagctctgggctaggtcctgcatgatgaaaaggtatctgcaaaatgggaggatgagcagaagacaaagaatttcaggaaaaagacagaatagtctcagtcctgaggctgagacaagaacatggcatggttgagaaatgtaaagaaattaagtgtggaggctgaccatgactgagatggccagagtccagggcacctggagccacatgaagagttttgaagtttattcaacatggaacagaagccttgttgatttgggggttaacacaagtagtgaagcagtttcctccaggtttcttctaccaaggaatgccagagagcagtgtcttgctttgtgtgaktagtgttttgattcattacttttatgggttgatatgtcttgtgagaatatgagatgtggattccagagcttaaaatctgcacgtttagtttgaatgctaattaccacaaatatgtttttaattgataactgtgtttcgacatacttcattacgtttgacctttaagatcatttttaactcatcctctttaaaaaagttctctttgaagaaaatataacacacatcaatggcattttaattgtttacctttggaatatttttgtgttggacacaatttatccatcaaataaaaagtgaaaaaagtcatattttgagaaaataacacaaaatagggccaagtgccaaacatcctaatatatttgttttctgcatgatttattattacgccttttttggtaccatttactaagaatatgtatgacttaatttttcataatagccagcaatttaaggcagcaaagtatttgctttcttccactgatctagtaccrcctatcattgtatcatactgacctttaatccagctcttacacacaaagtcagttatctgtatacttatcgttttaatgggttttgatagatttccccatgctcatttagttatataaatgatttattatttatgttggttttatgatagtttttatgggttttgttttgttttggtgaagccattttgtagtctaacaaatatttcttaattgggtatgcatgaattttggctaagttgctccatataaataaatgttttgattacttctaccattgtctacagctgttatcatctttaacctccaagttttcttaattttcaaaaggaatttattgaatttaatctgagccagtaagacgggctttgatgttaagtaatagagattagttgcccctctctgatgtctacrttactgaamarttattaactaccaaactcctgtgacacagtatccttcaaattccaaaacttagctacagtttaccttactaaaatctctgctactggtaatcagccttttagccagtgcagcatatattcagcttttgccagaagatggtttgctcccaagggcttttggctccaaagactaagtgttacttggtggctttggcaggattcagaggagcctggctgctgggaactgacatgctcagagcttgccagccccaaaccattgtgtacctcacagctctcagtgccaggagtttgtgtgccaagaaaacagaaacctgtctagaaaataaactgttttctcttgcacatgtcctctaggaagacaagaagaggttgaacctgtaaattgttttgtggttagaaatgttttaggtttttacatgggaaatataatgctataacttcatatgtaaaacaaaatggcacattatttatgctcctcaaatcattttacctccaattattaaaatgcttatatatatatatgtatttttttttttgagatggagtctcgcactgtcgcccaggctagagtgcagtggcacgatcttggctcactgcacgctccacctcccaggatcacgccattctcctgcctcagcctcccgagtagctgggactacgggcgcccaccaccacgcaaggctaatgtttttgtatttttagtagagatggagtttcaccgtgttagccaggatggtctcgatctcatgacctcgtgatccgcccatcttggcctcccaaagtgctaggattacaggcttgagccacctcgmctggcccaaaatgcttattaatcttttaagtgatcaatatagttgttattatgatgacagtcatttcagctcttgcactgaggcagttcctgtgtgtgaaaagcttctaatgtgagtgtgtgctgtggatgtatggagatcaccccagttgggtggttgtacatgaatgaatgtgggttatgtgggcaggtaatgctggagaagtcagtggaaggtgaattaaccagctaacaaaacatttggataattgaatgttctttagaaacaaatcgtaagccattaggaaagaccttccttccttccttccttccttccttccttccttccttccttccttcctcccacttccctttcaccttccccttccccttcccttcccttcccttccttttcttttcctatagcacataacattggaattgactctactcactttcatccaactatccctacctcttcttcctacttaccctagatttttatttctatttctctaccagttcatattttcctccatctagttttcatcagagaaaattttctgcttcatcaaacacaaaactgagatataaatgtgggagcatatgaaattagagcttgacctacatttagtacaattagtattattctaaggaagtagacagttgtggaaaaatgaaacttggaacacagaaaaggttaaattcatggcgcttatgtagcttattttcattaggcctgttacctaattacttattagaatttctttctatcttttagaccttagtttctcaaccttagcactattgacattttgagtaggataatgcttcgttgtgggtagggggctgtgctgttctttgcaggatctttagcagcttcttggcttccattcactagatgacggtagtatcccccaattgtaacaattgaaaaatgtctccagacattgccaaatgttccctaggggacaaaattgctccctggtgagagctgcttttttttagatccaggtgcttagacaaatgatgatataaatcagtacattaagtagagaaatttttttaaaaatcagtttctaaagactagatttctcaacaacttatcacattatttccaacaacattcaaattcaaaagctgatgcccaatgctagcaaagtatgartagatagaaagtaaacatcttcctttgcattagataagatgcccagcaatggaaatccctggatttaaagaccttgttaagatgtattatgtcagatgaaaagtgctattttaataactcattgttattcttagcatggatcttttattttagaaaaatggataattagcattttggcttatcactttcccttaatgaatacaaataatttgatagacagacaaccaagagagacttcattaaataatgggattaatcagcctgggactggagtaaattagaggttagacttccagcctgagagatggaattcagggtttggtggcaatgtcatccaattcatgaaggatatttttcttgattgacctaatgttgcagtaaaaaaycagagcaagggtcaactggccaaaaataaaagtcaaaactcagcttgggaagttataggctacactgcatttaacttgcaactggataattgcaagaacacattcaaagcgtcactgcaaagcccttgttgtttagccctagctgcttcaatttctagataatggyccattattaatgtggaagtattagaaagttttccagggaawaatatcaacctggaaccattcccctttgcatgcattatacacttcactgccatctggttatccataatatccmcaaacccctaccaattttccaaaaagaactacaaataacgctttgtatttttagaacagtcttcctaacacccagagaggaaatctattgtgaagttaattttctttttcaaatgttttaaagtaaactattctttatttctaagaaacaaaacccaatgctatgtttaagcagtgatttggaactgtcttactgtcactcagagaagacaggttagtggaatctttaaggccgtggctgtcttttgaagcttatagtgtagtctttagaaagtcttcagaaaagatcatgattcttatggaaggttatttctgcggggcagtgggagaacttagatctgagaaatcattctcatcatgagttagaggaatgattttattcacaattcatactcttcattcattatccaacctacatagaagccttagttctgtgtatccttaagctgcatttgacattttacctcctgatatttttctaagtagcatttttctaccaacagactcaggtgaaaaagaaatgaaggtatcaagtatatgatgtgtacacatttagctttattactagcatcttctaagaaaaatagcaaagagctaaaacgaaaacagaatgattctataagtcctgaagggaatccttctgtgatacaatacaagcaatagaaaggccttatttctccctataaaatgtgtgtaattgtgcttttccttatttaatcacatgatttgtctttaataaacctctactggctcccaagaagtgtggatcctggtaacaagagagtctttagtgcgctgaaggagtgatggttgtgaggatacaagagtggagaaatgagaagagataaactactatactttactaagaattggagagaaacaaagagtctagggtatgtggtttggaagaaataaagattcaagaggggagggtcttcttccatatccatagagcatcttaaacaaagtttatattgtccactgatgctctgtggggtggctttccttttgtggagtatgagtagcagtgttgaattttacctcaagttactatgggatagatagggaggctgctcttggataagtaataaatgygttgcagaagttaagaaacagattccagaagtagagaaatctatgcagaagcatatagcyagaaagtagcagagtggtaattgaacacaaatctgatgacagagccaatgcttccttttattctagcatgctgctagaaactggttcttttataatagtcttaaaataccttaagtctttgagatgagatgaaagtgaaatatgatgaaatgttgaagattgtaattgaaattatacaattacatatctctttcatattaaactttcaaagtcctggtactaatagcttgtattttaaattatgtcttcattgtttaatccatattgaaaatttggcttatgcaaaattatatgcctttgacaccaaaaagatatagaaaagatatggccactatatgataaatttcttatcctctctaataagaaataaatatttagtcccaggttttgaggtgttatctatactttttcaagcctaaaactttacacttgaaaattagtgataaatagttattataggtaataggtatgtattgacaagcacttgtttgtttagatatgatactaaatggttatttatttatttttatggtcaggtttctcaataatatatccattcataattcattggcttattaaataggctctatatttcagatatatggctacagataggagccctggtgtgaggcagaggggggctgtgataatgacctttgtttcagcagtgactcaaggacaagattccaaggctcagaattttgcttttattttctctgtatgagtgtttttgtctgtcagtaaacctgttttgtgaaatgaaacaaaaaaaggtttgtttacattttggattgcctttgcattagcattttatggcaattggtctggtttgacttaaagtcctcttttttcatctttaaagtgtgaggttgctacaatattaagtgcttaagatatgccactactgctctatcaaaattatccatgcaggtcataaattcgagttccaaaaaatgtaaaggaggtcatccttttgggcctccttcatgaggccccagcataccagacctaaccagaatggagtcttctcatgctaagtgccatgtaatcaaactgaacttagaaactagccagtttcgaaaacaggagtttcacagcaccaaatccaaaggtgccctgtcaacctgagctcttatacactgttggtagaaatgcaaattagtatagtcattatggaaagagtatggagatttcttcaaaaactatacatagaactgccatatgatccagcaatcctactactgggtagttctcaaaaagaaagcaaatcagtatatcaaaagkatacctgcmtcctatgtttattgcaccacaatgcacaatagcaatgacatggattcaatctaagtgtcatcagtggctgaatggataaagaaaacgttacacacacacacagacacacacgcacacacacacacgcacacacagaggaatattattcagccttaaaaaagaatsagatcctgccatttgcagcatcatgaatggaactgggggtgattctgttaagtgaaataagccaggcatagaatgacaaatagcacatgttcctacccatatgtgggtgctaaaaagtttatgtcatggaagtagagaatagaatgatagttaccagagttttggaagggtgtggggctggggatgaagagaggctggttaatgggtacaaatacaccrttagaaggaataagttctaatgtttgatagcagagtagggtgaatatagttaaaaataaggtattgtattttgcaaaatagctagaagcgaggacatgaaatgttcccaacacatagaaatgaaaaatactcaaggtgatggataccttaaatactaacttggtcattccacattctatgcatgcaacaaaatgtcacatggatcccataactatgcacaaatattatgtattaacaaaaatacttaaaaaagaaaaaaagtcccctctgctttaaccctataaggaaagtaactttgaaatgaccaattgggccaggcatggtgactcatgcctstasttccagcattttggaagaccaaggtgggaggattgcatgagtccaggagttcgagaccagcctgggcaacatggcaaaaccttgtctctacaaaaaatataaaaattatccaggcatggtggcatgcgcctgtagtcccagctacttgggaggctgaggtggaaggatcacttgagcccaggaggtagaggctgcagtgagtcgagatggggccactgcactcctacttgggcaacagagggagackctgtctcaaggaaaataaataaataaatgaccaatccacttcttattccttgtttcttctttctacagcccttttttycccctataaaagcctacctctgtctgcttagctcattggagcacctttctatttagtagatgggatgttgctcagtttatgaatygctaataaaagccaattaggtctttgaaactaaatttgttgaaatttgctttkttgatgccactattgctctttatcaaaatgatcccatagatagtctatagtcttttcttagtgttttctcccaaatctgttgggaagatactaagaaagttccgtaagtctgaaatctggtcctaaaactgtgtccagtaggtaccattgtattcaatatagcattttggtttaatcttgatcttctaaagtctgartatgttctttagtttgtctagtttctgcagtcttgtgtactaaaagggtagtaattttcagttagctaattactatgctttacacagttatarggacgaagcattttagaatggcacttcattaaagcagtaaaaatactgtgggctcagtaatctcatttactgggtcaatagcccataatatctagaagaagatttaaagtagtttaaaaataattattcaaacgagaaagggatttcaaactataattaccatagcagtaaaggaatgaatgactccaaagsaaatataaatattatatttaaatcttaatatctgattgctgtaactcaaagggtttagctcttccaatactaaagatcacaagatcttagacctgaaataaacttcagcaagcagccagtcttggtgtagaaattaaattttttcctgaaaaaccacttgtagttaaatatccagactgacaggctttttgcagctcattcttctataagatgcttttttttttttttttttctgagatggagtttcacacttgttgcccaggctggagtgcaatggcgatctcagcccactgcaacctccgcctccttggttcaagttgttctcctgcctcagcctcccragtaactgggattacaggcacgcaccaccaggcccagctaattgttgcattttttttttagcagagatggggtttcaccattttggccaggctgatctcaaattcctaacctcaggtgatctgcccacctcagcctcccaaagtgctgggattacaggcgtgagccaccatgcccggccaaggtgttcatttttcttagagcatttgcatatctcttactcagttttttcccatgtatttgcattttcgttgctattgcatgttagatttcttctactgtggtctgttttttgtattgttttgttttgttttgtttttgctgatgtrctgttggcgattttctgtatccatgttgtagctggttaccatttttaattctcctattagttctaatagtttttctctggttgctgtgtttgcaaggagaactactgtgtcatctgtaaataatgattttttttcttctctatttcagtattaatacttcccttcacyctgcctctgggtttctgtgattacatggggtagagcttccagaacagtgtaaaataaatattagtggacattcttattttggttccagtcctagtaagaatatgtctagttaagagcttctagattatgttccaaacyattattccaygagatgttaattgatttcctacaaaaaaaaagagagtcttctaaataatttccttgaactctgwattaaccaaaatgagacaaatctctttagtgaatgggcttttataacctttactatttaatatgcattgacaatctcctagagatggagaaagtatgtgacttttcccaatatatttgtcatagaacactgtttttgaagaacatttactaacatcttataaaacgatacatcagtggtatckttctggtattgttctggtagggtactgttaattgtgatgtttggggtttttggtttcaaaatgatgttctttaccgtgttaagaaaatatcctacttttagcttacttagagtgttatataaatcaaatcttttactatatgctttaytctatctggcttttgctgaatataatgttttttatatttactgatgttgtttatttgttttcaatgctggatagtagcccttacacaagtatcataaaaatttgtgtggtttgcaatttgagggagtttaaacaatgctgctctaaatgtttgtgtacatgaaaattggtacacaaaaagaatacatttttataggacatatagcaggaagtagaatttctgggtcatagagcatatatacattcaggtatacagtagaatgctacagttttcaaaagtgttaatgaaaagtttacactcccgtttgttgcctgagacttccagttgcagtgcattttttttaaacactttaacttttaattaacaaaataactcttaatttcaggtaacctggtatatatgcagtaacatctcgtttttaaaattggcattttctggattatgaatgataaggaccttttcttgtgtgtatttgccattggatttcctctttaatcaataattgcatcttatgccaattttttattgttttggctgattttattatctatatataggaatttgttaygtatkttgtatattaacccttcctatgattgtgttctccctctccatagcctgcctttcacttttaatgtcttttgagggatagtataattcattttatcagtcttttcttctactgtgagtgcttttctattttgtttaataaaaatgtttcctacctgatggtatgaaaattttctcctgcactttcatcttaaagcattactctattgtatttctgatacaggttttcaattcacctagaactgaaatttgtgtataagtaagggtctagattcacctttttccatgaggttattcagtgtttttaaaaatgtctcatttcctctgcccagtactctgtttggcactttcatcacaaacacttggggtctttattatgttgcatgggtcaatgtgtctgcccttgtgtccacaccatcttgttcctcttcatcaagggcattagctttcttggycctttgcatctctatraaaatgttaggatcagtttgtagagttccatggaagaaatcttgtggtatttggggattttgattgagattatcttgaacctatagattcatktgaggataatttacctctttacaccattgaattttctattccatgtatatgttatgtctctccaaatatgtagatcctttttaatatttctcaataaaatggtgttattttctccacagaggtcttgcacatcatttattagacttattcctaggtatttaatattttgaggcagtaatgaatggcatcttttcttaaatttttagctatattgaaatacaacatatttggattctgatytgtatctagcaatcctaactctaataaaaactataacaaattatatatgaatttttaataccatgatataatctgtagataattatatttttgtttcttcttcaatcttcaaactttttttattttttcatgacctcagtataatattaaatagcagcggggatagtggaaattattgttttattcctcattttgaagggatagcttccaaaaatttaacattaagtattaagtacaatgtctgctatagaatttttgtttagtaaaaacattttatcagactaaggaagtcccttgttgttttccttaaataacagttttaaattattagtcaacattgaatttcctcaaatccttttgctgcatctgttgagacaatcaaatgattttacttttgagatgatcatttgattttactgttaatattgcaaattacattaatttatttttctccccaactttttttgttgtgaagaattgcaaagagttgtaagtttctgaacaccatttttacttgaaatataacagccaacagacaaactatgaatatttagattttggcatttggaagacattttctcaaaaatgaatgaagtgggcctgtctcttcaggaaaataacaatgattttttagaatataagtgagattggggaccaaaagtttgaaaacttctgtcctcttagaaagtgtaatgttacgctgggcatggtggctcactcctgaaatcccagcactttgggaggctgaggcaggcagatcacctgaggttaggagtttgagaccagcctggccaacatggtgaaacctcatctctagcacaaatacaaaaattagctgggcatggtggtgggcacctacaattccagctactcagctactcgggaggctgaggcaggagaactgcttgaacctgggaggcagaggctgcagtgagctgagatcgcaccactgcactccagcctgggtaacaagagtgaaactctgtctcaaaaaagaaaaaaaaaaaagaatggaagatacttaaaacacttctaattttatacctcctctcaagttgtatgctattttataattttcattataaaatttcctctttgtttttgtatgatgaagctttactataatgtttacatgtggatttattttacttgagagtaattgagccttttgaatcactgaattctcataaattctgaaaaattttcactgacttgcctttatccattttatctcttctctccctctgagatttcaaataaatgtatactagtccttctcattgtattctgagtctcttatcttatttttttaaatctcatgtttcattctgagtacttgcttctatcttctctttcattaattctttctttagctttatctaatttgctgttaaattcatttcttgagttctttatttcatgtattatatttatcaattatcgaatttctaagtaactattttacatatctgctccatcactttttatagttttcatttccctgcaaaatttttcactagactccaatctcattgaacatcgtaaacattgttttagtctatatcctgtaattccgtatgtggagattttatgtgagtatttttgttggttttctttaatggtggtttgtttctttttatatcygaagtttttaattgtgtatggggcattgtgcttaaaactttatttgtaacagtgatttgagacctaggatgatattatcttcctccagaggagatttttctttggttgttctaggtgtctaaagtcaatagaagttcaggaacacacaataaaattttcaaaactgaggttatcagacacaacaaattgacataaaataggttgacagattttataagactggtttattttcagttcagacttaatcttacaataactctaggaatcctagttcaaagtgaatgtttgtttacccttgggctctggattctgatttctattcttctaggcccaacatgcttccagaaacagagctcacctattccttccagaattactaatgcccctggggcaaaagcagattttagtgttagtgagctctagtcttctctaggctggtaatttcctaccatcttgttaagtcttcgatggtttagagatgaatttatatttttttttttgcagctaagttattttccatagaagggcagtctgatatttgaaagttaacattgttgaagtcaaagttctcatgatggtactttttaacaataatgaagttgaatatcttctgtactttgggttttcattttgaaactagaaggcgtacttatagtacagctttcctggagcctatcccatttgcaatcacagacctttaactcaaagtttatgcaagccacattcttctccttattcctaaaataagcctagtcttagaatgtacaatgtaaatatatctctccttgcctccaaggaatgtacataaccccactaagacagtcatgcttccctatcttttccatttactaattttgccaccatttccttccactttcagtgtggaatccagttgctagtgcccatgactatttctcaacttccaactttcagctttcagtacactacgcaccatgatctcctgactagctgctttcttcattcttgcctctgtgttccagaatattatttaggcagaatacataccttacagtagcttcatcacatatctatagtttgtaaattctagctgaaacatcatttgcaatcatttttattctcaactctcttactcaaaatattctttttcaaaagttcatcctattttaaagtctgttaactgtaactcgaagtaccctatctctcatcaattaacacttgcttccttttagaaatataagagaacctagagtgaatctagttgaagtcctttcttataaagtaacctgtttcttctctcattcttgattcattgttcctgtttccaagaaagatgtatttctgcctttccaaagggtaccaatctaactatactcttaaattattgagtcttatcttccatgtattctcactccatcagtggtccttctcttgtatcgtcaatcattccatctttaccaacctcctcctctcaaactataagcccttaaagtatccttcagcccagaaagcaaaamaaaatgaaaaaaaaaatctgtattgagtgaatggcaatgactgttccatttaccactagctttatatgctggcaggaatcccacatgaaaattaagaaaatttattaggtagtatgattttccttacctccaaagaaaattctagccagagaattgataaaacctctaatgctatataattaaaaataactctgtaggaaatagaagttctcatgcttggcactacatgcagacctccagtatactctccatttgctcttcaaaatgtctgacttctagggctgacttcatgtgtaagtgcttcttgtcaatctgttagtatttgaaggataactagaaggatttcctaccccagcatcttccctaaggattcaaatttattgttttgttttcatccctttgatcaaacattatggtctcctctcttattgtttttaattcttctaggagaatgtttctcaaacctaggcatctattggaatcacatgtgggacttaaacaaaattatgtgcaggtgccatcctcagaaattgtctgtcttatttggtcaggggtggactcccgccattgccatttttaaaagttctcctggtcatwgtaatgtatagccagttgaaaactatattcctagttgagtgacatgcaagtacactaataccatayagcaagaatcagttttcttaccttctttttgtgacattcctgtgtggcattttagcagcacgtcctgagatcatcctcctgaaaggagaaaaaaataatcaagaggtaagttggccataaaattatccaagttttactgtgacctaatagtaataataggatatgaattattaccataattcacatccatatgagaaaactctttcttggtttgagaaaacgtgttttttgcctcccagtctggagaaaacatgttgcgttcctctggcacatgtacatgtttatgcagatccattccctagaggaacttccaaataaacggagcatattatatatggcaaccgagaaacatagctttatgttgcctgttgtagaattatttcatgacattaacatttttatgcacccccatattaagttttatgcttagatttaatgtcaccaggtaggaaccaaggtaaatgccacatcccaaatccacatagagtcagagctaaaccatcagttatcaaatctgtctttttatgtgctgtgagatttatacacattgctttagaaagctgcattcactggaagatgctggtttgtggaggggcaaggaagtacatttacaggttagcttggctgaactgtgttgatttctctgcagaacagtcttcacaattctttgctcacagttaaaggtctgctgaaagtgactcagtgtagatgaaaacagcttgcttaatcattcctgaaacacgggaaaaattaaaatacatttttttatcaagcaataaaaacaatgccagattgttaatgcctcttttgtacctttcacttaaaagacctcaaaaagaacatcaaggagaataaaggcaaaatctattccccaatgccgtcattatacatgttgaagcctctaaaactagaactctaaagacattcaggaagagcaggggaataaatgacagcaaactgaagagtgcgtctctggagctttgttcaacctgctttgttcaaattcattcaaattggataatgaaaagcaaagatcttttttgtttcaacattaaagtagtaaattagtgagtggtgagttgctaattgttctgtaaagtatttaaggtgccaggagtgtcccatctccaatttttaaaatggcatccttatggttgaaatgaaaggaaccattagagtagtgtaaaacaatgtttttaataatttatgctggttcaattgaaatgattttcatttagaaatactcattgaagttcttgtttttacttgagataagcaagttttattttagacttcaagatatcaaayagaaattcattttccggatggggctaaagtagaaagatagattagagctatccaatgttgtgtttcaaatctggctgtttctacttgctttgaaggtatagaattagcaggtttggttaaattttacttgaattttgggtgaccttttctaatcctgactgtttcataatttagtgtcttgaccttcgttttccatagagccaccttagtgataaatgcagagatttaataactagaaccagttgacaggtgacctttcgtacatggctgttcctttttgctgtggaaaccactgttttgcaagttttattatttcacaaattttaattatttattctattgtctataagcttattcagagagaaaaaagtaaaggttaaatattacattattcttactgattaaaatgtaaagtgcttggcacttgtcccaatatatcactcagaaaggatagggcaatttgtcaggttcatacccaaagaagagaaagggatggttttcccagggtggttggtaaggatgaaactggcctaggagagtgagcaatcacatcagctaagtgaaggtaacagatgtgtgtgtgtgtgtgtgtatttgtgtgtgtgtgtgtgtggtgtgaattttgaatggaggaacagaagggttcttttactgtatgtgtaccaatttaaagagaaaagtgaccctgagtcaacgagaggtgaaacttgccagtcagggtgaataacctgtcagttttggccatttctctctctccctctctctctcactcactttctctcttacccaggaaagaattggttaagcatatcatggtaaattgatttctggaatctatgtcaataaaatatattgtttacaaacaaggaaataaggctgagtaattataaaaatgctagagacttttagaaagagttaagaatatctacactttccccccaccctacagtatcagagaacataggaccttcacagggaatcaattcctctgtacttacattcttcagtatttttcaraacaattcatttgtatgcctctcaaatactcatgcttataataaaataaaaataaaaacaggcatggtataaaaagacccatcgtgtgaacatagtaccccagtcagccattgtcctggatcctcatagaagagaagagccattcatgagttagagacctcttgacagtcttcaatgaacattgattcccaaggacttgcaaatggccactgtgaatttctaaagtgaatttctgaaggaggcttttgggcagtggggaggtattattccctttagtcctggagaccagtttagaaaataatatcatctgccatggtcttttttgcccgacatggacagtaattatttattgcttgagaatctttcactgctgttgtgaaagaaacagtttgaaaagcaaattgagtaagcagatgtgaaggaccatttaaaagctaataaaattggtcatgattagtttatcttagactgaaatttcagccatatttcaagctgaaaatatcaacaaaaacattttcaataattttttatgtcatgctagcactattgccaaaaaggaatagtggtgaagttattgattacaagcatgtttaaagcattaatctatgatttaattaaaataatttaaatataatagtgagcaagatttgaggtatctgcatatatgtatattaagaatagtgaaaatcagtaataattatttctttgatattccacatttcctaatgctgctgtgagtgcatttcctgaaagttaacatatgctcttctttttaacctgaaaaatatctagtatcctttggacatcatgtttatctcaacttcctcaactcagtaatggaaaatgaattaaggtaacttgaaaaatctgccatgaaaattatgtggaataatgtaataaagtactgagaaatatgactgacctgtaataggcattcaatcatgtgtatatcaaaaattctactacactatacttataggtctctctggtgctgtttcttcccttcctctctctctcaccttctacctgtgccccagccaataatcaagtcattttttcctgtaaggtggcaaaatgtcgagattcattttagcagagaaatgacttgttttacaaagccattccttaggcttctaaaacagcatacgaattgactctagttgatcatgaaactctcccacacagcttagcgctgtgtgctgagattaagttcacactgattagaattttaaaattattttactcttcacagtgccttgcacagaataggtactaaataaaaattatgtggttattcaatagatgtcaccaaattcttaactcctcccaagctgattgttttgaaaccagatgtgctggtatagagttagtatacttttgcagaggaaaaaaatagccaaaacaaatacagtgctgttaccataaaagaaaatcaatattttagaccytaaataaaaggaagtgtttgacatttgtggctttctttaacaaggacatagggacccagacagggttggctgaatatttgtggtgctctcagtttatagacacagctgaagcccagtgaaaatattttgaatgtacaagatgttttcaaagatgctttgagtgcacaagagacaagatgaagaagacaagtttgtttttaatgaaaaaaaaaaagcaaaaaatagagacaattcaactataaagggagaattcaaaatttagatgtggcttgataaagtggaactagataaatcttaacaaagttcttggaaaatccaggacctcagtctagaaagaaagagtaactgcctactgaagcagaactgagtgagtgaagacatatggaataaattttcaagcaaagcccccaaatcaaataatatgaatgagttgaagaaatagcagtacactttaacagagaaagttgagatcaaaagacgtagtaataaagctaataagaaaaactgagataactagataagagcagattttgggtcaaattgtccatttgtgcctaggtatttctttctttttgtcatggcatactgtagtttgaaggtgccttcagatgtataaatgagtcccttgggctttgcaagcaagctttttgtgctacctgaagctcctgattatgattaggaatgttccatttgtctggcccccacactcttgtcatactttaaagatggttcctgcaagtaagtggtaaaatagagmaattatcatgttcatccatgtctcctggtaccttattcaggaaggcagatggctaggcaaaactattacccagaagtatagaccaagaagtacaaacgtctcttaagatgacggccatggtgacagtagggccaagtgaatagtcaaacaaaaaaacaaagtggcaattttatagatcaccatctaccctcaaagccgttgcattcataatactctacccaatgacatatttgtcacataaacaagaggctgttgttcccaatgtttgccctcaagttgttagttagctgctgacctcataatctgcacagctgtggcatcccaatgtgttgtcatgaaacagattgtgatgtcttaattgatcactttcagaggttacaattgtcaagtgagaccagtgtgctggtctcacttaattctatattaagccttgttacagcaaaactggctaattcattataatgactaggaaatccaatgtaatttgctgcattttatagatttgaacatatccaagactttttctttttcttctttttgattgtttaaatttgtggaggctataccccaaccatgcttttattacacaacgaagcaacttcttggaatagcaaatggaatgtaaccccccgcaccatatgcatcttggtgataagttggagtatgccatatgatacacacaatttaaatcaggcattgatttgcatgactgtaagtgaattggaggactcagctaagagtaatggatgtcaggctctgctgcaagccgtctggcaagaagaatattatgttcttctctattgtgtaaaagaaggtaggctcctaagaggttgaggaagggtcttaaatcaatgcgtgaccccaaagggcacttccttgtgcctccattttggtcactggtgaagtcttcactatggcactaacctataaaactctcttttccaagtgtcctaatacactcattcaccttgtatggatctattcccatctggtgcctggaccacctgctactcacattagttgagaaaccttactgtggcaggggtgatgaacagtccctttaataacagagttttaagacaactcataaatgggcctttgtgcattctgcaagtcaagtttttttcaaaagttttatctttgacatttcaaataaacacatgcctttgtcggtctggcacattttataggagtacaaataaaaatgaaatcaaagaaactaatttaagttaatgtaataactgttagcatccaaaatgcaggaggaagaacaagcatgtttatcaaagcacttttttatagtagaaaaaaaacagataatagctaaatgcccagcagtaggcaaatcggtacatatggtatatccctataatggaatcttgtgcaggcataaaactatctctaagggctgacatgggaaaggctgatgatttttgattaatggtttctcattaagtaagaaaccaaggtggccaaagaatataaatggcatttctcaacctgtctaaaataatatctatagaaaggaaaaaaatatgacaaaaatcggtgtagtgttattgagtgatgagaatatggagaattttttaaatcattttgtccattctttttagtttttgagtttsccatattactttactaattagggggaaaaagtttttaaagcagtttgagtagtttcaattcaataggctgtaccttcagaatatttccagaacataagcggcttctctccatctcctttgctactcaacatggtccacatcactatcctctcttgctgggattgtagcagcggcctaatctcctgcttccaccctggcctcttttttttatcaactttccacacagttgccaaagctgttaaaatgtaactcagctcagtcattcctctgtcccgagcccttcaatggcgcttcatctcacgcaaactgaaagaccccaagtgatttctcccctgctatctgtctggcctcagtacctacttggctctccccactggctctgccaggctacattgctcttcctattcctttcctgcctcagggtatttgcattggtttttgcatttgctctgcaggaaagcttttttcctaaatatgctcatggccaactctttcacttcattcaagtctttcctcaaagattattttctcagcaatgtctttttctggttactccaccaactctctctctctcacacactcacacacacacgtgcacacacatacctcttaacctcctttcctgctttaattttctcgatttagtacttagcaaaatttaacatattatatgggatgatagtttatttattgcctttctcctgcacccaacttgaatataagctctatgagaacaggagtttttgtttatagttttcactgctgaattctaacccctggaactgtgcctgacacatcgcaggtgctctatgactgctgtgagtgcctaccattgataggaacaatggtctgttacagttgtatgatgactaactggttgatttttatgcagtatcttacctctcagtgtagttattttaattcaattgctttcacttcctaacttaaccaaytgagcctttaatgtattccagggactgacgggggaatggagttaaaatgaaaaagataggcattgttctgacatagtttactgtctagtggacagacataattaaacaataaagtccaacacaatacataaaacaaggatagtacccagtcgagagaggctactcaccaacaggcacaataaaaattcaagatcgaatgtcagatgcaaaatgtggaatctcatagaagggagatgagaaagatgtatatcaaaaaagcacattgcttctttattactgttttaaaagaaagggtgactatgtgggagagaagcagcaaaagcaatctatttggttgttttaggagaactgaaagcaaggaataacggaaagggcagtgggcttagagttagacgatctagatttgaatctaacactgcagctttatcatctccaagtcctgaaagctgatgcttaacttccacgagtctctattatctccgtggttaaataaaaagggagaaagggacttagactaactatagagactgtctgtgtatataccttcccatctaaaaggaggcctttccttatccatctaggataaacataaacacagacgccaattaatatgatgacttgagggaatctctgaagggtctctgtaatatttctgctagcctgggacttaccttaagtagttactggttctgaaaatctgttttataacctcattgcttgctgaactcttcatatttttatcaattgctcataaccattcatgcatacaggtaaaatacataattgatccctggatatgtttcttttgcatttcctttatagccaccaaccttattacaaagatcaaatcttttcgtattttcttatttcacctgaaattacagttctgaataaaaatatttatcatttagagtggaaaacaaataactattttttgcctataattttaaaccagggcgtggggattatagaaattaaaattattttttgacggtatactttttcttttttaatggaagcatgctgttaacttgataatctgtggcagcgactgtaggtttggtatttgtaggtacttcagagatatttccatatttggtaattatacaatatatgaacttttgttttcccataggaacttgtttgactaagtggaatttactaatttacatgccttctttctctatttttcagcctttgcaactggactgtgacctttgtgccatagtgtcaaactcaggtcagatggttggccagaaggtgggaaatgagatagatcgatcctcctgcatttggagaatgaacaatgcccccaccaaaggttatgaagaagatgtcggccgcatgaccatgattcgagttgtgtcccataccagcgttcctcttttgctaaaaaaccctgattattttttcaaggaagcgaatactactatttatgttatttggggacctttccgcaatatgaggaaagatggcaatggcatcgtttacaacatgttgaaaaagacagttggtatctatccgaatgcccaaatatacgtgaccacagagaagcgcatgagttactgtgatggagtttttaagaaggaaactgggaargacaggtgagccctctctgaagcagctttattgtcttttattatcttttatgctaaatyktcgccaattccttttgcaggatataaaatgaacagttatttrtttacgctgattgttatatgttttgactattatgattacttgataagccagcctgaggtctcatttattccacctatactacctcctgttctttccattctgattggtttgagtctccaagaaacactggatacttccccaaggtatcttttgatctttttttattttgttccatttgctattgattgagttggatttcagctgaaagaggaagcctaaacatttctgtttcaaaacctagtaatggtaaggaactttaggattatgcattaatctaaactcctctgggaattttgccaaaattttacctgagaccacaaacagaacaggctactgattctccaataagattgtgtagcttcttgcatgcaaataggcactgtgatcctgaacatcataacttggtatctaacttgttcagcagaataccatattgaaattatacgtcccttaaaatcattagcagttgaattattttaaagaaatgaggtataaatactattcattcaattatccaaaaaccaatttgcattttttattacatccatgttttttctgtagcattctgtaaactacacttcgcacttttttcccttgaagcctgctttcccctccccttccttctcctatttcctctgtttgctccatttccagctccctcatctcttctgtaactgaattgtgtgccatgttttctttctttttagaaagataactattaaaacagagaaaacaggaattacaaatcagacaatcttagttcttatatctagcgctaataaagaactgttaagggaagatattgaaaccaatagctaaagttttaaattatctgtgaattttgcttatttgtgcaatatcatggataarttgagcatctgctatagttccaatattagcattccaattttttcaaaatgtatgtatttcactattcaatattatcaaatctaagcttttaactatattgagctatgtgctcagggaggtgcagtttctgatatctctggrtgtaatttgaatgctgatgattacttaaaaaccttaggtggatcaactctcctttggtaatgtgggttgatctgaatttaacattttctacttctgagcaccaaaaatacacagcttcatatgaaatacaagacagaaatagccatgaaatactagttcctcggactgtatgagttagcaagaagaatcccaagggtgagatttgaatcaatgtagcataaactgtccaaaatgacaggcagtagagatgaaagggataggtatggtgcttcaaagaaaaatggtcatatgtcacattattctatataaatatgaagcctattcacaaagggctttggaaatttctgatctctccttagcccagagcaatgcaawtaatgaaatgtattttggtttttcattagttagagttagccctcagggtatcacccagacatacctataagccctagagtcatttgcrgggaggtatcagagaagagcttagcatgctgttggttcatgtttttatgtgtttatttcacattgacttttgccgtgagctttgagggagacaacaccatcacatatgtgtaaattgtaaaagaattgggagagaatagctttgggakatcattttcttactggccatgatgaagaaagctgtatcgtaggaaaattactaggtaattttactcacttgataaagttaatttgcaaggtatcattcgattggtagagttaccaaaatgagagttaaagaaacagaaatatggtttcagtttatggtgcattcttatctttttcactgagtctatttctgtctggttgcttcacttagtactccaaccagacaagagaagacaactatgctagtgttttagaaatggacagaatgggtgatttaagtagagcctggttggataataaaatgttgatcaaaatgacctcagaagctgctgttcccaatctatatcctaaccccatctatgttaaagacttttattgtctaagaatttcccatgacaatctgatattcattgtcaaatttcaaactagaatatatttttcaacttttcatgaaggaaaatgtcaaacttatagagacactagtggtgtaatgagcctctgtataaccatcacttagcttgaataattattaattcatgaccagtatggtttcatctatacccctacacactttctctctcaccaaagactatgttgaaacaaatctcagatatcatataattttatttataaatattttggtgtatacctctaaaagataaaaagtcttaaaatcaatacaataccattgccctacataaaaatcaacaattctgccttaatatcattatatatttagtttgcaaatttcccaattgtctcattgatatatttttcatagtttgttttaattaggattagcataaggttyatacatagcaattgattgatatgtgtcttatatttctcctaacctatatagaaacttccctgtctctccttctctcttctatctccctccctgcctgttgttgaaaaaacctaggcattagtcgtacagagttttccacaatctagatttgttaatcacattcccatgatctttctttttctgctacactggtatttatgtattgaggcttggttggattcatgtcttttttttttttttttttttttgccaaaaccattaggtggttcttctctcagaagaaatactctctagttttctctttttttaatgttagatgccattaatgattatttgctagattatataatgtattaggattgcacaatggtgctatttcatcttatcctttttatttattagctgatatattttattaagagtaatttaccctcttattcatttggttaccatgagatagaaaccaatcctgttctcctctttatttaccagttttaatgtattagtttccttgcattctctataggcgtccactattattaatatttacatattgacttacagacttaaacatacttgaagtattttaatttattaaaattatatccttatgctcagattgccctattttggcctatgggaacctcttcaaattggctttgagtccttttgacatgcccttagtagtctttgatagcttctttgtttcctggtattatggaatgtttcaggctttttttgtacatattccgaggcagacctggattcagacatttctgcaaagaacgtcagtttcttttagtagttaagagagcataatattagcaccattgctgctcattgctactggattggtctttgtttcttgggctttacagaggacagaggtagtatgtaaacaatatatactgtgtatattgtttaaagataaaatcgttatgagttcaaaccgaaactttcaattcaaatccagggctatcaggttttaagtttacatcctctatcttatatctgttccttctttttaccatgctgacaatcacaggtctcagagatttcaatgtaattattcatctgctttattccacaacacacacacacacacacacacacacacacacacacataatcttagaataagaataacagcacaacaagcaatataattatggtaaacactttaaggatattttgcatcaaagaaaacatttgaatggcaaacatttatgtggatctgtgctcacaaagtatatgttggtaatagtctccaaaaaagaacatttttctcctaagtaaataggagtgaattaagtggtatacatcactgaagtcatgaggaaatagagaataaggggtgtccatttaattttgctttaactgtaaagctattttgtttgatttgcctgtagttattagaactttttagcaagtagttattttcatcatcaagtttttaacagagagacaatgtcatcattattatgtataatttatagaattaaaaatatgtcactagtagttaaagtgattcatgataggaaaatgattacatggagttcctcaaagaaaactttgcttctcagcttgcttcttaaaattgtaaaaatacttaaaaaaaaatatagcccttccgtttaaggtaggcatcttttcacttttccaagtattgtgggttttgttttttttttttttttttgagacagagtctcactctgtcacccaggctggagtgcagtggcatgatctctgttcactacaacctccgcctcccaggttcaagtgattcctctgcctcagcctcctgagtagctgggactacaggcacgcaccaccatgcctggctaatttttgtatttttagtagagatggggtttcaccatattgaccaggctagtctcgaactcctgaccccgtgagccatcttccttaggctcccaaagtgctgggattacaggcgtgagccaccacgcccggccagcattgtgttttttttcttaaggaattcctcactgaggaaacatgaagcagtagaagaaatatgtatatcatttaaatgtcttagaataagtttaggccaactcacaaacatattggaatacctttttgaagcaaatggaatttaatttgctttctttttagttactgtctaaaattatttggcttgtcaattagacagggtgaccttgtgggaaaggctaagagagcagatagagtaggttgctttccctttctgtctttatcttctggggcccagttgttttttttttctttctttctttttttttttttaattctaggttcattggttagtggtcacttttagattgtcacctaccaatatacttctggaaaacaagtattgtgaattctacagaactttcatttcttccagaaatctttgaaattaaaggttttatattcaaaacaacctggaccaaaataccttttcccctttgaatgattggtatgcataaataatactagcctgctgacatttacacatttgcattaatacatcttaagactgaaatatgatggaaatgctgtagggctgatagtggcacattgtgccacacttaacaatgaagaatgtgatcatgttcctggcacacacatatgcaaaaggaatgttaacttttctagagaagcagttgagagccaatgtgagatattctgctttcctatgggtaggtgggcaattgcagcttggatttcactttagaaatatgcttgcaaatataggcacattatttaattaagtaataattgagaaagcgatagtccccattaaaagagcaaagctaattctgggctgttaaaggactctgagctgccctaaataggtcttaattagctggtgccaatgtggctccaccttcagggatggatgaaattaatgaaagctagcagcaaatagaatcaatatttcaagatgttcctgcctcaggtgaagaggatgaaaagaaagggagtcattttcaaagactgtttaggaamcaatgcacataaatcaatttctaaaaacataaaatgggacactgatttgtgaatacagtatcaagatctctacctggctcatctttgccagcctgttccatccattcccactcaatcttaaggagagaaaaagaaatcagcgatgtgtcattcctcactatctttgggggtgacagttttataagctagcaagggttttaagggcagcccaggttttgctatttcagcttggccattttgaaagtttcttgtgtcattgcgtggtcaagtgtagagatgaaattggctctcatccctcaggtttgcaaacctttagtaatatctagagtggaaaggggtttcaagtcttcttccttgaaaatttgggaatcctcttgtaggtccctctgtcaacacacaaggaagccgccttaacacacacagtgtagcttgaaggtggagggcaaaaaccaaaaccaaaataaaacaactatgctagccatatcttagagtcgccatggggtacagaaatgtgcatagtttgcccgaagaaatgccatacctagattccacaaacaaagatgtcaggttattcctaactcagaataaatacctgctaaccccaggaaaacttcgaccaagagataataggcaaaagacagtattaaaaacagtattttccatttttttttcattttgaagatggtctttgcaaatataagtatctcagcactttttcaggagcaatgctgacaaacctctgttagaatgaattaatatccccatcccagctggtgtatttggcaggaacaaaaagttcatgcagcagtcatgggcagatccataggactccttagtcaaaaagcataatactgcattcagggttgtgttttcacgctaacaagcattatgaaacaggggaacttcctttttaccattatttatgatggcattcagtgacctacattaggcctcctctgtaatacaaatgcgctggaaattaaaaattcaaaaaaaaaaaggaacgatctattttaataatgggaggtagggaagggcatttgtaatttataaagatatcagtacaaacctttcatgtgtttaaaaacaccctcatgtgcacacacacacacacacacacacatatacaaatgcactgggtgaaactctgatgtatttgacaagacaatttaggattaaaacaagagcaacatctcaagttcagtgatcatattttaaagcaaaaagctgtgcaggacatcagtggttgtggaaatcaagacttccaagcagtctactgagtgaaataaagttctctgggccagaggatgacttgacagaaggccagattctcagaaaaaattatactgtatagaaaaaaaatcccagtagacatgtatgctcaacagttctctagatgtagtggcttttaaacccccaaagggtgtgaaactcaaaggcaaaagtaggccttaaatgggaagcttcattaaaatgtatacagacttttaaattttatacaggctttaaagggtttatttatttatgcatcatgggatctatctctgtagttgacttacttctctcttacaattatttctcctctccttagatttttttttgacctatgcctccttcttcaagtttagttcaaaattaagacaagtaaggatagttacattcttgtctttaaaacatatgagccagcagcaatctctgttttttctctattcttggatgcttgactctttttaagacagagttggttgttttgaaaattttcatcctatactacgcccatctgtactactagatgtttaattgcttgggcaaatatttcaaaatacctttcactgtgtctgggatgttataagagctctacagatgtttgccgaattgaatttttgcttctctgtaaacagacttcttattagatatggtattactgacctacatggactcctctagttagctctttttctttctttcttttgttcttgtttgttctttctttctttcttttttttttttttgtttgtttgtttcaaggagtggaaagtttaataggcaagaaagaaggaaaaagctccccgtgcagagacagagggaggggtgctccgagcggagagagaaaaaccccatagctccttttcttagtgaagagtaggtcctctagatcagtacagtgcttttcaaactttaatgtacatcaagccacctgctgacccaaatgatttgaggcagggcctgagaattttcatttttaacaagtttccaggcccggccatcctgttcatctgcagatggcactttgaattatgctattaacaaagtaaaagacattcattttttcttgaaccaaataaatacacaagtcaagaatatctgtttcccaaatagctttgtaatctgcttgtagttggatcctaactttgtgatcctgccctattccttagcaaattaataatggggctcagagaagtccttaagaattcaactggagacttgtgtatctgaattgtgtttatgtgttcatttctttsattgaacaacaacacatgtcctaaggacagggactacacccatctccattttattctcagatctagcatagcggtggttagccataaaatacagtaccaaaagaatgtattattttcactctctgtctttcagttaaaggggccatggatgtttcaagtgtccttaaattgacctcagcagtaactccttttctttgttctattattatcactaccactgctctagtttaggccttctttacctcacacatacgtgactgcttatctagtcctacctctatgttttggcagagatagttccctctgcctaaattgcacttccccctgtcaccatgcacacacatgcaggccatactttatgaacaagtcaaatgttaccttttcatgaagcctcttgtaatatccctacagaattcctacttcccctgaaaatcgtagggttatggacttccttgttatagaaataataactttctaccatgcgttattgttatttatgtttaatctcttcaagtggtccataaactatttgagggaataccagccttgtttctccaagcaccttgacataatgcttgactttaataggtattcagtaaagatttaatgggtgaatgaataaataaatggacgagtaaaagaagaaataacacttaatatcttttttaagcttaaaagtccctttgccattgttgaaataccagtgaatttcaaaatactttttttcaacaagaagggtcacagcaatgccaaagaggcaagttctaggattggattttgatagaaaagtttccacagttctatttagagagaccacgtcttactttactttacccaaaggctggcaaatctattaccttctctagggattttgtgattgggcactgggtttttaataagtaactggcagagccattcctcaaatacaggtttccattttagtttcacttcagttgtgaagcaaattccaaggcttcactcacaattctgttagctgtcagttgcctggtgagaaagcaaatcctagtacccaaagtcaaagttatactcttgggcttcaggaggcaaatataagcaccaccacagaagtcagaaaacaaaatacccaagtaaaggagaactgaaaactctcataaaacaacctgagcttctctaccaaactttaaattgccctccagaaaatattttcttctttggtaamaaagaaaataaattgccttactttttaaatgccttcatgatgaacataaagaaaagaaaaaattggtagttgtgtctttcaaccaactgcataaatgaagaataaatttgtatatagactaagaggaaaattaatgaaagcatttctggcatattcagatcatgtcactctcctgctcaaaatcctgcaatagtcctccattttccttagaataaaaacacgtgtttacagtgacttccaatcacttctgatgagtctaccatgatagcatttaaaattgaaatccttacctcacatacccagcattcccaattttccttaccttgttctattttatttttttctcttatagcattaccttctaacattctatataatatacttatttattttaatttttagtgttttctatgtatttctcctactgggatatgagttctctaaggccaaggatcattgttttgttcactaatatatctcaagcacctagaagaatatatgttgtgtagtagacactcaatatttgctaaataaatgacctagaggtggaaaaacaattgaataaaggattcaggcaaacttgcaaaaagttatcatgggggtctttaatcgcttaaagaaaaaaatgcatccactcagaaacagtgcaattaagttacaagtttaaggctgttttttctgctgttgttttacaaaaaggtgctagtattgaagctgtcttatccaagagatcatcattgcactcaaggaactggtctgactgatttttattcttcaacacatggaccagttgtttaaacagaattgatttctgatttctttggtatccaggggaaacagcaaaaatgtctcattcttatttggattagtagaacagcggttctcaaacgtgagcttgcatcagaattacaaggggtgctgattaaaacacagattgctgggctcattcctggactttctgggttggtatgcttggattgaggcccaagagtttgcatttctaacagaattccaggcaatgttgctgctggtcctgggatcacacttcaagaactaccgtgataaagaattctaagatatcaagtcacattcaattattttgaacatttggtcctataatctttattctattggcatattgttgcacgaacatctagcactatttttgttatgatatttttcacggcgaggagttttttaacctcctgtgaaagtcctactgcaactctgtcattttattcttcactttcttaagatcttgctcctctgtaattataccagatggtgctgctcagtagcttataagggagtgatgcttcatcattctagacagagagacaaatcactctgttctctgacttttgaatcaagaatcaacatttgtgtgtmtgttcaacctgctatttgctttgcaattttgctcattaggtatttattaccctgacagtgtatgagttagtcattttccttctgccgtgtagttcagattagcactgtttgacaactgccatcatcacagcattacctccaataatatgtaatttcttttttgcctatgttatctgggtgaggtagttatctaggaagtatatctacaaacggaagatcacaaacagcattcagttctctgacttatcatgttagaaatggataactagggccatttccttggagtttctagccctgcgattggcattgctgaaaagaaaggaatattatgaccaaagccaagcgttctttttcatttattgtatgctttttttatgaagaaggtggtatgagggaagcatacaatttaatgagaagcattgaaaaagaacagaaacatttattaagctctactggcaaaatggataggcaaccctttacagaaacatggaaaccatgcagagcagagaactggttaaaatttagaatgtggaaaacagtcttatctgagatattcaacaattggagcaaaaacatattttctttttctttataatcttcactaaaaggagaactaaagttattactagataactcatgcaaaggcactattacaggcatgtaataacattcttctgacgtgaataggttgtttattctctcctaaaatacttctctacacagttttaatattaaacttatgaaattttcttgaacttttgttgattggagggtagtagagagagaaggggatatagttgggagcttttgggaaggattgtcaatctatcttaattcttctagttgatagtagatttttgaccattaaatctttactaacaaaggtgttaatatcctcgtaatgaaatgagtgtcctacactacatcagctgtatcattgtggaggtacaaaagctccgaaggtaaatgcaaaacaaagaatggttgctattccaaggtgactttttcatgacatgttctatatttctgatatgtcttctagtcttaacctgtgagttcatagcaaacacagttggttttatttaggagtgcattaaattttattccattgagcaaatttcacttttgcttcatagtgattgtaattaatttgctctttatcttctctttatctttacttcactcattactcatctgacagctcgccatcccatcttaattgggagagaagacccttccaaaagtgaaccattggcagttctgtcatctggaaagagatacataaaatgtgttaagaaacagaaatgactatataactggttcatcatatttccttagcaggtggattcttggtgggcaaagatcatgttcctggtgcttttgctgccaagcacattgtgggtgttcaataaatattaaataataagaagagtttcctaattaagatgaacatttttctctattaagcagatggtgctcaataggagtaacccattatttataagtatgacacaaggtgctggcaattgttgaggaaatgtggctctcacttcagatgctgattatatgttaaagcaaacttttgtgacaaacagcttggtcgatattagttaatgtttgtgattaaaactgttactaaagatggacttgtgtatgtaggtctgtaattctgctgttttgattcttaatattggcttcacctattcaagtatttctggctatttgatgcaaggcaagtttgggcaaatcagtgtatacctgattttaccccataggttcaccatttgatttgaattctcatccttgtctgatttctaaagagatttttgttttgagtcctttgagtctctttgtggttgctaaagctagatgtgaacacctccgtgatatttgcaatgcttatattcgtagctgaaatctcagtggaactaaggagagttaattaggcattcccaaaaatacacatcgttttatgattttgcagatcaccccgatgaaaataasagtttaattttgtcaagtcatgtaaattatagtgagagggatgatgagagttctcagctctttggagaagttaattttgttgtcagcacatccacatttcaaaaatcacaaactagaggcagaacttttcagtgccagtgagatttggtgatcagatactgttttcatttctaatgtctgccttctgtatagcgcctatgcaaataggggctttcaaggatgcaaaagtagcaacttcccctattaggagcrtaactagcagctgctgtgtttctcataaaagagaaaacatcctgtttactaacatacaaccatacgccctcacccgcgtacactcacaccaagctctttttttaaggcagagcttttattttggtttgagataggcagcacagaaatgcagtcttttacaaacattccttgagcacatatcccctgggtgctaagtaggtgtcagtcattgttctagatgtggggaatccactgatacttgaaacacattctctaattttactgggaactcgtcggaacttctgacattcgttggcaagttctttgcatctggtctcacctccttatttttaatatttataaaccatgttcatcaggatgtcagtagagaagaaatgaaagtagctgagaaaccttgccgagagagaccaaatctcaaagtgaactaaaaatgtcttgaccacaaggatagaaagtgaactaagatatgttcttgaggcagcaaaaataagtattgtgccaaaatccaggctttacctcagtgtcagataatcaatggactagagatttcactgtgttgcccacagccctgttaagaaatcaagaccatgtgctttgtctataatcctggagtcagcccagaagatgagctcataaatatgttagcttaagtaaagtttatgataatatagacgatgaatcatcttcctgttttgaaaagcatatattctataactcaggatttctggagtccctccagaaatctacatgacttttgccccattttctttaggtcttgattcaaatgtcgccttatcagagagcccttttttgacaacactctcccacccccaactctcccttttctgcttttcaaactctattttcctttatgttacttgttatggcctgatatgtgtttgctattttctgtcttcccttattagactgtaagcaccatgagggcataacttgttgtttacctctctgccccctcaaatagcatctgacacacataggtgacactacccagttgttgagtgggtaacatgaggttgtttgggattgttagttcattatcctaggcctacacagggtcagcatcaccaatatcgctgtcttccaccttcacatcttgtctcactggaagatcttcagagacaacaacatgcatggagctgtcatctcctatgatagcaatgccttcttgtggaatactgcctgaaagacctgcctgcagctgttttacagatatatatatatatatctgtacatatatatatatatagggagagagagaaagagagagagagaatgccctctaaaataatgatgaaaaataaagtaaatacataagcctagtaacatagttgtttattatcattatcaagtattatatactgtacataattgtatgtgttatacttttatatggctggacatgcagtagtttacctaaaccagcatcaccacaaacacatgagtaatgcgttgtactatgatgctatgacagttacgacatcagttggctataggaatttttcagctccgtttataatcctatgagaccatggtcatatatgcggctcatctctgactgaaatgtcactgtgtggcacatgattgtttaactttcatgagagattctgataaccaggggaacattgaggtgatataatttaatccaaaaaagtagatgtttcaaataagattttgtattgggtaaataaatgattactgtttggctttttggaatttcatgcatagctcaagaatctctgttgccaacttcatggtctccttagtggtacagagatctcagcaaagaaactcagaagtgagcacaacacacttatttaatgggtaaggaaacctaagaccagggcaaatctagtgactttctcaagtcccacctcttgtagtgaaacttcattcatggggtcttatgaatcctaggctagtgtcatgtttactggctcacaaggactgccaccattgaattgagcaccaggttgagtatttctcaaatgtgctctggggaccatctgcttcagaatcttctggagggttctgctagaaacatagcctctcagccctgtggattcagaacctctgggaatggctctgcatttaaacagttccccaagtgtgtcttacacattcctatgcctggagaaccagtgacccaatatgtgcaaggattcttgattctcctccatggaaaaataaaaaaattaatcgtatctccaaactatatgagtacatatctatcgagaacctggaccaacagtttttcttggggagggacactggtccatattaaaattaggttagttttaccatcaagttggataatatgagctactttgaacttttgggcttaaatctatctagttcattaatttctgccacaaaatttttaagtgcacattgccaggaattcagagataactgagacaaccccattgcagttgggggagacagatatagtttcacagggctacagaaaagccccgaagggcctgtcttgtctccatgtgagacctcagaaccatgtaatgcaaccaaccttagttgcatagtaagtaaccaaccaggtgtgtatagtaagctgcattcctaaatgtctttctatagttctggacatctctctaagtccaccaaatagtctcagtcttcacacaaagaatagtgaggagatctgtttattctcagagttagtggacaaaagcaaatattctattagatgttattagtattattattgttattattttcaggacctacatccagccccttgttgccataatcgctatccaatcacactgcccttttcctttgttataataaatttctcccactcttcatcatctttgaggatgaatcatacggttcatcagcatcttacttcctgacatacaaccctgaaattgaacaattcaaaaaatttcccagaaatgactttgtgggattttaatctaattctctgaatggtgaaaactctttaagacatttttcaaaggccaggtttttaaatatttcataccatggaaactgtcttaggaaagagttggggacttaaggtcacaaaaaatgagaaaaattatacttgagaaaaccttgtaaactagaacttcttgtaagaatattaatatgttatttttatccatcttaaaatttcctcaggcgtgtgctgaatgagcctacttcatggttgtagttttgttgttctttccacgttattttgcagttctccctgtggccatcatattgattttaacactgtggtcatcattataggaaaatggaggcattaataacttggtctctgtggacagattgtaatagaaaaccttataaataattgcccactaatgggaaaattgaaaatatgcactgtattataatggtcataatgtaatcattaaaattataattatgtgacaatgaaagaactcattatgcattagtttatctttacataatgctaatagctaatgaaagtgtgacaattagatctaattaagtttaacaacatttctgcacttctcgtaaacaggctatgttttgccagaaattgtatatgcggagacattagtgataccgaggtccatctcatataatatgagttttgaaatgtaaccatcagtcctatgaagaaccttaactttataatgcctttttgttaaatgaactggaagtatgagtctttactaagggtagctttataaaaaagtttctcagattgtgtcatgttttagttaaaaataacaattagtccttcctcttctactaatctgtgcttatatatttgtgtgtgtgtatgtgtatgtatgtacttgactcatctgtgttttgtttttaacaatagaattgttatactgaattctcaagttagaggtttgattgattgatgataatgaatcaagtagatgttggtttcttgtcatagattatagcatataacagtccaccatgtcctatctgtatgatctaggtcaagtgtaaactctctgtgcttcagttttctcatgtataaagtagtgtctatacttttgttagaattaaactagaaatttataaatttcttagcctgggcatagcacatggtgctagtatttactattattagtaggaattattttatatctatatcataatatcaagaagaattccagctagtatcacttttcctccactgacattttattgcattgcacatttagataatcatccagacttttatttttccatcatttagaaaaatcattacatacatcatattgaaaacagtatagggaccttcaatatgtgctcaacatattcttcagagtggagttttaagactcttgagcactggaagacattggccttgtcaccagggtttccaactgctcaggtttcacttacagaatgatagactgtgagctcaactatgaatgactcttggccgctctcatcagtcttggatcatcaggaagcctcagaaaacagagactgttcaagtaaatacaggtagaaattggcaaactcagtcacttgctaccatgcttccaaaaagccatgatactggtctttacttttctaccattccttttattgatatatgttcagtacaaatgaaacattctctccccaagaggactcattcacttccataagtcaaccatcactgctacgtcttgtctccatctctgctatcacttctaaacattggtctctaaaactaggttggcctttaggcattttctgtgtgaaattcaatctgtttaaatttgacttatctttcctaacsaaaatgtaattgagttaccaagtccacagtcacttacttcaaaatattctttgattatatgctttgtttctatctcgaggctctcattgtctcaggtctagactatgaaaatagtctccatctattctcactgctttccatcttttgcccttcaatctgcattttatacttccaccagattaatcttcctaaatcacttttacatttcattcacctacccacaaaactctgatggttcttcattgcctttagtttcttttatctggcattcttgtccctcaaagaattttgtccagcaatttttctaagtttgttgccaactagtccctacagttgttctctggcccaaccacatgggtctgctcgttatctccagatacacattctaagctttgcatctttgctgaccctgtttctcagctgaaatgctgttccttttctactcttgtcaaataaatcatttaaggcatagctcaagagttgactttttccatgcagctctctctaacagccccatttatccctccctcctacgaattcctcaagcatttatttttctcgccctgtatcttgcacttgtacaggctagtttggctgcttcttatcttttatgtacagttccagctggccaatgggattggcaatattggaagcccctcaaggctgttttttcatctctctgtgcagagttctcagtgtatattaggtccttaacaaatatttttttatgagagtgtcaatttcgtaagcacttgaagatagtactaaaaagccttcttgccacttggttctgcctggagctgatttcatacttacaaagtaatgatttctgagccttctgcttatagaaatcgtgtaaagcctcttggtagaatgaagcatgatgccctctaccctgaactcaaagacctttttgggaaagtattattttagctgagagtttaagggagaggacagacagattcctgtgatgcagagatcagcatcacagccctggcagccccctcctcttgctgagaacagctgtttcaaatgcccattttagaagggcccttaactttccttagggctgctaagagcaagttctggatcacctgtagctgctgctgcttagataaccccagaaacaaaagcaggtgaacactgggtatgcttgcctcaactttgccactaactagttaagcttgggaagccagctcacttccaacagtctcaaatgctttatctcctctgccctaaagtgggtgaagagctccagaattaaaatttgataatttttattttatttttaaatcaaaggtagctgaaagttgaattttgattaaaaaaataaaattcaagacaaatccacctgaattttgtagctcttcatttcatagatgtaaatctatcacaaattatcattctgtctttctttctgtctctcagttcctctccctttctgtctctctcatacacatgcacacatatacacaaaatattccataaaatcagtttttaccagaaatctctttcatgctggttctcctctatgtagaaagagctacaaatgaaatggaacatgggaatagaacaagaagctgattctcttttaaattgccttatttgttttttctttgggaagtccgaatttttgaagacttaatacaaccctgccccaatataaactgtctctcgcattattaacatcccccccgcccagagtggtacatttgttacaactgatgaacctgcagtgacacatcattatcccccagagtccacagcttacattaggcatcactcttggcattgtacatacattctatgggtttatacaaatgtataaggacatgtatccaccattataatacagaatagtttcactgtcctaaaagtcttctctgctctgtctattcatccctctctctcccctaacccctaacaaccaataatctttttactttctaattgttttgccttttctagaatgtcatatacttggaatcatacagtatgaatccttttcagactagattctgttacttagtaatattacactcctttaaatttcttacttattacacccatttaaagttcttccatgacatttcatggcttgatagctcatttgtttttagtgctgaataatattccattgtccgaattgtaccacagtttatttatccatttatctactgaaggacatcttggttgtttccaagttttgtcaattatggatagagttgctataaatatctgtgtgcaggtttttgtgtgcatgtaaattttcaacttgtttgggcaaaaaaaatgttttatgttatacgctgaaaaatgctggctgaaatatgtagctaagttgcctttattgcctttttttttttttttttttttttttttgagacagaatctcactctgttgcccaggctggaatgcagtggcacaaacatggctcgctgaagccttgacctcctgggctcaagtgatcctccctccgtagccatccaaatagctggaaatacaggcgtgtgccaccatgcctggctaatttttaaattttttttgtaaagacagagtcactccatgttgcctaggctggttttgaacttctgggcttaagtgaccctcccaccttgacatcccagagtgctgggattacaggcgtaagccaccatgcccagcctacttttgtattctcttataatgttgagtgacttaccttttgggagttatagatattagatacaacttgaagtctttttccttcatttgtaccatcaaaagatgttttcggtgttcaatgaaaattgtttcaaaaggaatttggcagtccccaggcttctacaggcggttttgaggatgaaatgtgggggcatctccattctcattatgttggtttctccttgtgacaaaaaccttttgccaccccgcctgcttcccctcttgtgctctgtcttttctctcctctttctttctgctacctgctcactctgttttctctgtatctctttgttctttctcagagctcttgcctctgacacactttttagtgccatcgttttttgagacagcctgatttgatcactgtcttttctctctccctttgaaagctttctctgttctgtgtatttcctagattactggtgatacttgtcattctggttagattttgttcctgttttgatttcatttttccataagatttttgtttggttgattttttttaaccttaagaaaaaaagagatttttttacttgcattccacttttctttctgttctgctctgtaacgtgagtgtgcaatatgctctaaagtccaaaaggatagttaacacagtgggtggtggggctatgcataatttctgccatctttcttatagcattctgttttctgaaattgtttcatggtgcatatgtacacataataagaaagaaaaagcaatgaaacgatttctattttgacaaggaaaaaaatcttaatgagagcctggctttgggtcttgcctctagctctccatgaaacctttttcttatctgtcttcaccaccaagcataaccacaatggctggctgagctggagatggacagcagtctgtggggattgtgtaagtgatccaatggttagctggaacctaccaaactgcaagtcatgggtcacttctgttgattccccaaggctaggctcttactgtcaattgttactaaayggaaaaaaatgcagagaaatagcactgactgccttatgaaatctagtaccctttgttcaatatgacaattagttttgaaagctgctgatgatagcagacaggggtgacatgtgataatgcttattcattatggtagcatcacactgtgattgcagcgtttactttttatctatttattcattcatttatttattttagcattcttattgattgctcttactgattactgcatgctcatttaagttgcatgacaaatgctgttatttgctcactcctcacagaaggcttcgaaaagcaaaccatggcaggtcacccagaaaccaaggtggcagggcactgaataaaatgcagccccccagattttcttccaagtggtgtaatcgtaaacatgggttagctcctttctaaggtggcaggaatcaaagacagaggtaataaactttggccagagaggaggcctgtttttacatgcttgtaaagttgtttttacatgcttgtacaatggagtgtttaaattcacagtccattgtgaacataggcatggtatttcatgactataaactgtcatgttttaagcactttggtctgtcaggctaactaaatataagcccctgtcctaaagaatcaagctcacatagtatgacaaatcagcattttatttatttgtgctaaaagcatttattgaacagctgtgtactaaaaatcctgcaacaagaagtaacattgaaatttccttaaagagcttcttctactgaggaatgtagacatattaacaaataaatacaaagtaggattataaaaaagtattttagaagaggtagctatttacaggatagagtaaagggagaggttaaagttaaaaagttaaattaaactattttttattgtcatatgaacaaaagtatcttcatgttaaattaaatacaattagctgatatttgtatgcatctgcttttyatgagctgtcactagaagatgactttttactgcctttttttttctctgttttttttttttttttttttttttgagacagggtttcactctgtcacccaggctggaatgcagtggcaagatcttggctcactgcaacctctgcctcccagattcaagcaattctcctgcctcagcctcttgagtagctgggactacaggcatgcatcacgaggcccagttaatttttgtatttttagcagagacggggtttcaccatgttggccaggctgatctcaaactcttgacctcaggtgatccacccaccttggcctcccaaagtgctgggattatatgcctgagccaccgtgcctggccaccattttatattttgataattcatatttagtactctcagtcacttagttactcaacatctgagtttctttatctataaaattgacttaaacgtctatgtattcaatattcaaaaagtatattggttaggaatattttaaaatatacaacaaagaggtgactatggaatctaaaatcaatttgagaatacatataaagttaaaggtattataattcttattagcttatatgtggggaaaacaaatgattaaatatatgcatgttatgaaagaaaaatttatgaagtaaatatgtagaagctgcaaatggtgagaataatccagtgtctcctttttgagaaataaggaatattctttttcatttgctagagcaaaggttaaagaaagttttaaagacttgatattcctgtatttggatagatcatagataatcattgtcctgaatgctgagtaaacaattgaatacatctaaaaatgtgacatgcattatgctgagaccctggtagtactctctctgaataatgttatttgggcagagctaaaatgacttaactgtaattcccctaaaattaatgtttcttttttctttctgaaaaagtagttttcataggatttagacaatatttcagcataacttcaaaataataataaatttgatgtgttcatggttgcattggtaattagtttcagctgataaatatctgtggctcatagagaatagcaaycaacaacagacctatccccttatgcttcaatcttttctttttttatttttttttttaatgttttatttccataggttattggggaacaggtggtatttggtgacatgagcaagttctttggtggtgatctgtgagcttttggtgcacccatcacccaaacagtacacactgcacccaatttgtagtcttttatccctcactcccttcccaccctttcccccagagttgcttcacccttttctaaaactctttaatatggagtaaaagccaaaatcactttttttcatttttaaaacacctttgaataaaatttgtaatccaatctcttttgtattaaagcattcgaatgcaaaaagtgtaaattttgtctgtgtgtgtcagtttgcaatttcctaaactcacttaagctcaaattgctaataattaaatgagactragttcgaagatagattaaaggacagctgactgaggatggcagtaattcctaaaggacccaaaagttcatcagaatatcacatttaggaaactgctggtcattaaggtgttaggttgtgaatttgagcctcaatggatgctgctttcttttagaatgaattaccaggtggttattgaggtatactgagtcaggattttttaatttaatgagtgctgtgtaacacttaagaaatcaaggccaacatttttattttttacctgtttgtggtgcatcagccattatttaatacattaaacattggaaataagatcttaaccaaaaatacagattttaaccaaaaacataaatgttggggctttttaaagcatttaatgaatccttagttttgtaccaggtaccgtgccaattatttttcttacattatatcatttaattcttacaataatttttccttcatgaggaaaaatatcctccctccccttacaaggaattgagacatagtgatgctgtcttgaatgctgggtaaataactgaataaagtcacattaagtagagtccaaacttagcttcatttaggataatattcaacacatttggggaatttttttaagttgttcccattttgaaaactgacataactataatgtcatcatcatttttaggaaatgaaccttggcatatcctaggaattttgttttcaatctccaatccaggtggcattctggaaagtggactgttactctgaccagacattcagcctgggtgagctttgctgtacactcagctgacctacttgtttaagggtttttaaaactcctgtgttgacaatagtaagcgtgactcccctctgtgtacctgtgatcaactgaatgtacaatattacaaaataagggcttcttcttggtttctttatgttttttccttaagtcttcacatccttaaaggaaatgtattttataaaattaagtctgaacgagaaagcaaagccccatctaacagaagagatcgtgtccttggaagatgatttcttcatctcagctttctcaggtctctcgagatatttattcatagccctcctatggaaacacagggttctcaatgtgagcagctctgttaggtttcatgtcattgcctctcagcagccctgttcagtaagattttcagtgtctgattgttcttataatcaaatgtgcttttccgatttccaaggtaaatttgctttctaataaatgtaacattcgttggtgcccaatgaagtcttttttttttaacttgtcaaattacttagtacagaaaaatagctataattcttttctttcttttttttttctcttttttttttttgagacggagtctcgctctgtcatcaggctggagtgcagtgacatgatctcggctcactgcaacctctgcctcccgagttcaagctattctcctgcctcagcctcctgagtagctgggactacaggcacgcaccactacgcccagctaatttttttatttttagtagagtgggtttcaccatgttggccaggacggtctcgatctcttgacctcatgatccacccgcctcagcctcccaaagttctgagattataggcgtgaaccaccgtgcctggccaaaatagctataattctacattaataataatattaatcattttgtttcatttggaacttttttcaattttgcattttctcaatttcttaaggtcgattctaagaatttacttggtaaatcacaggttctcaataagtattttgaaaattaacgtcaaaataaaaagaactgaacactccaggtatagagaagggttcatttaaacttattttctctaagatgatcgatcttctacattttttaaatgaaatgagatgctataaaacaacatattctgactttttttttttttcagtgagacagagtctcgctgtgtcacccaggctggagtgcagtggcgcgatctcggctcactgcaagctccacctcccgggttcgcgccattctcctgcctcagcctcctgagtagctgggactacaggcgcccgccaccgtgcccggctaattttttgtatttttagtagagacggggtttcaccgtggtctcgatctcctgaccttgtgatccacccgcctcggcctcccaaagtgctgggattacaggcgtgagccaccccgcctggcccatattctgactttttaatagattacttaattatatttaattcctagaaacctcttcaacatccttgtatgagattcacatctgtaggttctgcctttcttatataaggtaggataaaatctttttattctttctcttccattcttctctttttatatcttttggcaccttgtgctctaatataagaacactttaagcttctcttcttgcctttatgctcctgaatacgttttcttctacctataattccagttcccatctcacctcctcagtacctctcctctgasccaaatctggtgtttccttgatgctcagaaatggcacctcctccacaaaccctccctgctatgcccatgtctaggcagaatatttccttctttcctcagggctgttacctttctggagtactggacaggatagttattaaaacaaatggttttttagtcaaatggttatttgacctcctgaccagctagaatgtgagctttctgaagagcaaggggcagttttattctttttgtgtctgcaacactatgctcaataaatattaatttggaagtgagaaaagtgatgttatgatgagttaaagttttcatggttcactttttcttctttgaaataaggactcaattgttcattgctgcatacctttcttgaagcctgaagtagatgttgagatgctgtctttgaaaatgtctgaagatttttccatgataatgtggagactctctacctaaactgttgtccaggataagtgatctccaagggagggcatgaaatggcacatatcactggtttccctgtgacagctgcaggaggaacaccctggagtaatggtgcagtggagagtctttgccaaagagttactgtcaaaactgaactaagctgttccaagaggctcttaactctccctaatacgtatggcttaaaataaaacgtggtgtatacaaatgaaaaaaggaagtttgtttaaaaaggtycggggctttgaaaagctatgctttatgttttcaatttaggagtgtataaggcctttggttattgctgcaggttgaagaatgtgctttaacaaaagtataccagctcagaaaccatttctgtcctctcatctacccactttcctttccattcaggtgccactcaacccattttggcaaccaactaaagatacaatagcatacaccctgttaggaaaatctgtagaaaatgtagctacagttttttttatttgggttcatgcagttagtaaacactagttaagcacagactaaatgtaaggtacagtgctgggcagtgaggactgaagggcaaatgagataaggagcttgtcacacaccagactgaacaagtagcaaatacaagagtctacagtagaaaagatggcagaattagttctgactgatcagaagcagcttccacttaccatcagtgtcactttgtacacattaacctctatgtgcctcacttttctctttcataagtagagatgataatactacctcataggattgtagtaaagattaaattagtttatatgttgttataaacgtgtttacgtatgttacatgtagtaaagattaaattattttctatgttcaaacagaccctgacatctagcatgtgcacaagagaatataattatatttcgttttacaaaagatattgtggactttttacaaggcaaatggcaaagagcttcctaggcagaggccaataacctgagtaaagagacgaagcatggaagtatgaagtgtgctgaaggagttcagtgttgctaaaaatttctttaatggaaaagagtggagagatgtcctggaaatagacttaggtgccagatcagaaagggcatatgtgtcagatcaagaatttgtgaccctaatgtttacattttcgaaaagtaagccttgtggcaaaaaatggagttttgtgaaagaatgtagccatggagctcagtgactaactgcttattataacagcccaagttggagatgatggggccagaatggggacatgctgtccatgtcgatgacaacatgaactaggatttgaaagcagagattatgccaagggcaaaatatccactgcaggtgtatcctttcccttttctagaaaatagaactgtattttgtagaatctttttgttcttcatcaaactctgtttttagacttttaccttcaaaccacccaagaacattagagcctcataaactataaatgattaattttatgactcactatttaaagcaaatggaaattttaaacttgtttttatcatgagagtccctgtctggcaataattgggcaaagaaggcaagataaaaaacggatttttcttcaggatctgctaagtagaaacaacaacatagaggctgggcgcagtgactcatgcctgtaatcccagcattttgggaggccaaggtgtgtggatcacctgaggtcaggagttcgagaccagcctggccaacatggcaaaacccagtctctactaaaaatacaaaaattagctgggcatggtggggtgtgcctgtagtcccaaccacttgggaggctgaagcaggagaatcacttgaacttgggaggtggtggttgtggtgagctgagatcatgccactgcactccagcctgggcgacagagtgagactatgtctccaaaaaaaaaaaaaaaaaaaataagagaaagcaacatagatgctgaactttaaggaaatgtgatataatatggacttgctcaacataaactattgaaaaatgtgtgtagttataattattattgtaatgatcataaatatcatttactgggcccttactatatgtcaagcatatattatattacttatgtaacgtgtagtttattacctacattatctcattttgtcatctcaataatcctatgaggcaggtataattattgtcttcattttacaataaggcaagtgaagctcagaaagattatgagacttgcttaagctagcagaggaaggaactataggaaaaaaatgtggtcaaggcagaactccaacccagatctgattttttttcatttttaatttttatggagagatagtagatgtacatatttatggggtacatgagatgttttgattcaggcatgcaatgtaacgtaattacagcatgatgaatagggtatccatcccctcaagcatttattccttgtgttacaaacaatccaattacactcttttagttattttaatatgtataattaaattattgactatagtcaccctttattctatcaaatagtaggtcttattcattatttctaattttttgtacccattaaccattcccacctccccccacccttccaccagatctgattttagagtccacacacttacctgtcctgcactgagagcacccaaaaacattagcagcaaatctggttctttctctggcccagctccctgaggacacatattaaaaggataagcttctttgatgtcagccacaatcttcaaagtcttttaatttctctaaacaatgagtagaaggtctctcatgcaggaatttatcagaggctttgtgagcttatttatgttcatccactgtaataaatactagtgtgcaggtgcatggggcaagtagtgcaactgagtgagaaaagaactcagaaacatatgagaggctgagaccttgaattgtgtgtcctgagtcaggtaaatttatctcagttgcagtttccccttccataaaatgagtttatgtccatttccctttataattcaatgattagtcaactctaaattttgccacctgaagtgtatctacagaaatactccattccagattgattcagtcctctacccaaattgtctcccccatcagttgatgtgtatgtaaggactacacactaattttcacatttccacaagcaaaacacaaaggtaaacctgatgcctcccaagtaatgctgtatctgctatcaccaaacataaatgattttctgattttccactcttttggaatatctgcatcactgttggctttcattagcatgacagttcagagstgattgtactaaattttactttgtacacatcctagtggcaatgtatttgtgctgtgatataattcatttcatgatttagtgagtcatgatggaaaaaagtattaggtacttctttttctcaatcaaccaagaacacatcctactttttccatctgttcccggcaacagatgtgttatttgacaagaacccactgatttgtaccctgcctggcatattagactcataccactgaacaacaaggtacctggcttagtgggcaccttggcatagtcccttttaggacccctcctttggttttcataaacagaatgttactgccaatcataatatgtattttgtaatggaatttaagattcagagatttgagtagaaacaacttagctattcctcctccatcagactcctgctggatacagccctcattttctcacacgtaggactgataaggaagatcaaaatggtctcctactgtgtttaaaatctttacttttcactctttaaattactggctttctgtaacttccttctgtgttttctgacatctacagtttcacaattattattcttcaagatttgtcttccttgaagtctccatttttgaagtctgggaggagcaccaaacttggttttattccatcacatttagtgatagacttcttcttctgtttyttttgttgttgttgttttgttttgttttttaaagacagggtctcactctgtccaagctgtagtgcagttgtggtggatcatagttcacagcagcctcaatctctttagcttaagccacccttctacctaagcctcccaagtagctgggactataggcatgagccactgtgttatctatggataaacttttcaatgagaagatccaagtatcttggccaaaccaaagccaaaggcagacctctaatgaattcaaacagttctagggacagcttaagataaacagtgtgatcctactcrgccttaagagtgaggacgctatcggttcattcagcccagagctaggaggagtctgcttcctgtctgcaagatgctattgcagggtccaaggcaggatttctcagaattgttgactggagcagggaacttgtggccctttgtaattcctaagcatcttcctccttttctaccttgccctcatcaagaatcctaaaccaaaaagtatttggctaaagtgtgaaggagactgtgattctgctttcttgaaatttttcaagwtcttaaagcacacaatatgaagctctataaaaattatttatgatttcaaaagaaaataattttaaaattaagatattatgatagaaagtagccttctagtcttgccttaggcatgacaaagaactcaagttcccacctgagagagatggtgagaattgtacttcacataaatactgtttactttcactctctaggaaactctataatgggtgccatttggcattctaataactgttagtgcagaaaatagtgtttccaattatgtgttctcaacacacattttcattagagtagttggaagcaaggtttcaggtaactggaattgacctcttacttctcacagaattagaagtcaagaagttggcacctttctacagatcaagttttaatttatgacagacttggtcaactacctggctttactgtgcctacactctgagtttctcctctcccagtgagaaaactgatagccgctggcatggcaggcggtcttccacatttatctttctaaaagtgcaccaaactatagarcctcagagttagattaagggatactagaaaatcctttctcaattttctgaggctggagtaaagacatttttttctgtactctacatgtgttctcaaattctcccagatggctcctataacactggtctagacattcacttaacaattttcactcagtaccaattctggacctgacactgtgctagccacagagtacagtaaacaacaggcaagttcatgaaacactgtaatgaaactggagaactcattttggttttttccttaagaagcaaattaaaacgtgaaaaagaataaatgagaaactaactggccaacttgtaagtagagattagtttttctgatgcttccttaacatcctaagtacctagggatgtcctttacatgtcagacaccattgagtacctagaacagtgtctggactctggtagggagccactgaggtaagcccttctccactttccatagttgcttcttctctggagaagggaacagaggaacagcttctaacagtgagaagagtaacattaaggaaccctctctgctctcttgtagccagattgcaactgtatgtcctctccttgttagactgagccaggactcccttgcaagggccccaggcttactctgtaccctcccagccatccctggcttggaagattttggtcatcaatctacatttcatatgcaataactttctcatttgtccatttccttaatcaaaggcatataaaaatgccaagcacagctgctgatttgtctgaaataaccagtactgactagaaagttctagtctaaagcaagggaacattatgtttgtggttagtatgtgcaacctcataactggtaaatcaagaatttccattaacatttgtcagtagttttatgactttgtgacaacttcagagactactgagaaccacttacgatgcaacttgggagtgtctctactaagaagacttccctgattcccatgctgggccaagtgtatccaaacactctgtatataacaatcttagtgttcttggaagtgtagtcccagatcagcagtagcagcatctagcatctcctgggtacatgatagatatgcaaatcctcaggtctcaccccaaatctgctaaatcagaaactgggatgcagacctacaatctttatttaaatatgccctcacagtgattctgatgcacactcaagtttgagaacccctgcatcctattaacaaatacatcatgttaaaactattatgtgtatgtgttgaattagaagttgtttgagagcagggaccatgtattcacagtataaatacactgtgtatgggtgtgcattacacaaacagaacgaaacaatatgtactattgtgacatgcttttattttcttccagcaatattttgtgaaaattctttattttgcatgcatatattttgtgatatggtatctgatggctgcgtagtatcttactgtgccagttacatcaaaatttctttgatcttctagtataggacaccataaagctctttttaaaactagcttttattttttatgaaaataatgcatgcatgtacttaaaaatctgttttaagtagcagcccactccacccctcgtcatgtcttattcttacttttagcagcaatcacttcttggtcctttagctgatactatttatgcccatggttctaaatgatatacatatacttctgtgccgtttcaattttagacattatctatgaaattcctgtgatgcagttgggaatttatctctctcatgtctctcaacaccttctttttcagtcttcccaatatagctttatcaaatttttggttaaagcaaaagttcagtgtttataactgtataaatattattccttgtacagccaacaatatgctatggttacatttattttgttgaaaatatttttttcagatgatattgttcttttttctaaataagcttcttttttaaacaacagttttaagttcacagcaaaactgaaaggaaagtacagcattatcccatatacccttatccccacatgcatagcctcccccattatcaacatccattactagagtggtatatttgctacaattgatgaacctatgttgatgcatccttatcacccagcatgcaaagtgtatgtgagcatgtactcttggtggtgtacttcttaaggatctggacaaatgtgtggtcacatgtatcaatattatagcatcataaagagtagtttcattgtcctaaaaagtctctgttctgcctattcagccctccctcctactaacctctggcgaccacggatcttgttactatctccttagctttgccttttccagaatgtcatacagttagttggagtctgatatggtttgactgtgtccccacccaaatctcatcttgaattcccacatgttgtgggagggacccagtgggaggtgattgaatcatggaagcaggtctttcccatgctgttctcatgatagtaaataagtctcatgagatctgatggttttaaaaatgggagtttccctgcccaagctttttctttgcctgctgccatccctgtaagccttgatttgctcctccttgccttccaccatgattgtgaggcctccctagccacgtggaactataagtccattaaaccctttttcctgtataaattacccagtcttgggtatgtctttatcagcaatgtgaaaatgaactaatacagtaaattggtaccagtagagtggggcactgctgaaaagatacctaaaaacgtggaagcaactttggaactgggtaacaggaagaggttggaacagtttggagggctcagaagaagacaggaaaatgtcagaaaatttggaacttcctagagacttgttgaatggctttgactaaaatgctgataagtatatggacaattaaatccaggctgaagtggtctcaaatggagatgaggaacttgttgggaactggactgaaacaaaggtaactcttgttacattttagcaaagagactggtggcattttgcccctgtcctagaaatttgtggaactttgaacttgagggagatgatttagggcatctggcagaagaaatttctaagcagcaaagcattcaagaggtgacttgggtgctgttaaaaacattccatttttaaaagggaaacagcacaacagtttggaaaatttgcagcctgacaatgctgaaaattgtcagaaaatcccattttctgaggagaaattgaagccctgcagaaatttgcataagtaacaaggagctgaatgttaatacccaagacaatgggaaaatgtctccagggcttgtcagaggtcttcacagcagccccacccatcacaggcccagtaccctaggaggaggagatggtttcgtgggccaggcccaggacaccgccccctccccgtgtagcctagggacatggtaccctgtgttccagctgctccagcatggctaaaagggatcaatgtacagcttgggcagttgcttcagagagtggaagccgcaagccttggcagcttccatgtggtgttgagcctgcgggtacacggaactcaagaattgaggtttgggaacctccgcctagatttcagaggatgtacggaaacacctggatgcccaggcaaaagtttgctgcaggggtggagaacctgtgctagtgtagtgtgaaaggacaatgtggggtcagagcccccacagagagtccttactggggcatcacctagtggagctgtgagaagagcaccaccatcctccagaccccagaatggtagatccacctacagcttgcaccatgtgccttgaaaaaccacagacactcaacgccagccagtgcaagcagagaggaggggggctataccccgcaaagtcacagggtggagctacccaagaccatgggaacccacctcttgcatcagcgtgacctggtagatgtgagacatggagtcaaaggagatcattttggagctttaagatttcactgccctgctggggacttccatggggcctttagcaccttggttttggccaatttctccttttgaatggctgtatttacccattgcctgtaccccctctgtatctaggaagtaactaacttgcttttgattttacaggctcataggcagaagggacttgtcttgtctcacatgagacgttggactatggacttttgagttaatgctgaaatgagttaagactttgagggactgttgggaaggcatgattagttttgaaatgtgaggacatgagatttgggaggggccagaggtgaaatgatgtggtttggctctgtgtccctacccaaatctcaacttgaattaccacatgttgtgggagggacctggtgggaggtaattgaatcatgggtgcaggtctttccctgtgggagcatggtttcccatgctgttctggtgatagtaaataagtctcacaagacccaatgtttttaaaaaggggagttgccctgcagaagctctctttttgcctgccaccattcatgtaagacttgcttctccttgccttgcaccatggttatgaggcctcaccagccatgtggaactctaagttcattaaaagctttttcctatataaattacccagtcttgggtatgtctttttttgttttatggagtctcactctgttgctcaggttggagtgcagtggtgcaatctcagcaccaaaacctccacctcctgggttcaagggattctcctgcctcagcttcccgtgtagcttgtggcaccatgcttggctaatttttgtatttttagtagagacagggtttcactatgttggccaggctggtctcaaactcctgaccttgtgatctgccttcctcagccacccaaaatgctgggattataggcgtgagccaccacacctggcaggtatgtctttatctgcattgtgaaaatggactaatgcaaacacacatagtatgttaagttttttcagttggcttatttcacttagtaatatgcatttatggtttatccatgtctttttatgccttgatttattgctcatttctttttatcactgagcagtattctattttctgaatatgacagtttatttatccatccacatactgaagggcatcttgtttgcttccatgttttggcaattatgaatgcagctgctacaaacattcatgtgcaaaattttgtgtggacatagttttcaactcatttgggtaaatactaaagaatacaattgtggaagcatgggtagctttgtaagaaaccatcaaactgtctttcaacatagctgtataagtttgcatccctaccagcaatgaatgagagttcctcatgctccacatcctcaccagcatttgatgttgtcagtcttctggatttaagcaattttgttaggtatgccatgatatttcattgttactttaatttgcaatcccctaatgccatatgatatagaacatcttttcatatgcttatttgttatctgtgtatcttaattgggttgttaactttttatcattgagttttaatagttctttatatattttgtgtaacagtcttttgtcagattgccttatttattcatttattttaatcaatttatttgttttgatttcaataggttttgggggaacaggtggtatttggtcacatatataagttcttcagtggtgatatctaagattttggtgcacccatcacccaaacagtgtacactgaacacaatgtgtagtcttttatctctcacctccaattattgattgatgagcatttgggcaggttccatatttttgcaattgtgaattgtgatgttataaacatgcatatgcaagtatctttttcgtataatgacttcttttcctctgggtacatatccagcagtgggattgctggatcaaatggtagttctacttttagttctttaagggatcttcatactgttttctagtggttgtactaatttacattcccaccagcagtgtagaagtgttcccttttcaccatatccatgccaacatctactattttttgatttttttattatggccatttttgcaggagtaaggtggcatcacaaaaccacaatgtggttttgatttgtatttctctgatcattagtgattttttaaaatatgtttgatgtccatttgcatatcttcttttgagaattgtctattcttgtccttagcccactttttgatgagattgcttttttcttgctgacttgagttcctcgtagattctggatattattcctttgtcagatgtatagattgtgaagattttctcccactctacaggttgtctgtttactgattgttwctttttctgtgccttttagttcaattaagttgcatctatttatctttgttttgttgcatttactttgggttcttggtcatgaagtctgcctaagccaatgtctagaagggttattccaatgttatcttctagaatttttatggtttcaggtcttagatataaatgcttgagccatcttgagtcgatttttgtaaagtaagagatgaggatccagtttcattcttctacatgtggtttgccaattatcccagcaccatttgttgaatagggggtccttttctcacttcatttttgtttgctttgtcaaagatcagttggatgtaagtatttggctttatttctgggttctacattctgtccattggtctatatgcctatctttataccagtaacatgctgttttggtgactatggccttatagtatagtttgaagtcaggtaatgtgatgtcttcagatttgttctttttgcttagtcttgctttggctatgaaaggctccttttgggttccacatgaattttaggattgttttttctagatctgtgaagaacgatggttgtattttttgggaattgcattgaatttgcagattgcttttagcggtatggtcattttcacaatattgattctacccatctgtattagtccattctcatgctgctaagaaagacatacctgagactgggtaatttagaaaggaaagaggtttaatggattcacagtttcacatggctggcaaggcctctcaatcatggtggtaggtgaaggaagagcaaaggcatgtcttacatggcagcagataaaagagtgtgtgcaagggaactgcccttataaaaccatcatttctcatgagacttactcactaacacaagaacagcatgggagaaacctgcccctgtgattcagttacctcccactgggtgwctcccaggacacatggggattatgggcactataattcaagataagttttgggtgggggcacatccaaatcatatcaccatccatcagcatggaatgtgtttccatttgtttgtgtcacctataatttttttcagcaatgttttgtagttttctttgcacagttctttcacctccttggttaggtatattcctaagtttatttatttatttgaagctattgtaaaaagggttgagttcttgatttgattctcagcttagtcactgtttgtgtatagcagacctactgatttgtgtacattaattttgcatcctgaagctttgctgaattcatttaccagttgcaggagctttttggataagtctttagcattttctaggtatacaattatatcatcagcaaacagtgacagtttgacttcctctttgccaatttggatgccctttaattctttctcttatctgattgccctggctatgacttccagtactatgttgaatagaagtggtaagactggacatccttgtcttgttacacttttcaagggaaatgctttcaacttctccttgttaagtattgtgttggctgtgggtttgtcatagatggtgatatggtttggctgtgtccccactcagatctcatcttgaatttccaagtgttgtgggagggacatgatgggaggtaattgaatcatgggggcaggtcttttacatgctggtctcatgatagtgaataagtctcacaagatctaatggctttataaggtggagtttccctgcacaagctctctctttgactgctgccgtccacgtaagatgtgacttgctcctccttgccttctgccatgattgtgaggcctccccagtcatgcaaaactgtaagttcattaaattctttttccagtataaattacccagtctcaggtatgtctttatcagcagtgtgaaaacaaacaaatacagatggcttttattgcattaagttatgtcccttctacgctgattttgctgagggttttaattataaaaggatagtgaattttgtgaaatgctttttctgcatctatggagatgatcatgtgatttttgtttttaattctgtttttgtggtgtattacatttactaacttgtggatgttaaactatccctgcatccctggtatggaacccacttgatcatggtggattatctttttgatacactgttggattcagttagctagtgttttgttatggatatttgcacctatgttcatcagagatattggtctgtggttttcttttttttgttatgtcatttcctggttttggtattagggtgatactggcttcatagaatgacttagggaggattctctctttctctatcttatggcatagtgtcagtaggattggtaccaatttttctttgaatgtctgatagaattcagctgtgaatccatctggtcctggactctattttgttgacaattgtttgattaccatttcagtcttgctgcctgttattcgttcattcagagtttctatttcttcctgctttaatctagaaggcttgtatctttccaggaatttatccatctcctctaggttttctagtttatgcgcatagaaatgttcatggtagccttgaattatctttcatatttctctgttgtcagttttgatatcttccattccatttctaattgaacttatttggattttctgtcttcttttcttggttaatcttgctagtggtctatcaattttatttatcttttcaaataaccaggttttgtctcatttatcttttgtattttttttgtttcaatttcatttagttctgtttggatcttggttatttcctttcttctgctgggtttgggtttggtttgttcttgtttctctagttccttgaggtgtgaccttatattgtctgtttgtgctctttcagactttttgatgtaagcatttagggctatgaactttcctcttggcaccgcctttgctgtatcccagaggttttgataggttttggcactattatcattcaattcaatgaatttttaaatttccatcttgatttcattgttgacccaaaaatcatttgggagcaggttatttaattccaatgtatttgcgtggttctgagggttccttttcgagttgatttccagttttattccactgtgatctgagagagtgcttgatataatttcaattttcttaaatttattgaaacttgttttgtggcctgtcatatggtctatcttggagaatgttccatgtgctgataaatagaatgtatattctgtagttcttgggtagaatgttctgtaaatatctgttaagttcatttgttctagggtgtagtttaaatccattgtttctttgttcattttccatcttgatgacctgtctagtgctgtcagtggagtattgaaatcccccactattattgtgttgctgtctatctcatttcttaggtctagaagtaactgttttataaatttaggagctccagtgtcagatgcatatattcttgggattgtgatatttttctgttggacaagtcattttatcattatatgatgcctctctgtgtattttttaactgctgttgctttaatgtttgttttrtctgatgtaagagtagctgttcctgcttgcttttggtgttcatttgtttggaatatctttttccacccctttaccttaagtttagaagagtccttatgtgtcaggtgagtctcttgaagacagcagatacttggttagtgaattcttatccattctgccactctttaccttttatgtggaacatttaggccatttatagtcaatgttagtattgtgatatgaggtactattctattattcctgttatttgttgtctgaaaatttggtgttttttaaattgaggttttgttttataggtcctatgagatttgtactttaaggaggttctattttggtgtgttttgaggatttgtttcaagatwtggagctacctctagcagttcttatagtgctagcttggtagtacaaattctctcagcatttctttgtctgaaaaagactatatctttccttcatttatgaagcttagtttcccaggatgcaaaattcttggctgatagttgttttgtttaaggagactgaaaatagggcccaaatcccttctagcttgtaaggattctgttgagaaatctgttgttaatctgataggttttcctttataggttacctggtgcttttgcctcatggcttttaagattctttcctttcatcttgactttagataccctgatgactatgtgcctagacaatgatctttttgcaataaatttctcaggtcttcttttaaactggcctttttaaatgaattgtgctagtcttcagtgagcagtttgaattggagtctctaattcatttttaagttcttgaaagttttcttgaattatttacttgataattttctcctatgtatttttttttcagttctgtttctgtaactactgttagttttgtattaaataggaatttattctctagatttcatttttacaaacattcatctcattgtccttttattccactttctgggagatttacttaaatatatcttccaattatttgactttttaatactcatctgttaatttttttattttcaacactacttttgcattttcagattgtttctttttcataacaacctgttcttattttatggctacaatatcttttattatttacatctatcattattttctgttttctgcatatattatgcatgcattttttttctatttccttgttttctgtttcttttgacatttgactttcattttggaagtttccctcaatttatgatcatcttctgctgctgattcatatttaagaataaagcaaaaaataaagacagattttgaaatgtgtttgagtggaaggttttatgttcactgtagcttggtcttgctgagccagcccttttggaggatacctgatttagtgtatataggtttttctctagagagacattgaattttttcagaaaacacctcatactcttgcttgggaacataacccttgcttccaggaggctgaggatctcaccattctgtgtatggatttggggctttcagctacaagttgaaaaccaattctccattgtgtccgttgctctctttatttcaagtactgagggaaaaaattttttgccttctctctgggagaggactacagttgcatgcctattctctaggtattgactttcaaccagtactctgttcctcttttaccccagcattttgttgtgctttttaagatatcctggactcttagtctgacttactacctctataaatgaaaattgcttgaattttcagagcctctttacccttatctgtagaatgtccaccttaggaattgaaagaattatttatgtaaaaataytttatggctggatgtggtggttcacacctataatccaagcactttgggaggctgaggcaggcagatcacttgaggtcaggagtttgagaccagcctggccaacayggcaaagcccgactctaccaaaaatacagaagttattctgcacctgtagtcccagctactccagaggctgaggcaggagaattgcttgaacccacgaggttgtggttgcagtgagtcaagatcatgacactgcactccagactgggcgacagagtgaaactctgtcccaaaaagaaaaacaaaaacaaaaacaaaaactttgtgaagtaactgtaaaccacagtacaattcagctatatgactgtgacttctttctatgccattagatgagaaactcatatatgacagctacactgctacagatttatatggtctcttttttcgtttttcttttctttctttcttatttatttatttttttgagtcggagtctcattctgttgcccaagttggagtgcagtggtgcaatctcggctcattgtggcctccgcctcctgggttcaagcaattctgcctcagtgtcctgagtagctaggataagaagcatgtttcaccacacctggctaatagatatttcttttaagttttatataatcttaaaagttcaggcaaatcaataaatgtaatccagcatatatacagaaccaaagaaaaaaaccacatgattatctcaatagatgcagaaaaggcctttgacaaaatttaacaacccttcatgctaaaaactctcaataaattaggtattgatgagacgtatctcaaaataataagagctatctgtgacaaacccacagccaatatcatactgaatgggcaaaaactggaagcattccctttgaaaactggcacaagacagggatgccctctctcaccactcctattcaacatagtgttggatgttctggccagggcaattaggcaggagaaggaaataaagagtattcaattaggaaaagaggaagtcaaattgtccctgtttgcagacaacatgactgtatatctagaaaaccccattgtctcagcccaaaatctccttaagctgataagcaacttcagcaaagtctcaggatacaaaatcaatgtacaaaaatcacaagcattcttatacaccaataacagacaaacagagagccaaatcatgagtgaactcccattcacaattgcttcaaagagaataaaatacctagaaatccaacttacaagggatgtgaaggacctcttcaaggagaactacaaaccactgctcaaggaaataaaagaggatacaaacaaatggaagaacattccatgctcatggataggaagaatcaatatcgtgaaaatggccatactgcccaaggtaatttacagattcaatgccatccccatcaagctaccaatgactttcttcacggaactggaaaaaactactttaaaattcatatggaaccaaaaaggagcccgcatcgccaagtcaatcctaagccaaaagaacaaagctggaggcatcacactacctgacttcaaactatactacaaggctatactatactacaagtaaccaactatactacaagtaaccaaaacagcatggtactggtaccaaaacagagatatagatcaatggaacacaacagagccctcagaaataacgccgcatatctacaactatctgatctttgacaaacctgagaaaaacaagcaatggggaaaggattccctatttaataaatggtgcttggaaaactggctagccatatgtagaaagctgaaactggatcccttccttacaccttatacaaaaattaattcaagctggattaaagatttaaacgttagacctaaaaccataaaaaccctagaagaaaacctaggcattaccattcaggacataggcatgggcaaggacttcatgtctaaaacaccaaaagcaatggcaacaaaagccaaaattgacaaatgggatctaattaaactaaagagcttctgcacagcaaaaaaaactaccatcagagtgaacaggcaacctacaaaatgggagaaaattttcgcaacctactcatctgacaaagggctaatatccagaatctacaatgaactccaacaaatttacaagaaaaaaacaaacaaccccatcaaaaagtgggcgaaggacatgaacagacacttctcaaaagaagatatttatgcagccaaaaaacacatgaaaaaatgctcaccatcactggccatcagagaaatgcaaatcaaaaccacaatgagataccatctcacaccagttagaatggcaatcattaaaaagtcaggaaacaacaggtgctggagaggatgtggagaaataggaacacttttacactgttggtgggactgtaaactagttcaaccatcgtggaagtcagtgtggcgattcctcagggatctagaactagaaataccatttgacccagccatcccattactgggtatatacccaaaggactataaatcatgctgctgtaaagacacatgcacacgtatgtttattgcggcattattcacaatagcaaagacttggaaccaacccaaatgtccaacaatgatagactggattaagaaaatgtggcacatatacaccatggaatactatgcagccataaaaaatgatgaattcatgtcctttgtagggacatggatgaaattggaaatcatcattctcagtaaactattgcaagaacaaaaaaccaaacaccacatattctcactcataggtgggaaytgaacaatgagaacacatggacacaggaaggggaacatcacactctggggactgttgtggggtggggggagggggagggatagcattgggagatatacctaatgccagatgatgagttagtgagtgcagcgcaccaacacggcacatgtgtacatatgtaactaacctgcacattgtgcacatgtaccctaaaacttaaagtataacaataataaatttaaaaaaaaaagaaaaaaggaaaaataatcttgtaaaaaaaaaagttcacatgaatcttgcatcttgctccataatttatctgttttaatgtaaaaataatgttcttcaatcttttatcatggagccaaactgacaattcaggaagatatgtgtattccttttgggatttatgtgcctcccagcatattgggagatatccttagcagtttatgtacccctgtttaagttttatagaaataatctctaagccattagttctgataaatttggttccttccaatcctttgtttctaaactttgattcaggatgatctgacaaattaaatagcacccttaaacaataaggcatcatggcccagtatacagagaaatatggagatagaatagaattggcatggtgtctcacgcctgtaatcccagcactttgggaggccaaggcaggcggatcatgaggtcaggagatcaagaccattctggctaacacagtgaaaccccatctctactaaaaatacaaaaaattagccacgcgtggtggcgggcacctgtagtcccagctactcgggaggctgaggtaggagaatggcatgaatccaggaggcagagcttgcagtgagtggagattgctccactgcactccagcctgggcgacagagcaagactccatctcaaaaaaaaaaaaaaagaatagaattgactatgggctgttgagggagtagcttattacaaatgtgtaaacctacttgtgccttgttgttgtacagaacagtgaaaattgccaggggagtggagaagaaaattagcagtgtctgcctattctggatatttcacatcaatggaatcatacaataagtggactttgagtctagattctttcacttagcatgcatgatttttcaaagtttgtgttttagcaaatatcagtacttcattcatttttatgactgaataatattccattgtatggatataactcattttgtttattcaatcatcagttgatagatgtttgatgatttctcttttggctactgtgagtagcgttgttatgcatattcttgtacaggtgtttacttgaatacctgttttcagttcttttgggaatacttaggagtagaattgatggatacagtaagtctatgtttaatttattgaagatctgtcaaattgctttctacagtgattgaatcattttatattcctactagcaacgttgaaggttcaaatttcttcacattcttgccaacccttgttatttttcatttttttaaatagccatactaatcagtgagaggtagaatctcattgtggtttttgttttcattttcctaatgactaatgacattgagcattttttcaagcgcttgttgaccatttatatatctttagagatatgtcaaktcttttgcccatttttaaattgggtcgtttgtctttgtgccgtggtgtttcaagcataaatctatagacaaaataaaagctacttgttggctgttttattggaaatcacacaacttgggaaagtctcaaggataaattttgctaaattctttgtccactattcactaagagggtcccttaccctttcttttcctttgatcattggttatctggtttcacctgtcaagaaataagctgccctttgattgtggataataggtgagacaccgcagaatcaagttacactgttgcatcygtaaagtttcatcactgtgtgtttccaggagtcaggatttgccatcaaagtcaattgccgaatgactctgactttattattctttatttgcattaacaattgctctaagcagtaacacgattataacccaaaacagcagcctgttatctatcatttatttgatttaatacatagaaatggatgtctttcaaagagcatttatttttttcttcacattctcttccaaaatcattctcagtggaaacatttagccttataacatggaggaattcctttgtaaatccagtgactatgtgggagactaagaatttctgattttattaagtattttggataaatgggtaaagagaggaatggtggcagattttacaatggttggtttaggcttctgtaggccttgagtaaggtgagtaggagtaatgcctgtggtcatttcatttgaatggcctatttattgaagtaaattcatagttcaaaaagatccaacttagaaaagcctgaggcagaaatggaatcctgggagtgcagattggtcattgttttatttaatctgattccactttattctcctcacggtgaaattgttctttatgatactctgtatctactggtagttcacatccttcacagaatcctctaactatgcaaaacacatagtgaacagttatcatttgaatcttagtacaactttaataagctgtgttttatatttaagtagtttctsccctggtggttgcccgtggcagactttggagtttgatagctcttcactccctattttatacatctctaagtaattataccctgtgcccttaagcctcaaaagcataaaattatttaaaaacatacarttaaacacttcagatgacagtgttaaaacttcagaagaagacactcactttggaagaatggtgcttcgtgctggagcctttatatcagctccttcttctccagagactttgggctgaagtttctgtctcagcatgggcatctgccatgcttgttacaggctcaggatgacccagcctcaaaattctattaacttgggataccattttgcaagggaattcttgtcatcagctttgagggaggggaagcataatgatatacctgatgttgacagtaagtgttgtagtggcagtgaccacgtgttatactcctgatggtatgctaggctccctaggtacattgttttacttaatcctattgaaaccccacaaggtgattgttattaccctctcattttacagatggaaagactggggcttaagtagttgtttggttagtgagacagtaaaaagcagaataaggatccagacttaggtaaactgaccacagttctgaaaaagcaagctgggcagggtcttgatggtgcatagcatgtcttcagcatggtctcytctgggcagtgtgtctgactttcctagtcagcctgaccacatggcctcctgtttccttggcaccctgtacgtgcttcttctgcagctgttgtcatcgatatggcaactccctccaaacctgtccccatccccccagcctgtaaacttcttgagagcaatgatgctgtgttgtttacctctgtatcttcaagactcaacacagaacaggagttcaaagtttgtggaatgaatagtggaattaatggtaaaaaaaaaaaatgtgtacatacgtgaattaataggttgtttcctgctctctcccccaactcttaatataaaatgggcccagccattttcataagtccctgggtaaatcattccattatttttccctttactttgttcagtccccataattccttttttagactgccttgtgcattcttattttctacagttggcacttatctgtgatccaagccacatacagccttttaaaagtgtgagatcttacccattagtaggtcttgaaattaattttgagggtggcagccagcattttttttttaaatgaagagactagaaaagaatacaacttctcagcatgcatggcacatagaaagacacagtatttgtttcagatggatagataaatagaggacatatatgtatcactagcacttgtttgaccacaagtcacacactaggacatcatttaagacagtgaaagacatttaggcacatagacacagtatttgtttaagatggatagatagagaacatgtaagtatcactagcactgattaaatatcatacgtgcagccatgttttaagaaggccaaatgctgcagggatgctcattaggggagtgtattgcaacaaccactatccacattttaaaaaattgtacattgtgaccaattacatatctgctgtgtaccagattgtactctgaagtatattccttattgttggaaaaacactgtcctaaatgacgtcccagtgtgtgacttgtggtcaaacaccccttgctctgctaaagtagttcctaaagtcttatattttgtaaaagctattataaaactgtcaccaaagtttagaaaatttaatcccagtgcaattattttaatgatgttaaagtataaatgctgcagagaatttaataggaaaaacacatagaaagttctaaaaattttaatagtgggagcttaactttgaggtttgcagaattattttattttgtactcgtctttaaatttgcttctccaaatgttcacctaaaagtcccgctgctttaggtaaattgcgggggctacatttatatcagtcagtggcattcatgtaggatttcaacttcaacttgctgtgaaggagccagactttgctgtggaatgcattcatgtgcagagctgccttgcacagctcattggagataagacagttttgacttcacatgccaaacttttgtcactttgtctattttcgtatttctctatgactctgcagagccaagcttttgatcggttgagcagcaaattgaaaatgctcttcttaaaaaatctaatactaaagtgaataccaagcaatactgcatttcctgaaatgaatatttgttgagtgcttactctgagctagccaattgttgtaccctggggttataaaaaatgaatgagattcactttctgctctgaagagtcttctggtcgaggagctttcctaccgcagggtttggattcatcttgcttgggtctacgggtagactgaagatccttcgtttgccctcccaactcattctgggcctttccccacctttgacctgtgaggctggtcaatatgggctgcaatcgagggctcccttgctgtctggcatctggttaggtttaaccagggggagcactagcaggaactagagggaaggagaatggagaggttagcatatgtgttctcccggctccctccttgcaaggtcacccaggttggctctgtctctctactaaaagtcacagcttcattcaggtgtcctctccacactgttctttctgtttccatgttctagtgactgctccctcccctagcttgccctcctttcccctatagggtactgtgccatcccttgtggttttgctataccctcaccacaaactcctaaatcacccttttgacactgacttagtacctcactgaacacgactttactctgaactttttcctttaggtcctttcagtgctcttgacttatgccttagctaattttctgccatgatttcaaaagacttacgtatttgtacgtttccaggaagccatcttattaatcaatatggaaagttatttaaaaccacaacctctggttcttacaaatatgtgttagctctatgaaattgatacttggaaagctcaataactatttataactgtgggtgatgttgatcatgacccatcaataggtcagagccttcattgttaattacctagttcactaggctttgttacaggctggatggaggtaggtatcccgggaggaatagtcttacagaatagtaggagaacttaccactttgctgacaagttgaccaccagtccccactttgtgagtcctattttaagtgttgccatctgttctcagaaaagaattaaaaaggatgagataatcatttaagcccctggcaacagcaatagctgagtaagtggtcatttattcattgcctctgtatatcaggcattctacttcacaagcatcctactagaatctttaaattatcattatatttaacamttacaattaccctacgaggtcattcttaattccactttatagacagagaagctgggagtaaaagaatgtaggtgactttcccagggaagcacagctggttatttccagagctatgatttgaacccagctccatcaaactcagaagtattcctcccactatttcatctccccaaatctctttctttttgccttcaatgttgccaaaagtcatgtttggcatcaggtttaagattattaaaacttcaaactttcttttttcaaaatcaggcgttctataaattaaaaacaaaatctgattgggattcatctccttctcttccaatagaaacagagtagagggcatggaatttgagggaaaaggaggaagaataaatgaacagcatatgagcaaaggacctggggaacccccaagtgactaacaatcaaaaatagaattttctgcatgtcagatattgagtcattcgctgcatggcccaattaacctttcttctgattccagattttgaacttgtgtccttggagaacaaaatgcttacccattgccttggctgagtcacttctgtgcagttttagatgaaccctgcttgcacattattccattggaaacaagcattttcacagtaggttaaggactgggactaaaagaaaagagaaagctaagatgtccatctgaaaactgtcagtgtcgtctcaatggaaagttatgatgttttacttctctgaaaaagctaaagaaagcaatctggccagttataaatttaatttatgaaaataataccacaggcctaaatcatccaacactatagctattgattcttctttctagttccttggggaacagttgctgtatttgagaaggtagaactacaattgtcttactttgtcatttaaatgtcatattagccaaacactgagcacagctgaagggttgcaaactgactaggaaagaatgggatagtatttttcattttttttttaaatgtaattggtagacagattttcctgttggtgagggctgattttttttcctcattatttctctctccttttattttctccacaatgttgcattttcttggttttctgtgaggcattaggaaaggataaatcatgacgttctgggtctatggtcttttttaatctctcagattattttctttaacagaattgttggaaagttggctgttacctgacagaaaataaaacaaccaatttttcatcgcaagttaaataaacattgaaaaatcagcattctacaaggaccattagcttatgtatcactgtaaaatgttttatgactcttggtataaaggatgctcatataaaaataaattgtgtcataacaaacatttctcccagtcatggtttgtaatagccttaatctcaaataaatctaggttgaacattgtagtctccagaaaaactgaccttcagtttcaaatagttgggttaaatcattgtgatgatgacatagtctcagatataaggagatatgaacttgtatcagctccccagataatcttttatttagaagaggagagatgtctcaatgaactgaaattgctcttgagtgaaccattttatttatatatcttcttattctgactaccagttcacacacagtgccacagagaatcctgcacatagctccctagggttcctgagagagcaatccatggaaatacatagattaaaaaccatgagcaattgccattttacatctgtcaaattagaaagcatttttaaagtgcaatactgctgctacartgttggtgaagtgactggactcatatactactggtagcaatataattgctttggaaagtattttggcaatacatcaagtgttaatatactttgatactacaattacacttctgagaattttgtgtaaggagtaatttagaagaattcagaaggctaagatgttcactgcagaattttttatactagtgaacagttagaaacaactacgtgctcaacaatggagactcttagtcaattttaaaagtctgtaatgggttatttgcatgaagtctaattggcaacgtttaaaattttgtgatatagagctcagtaaaaagtactaattataagcatataaaattattgcatatagataagaagcagacttcgctaaaattgttcagatttagctgttaaatgatattttagctttataatttttgtattaaacaataagatctaaaaactacttgactgtgaagattaatattaatgaaaagatgtttttattcgcactttccttaagatgttttagttgttcaagtatgaatctttgagacctgaaagtgtcaaggattyggagaattggcatttatatgatctaatttacaaaaaaagaaaagaaaccaaataaatgaacaaaagagagagacattcttccagaataatgaaacctcccattcttgttcttttggggatttttaatgttggcacttggagtaagaagatctcatcagataatttagagagaagtcattcctttaacatgatgaagcagtgtagcttgtggccatgaaccgtgaaatgtcctgatatgagtggcgtaagtaggctttttggaaggggctctatcccaaagagccataggacagaagaaaatgtgaatataggtgatccatccctgctatgcttgaatcagatctataaacattgcatagggaaaaaagaaaacttttggaaataacctaaatgcccaacaactggggattagttaaataaagcatggtatagtcagatgatgaattattaagtaggcattgagagtaaagtagaaaaatattaatattaatattaatctgattaagtgtctgcagtaaagttatgtgaaaaagggagataaaaattatgtatacaatattaaaaagttgtaaacttatcaatagtggttatctggatgttggaataatagacaattaattctctattcctgtccatattcttcaattttttttctcctatactgtgcattactaaaataattaggaaaaattttttgcaattattttttcttaaactgtatgggtacccaaatacataatgaatgagctattgcctgaaataatttaaaaagtggcagcatataaattgcaataaaatgaaatacaattttcactgtataaatggaatgaaagtctaaagcagtactcaggtaaggacatttcgttttaatgtaacgccagtgaggagcttgcatttaagtgccaaatattggtatttatgtatatgaaagctcttctttactctcttatattttctttttttctaaaattttttttttgctaaaattagggtgtcatatataccagaatcaatcaattcttccttctctccttcttttctttctttcttccatccccctacctttcaattctgcaaagataggcaagtgagtgagggtgggtctagcttagtgtttgcccatatgtaaaatgttttgagttcataaaatcctgaaaaaattaaagcagcagacagaaaacagaaaagacccccacttagatactgattagcaaatagacacaaacatttcctctawatacttcagtgcctgtgatttaagtagctacttgggacacattgaagagtctgttgttagctttctgcattcacatgataagaaacaaagaattctttaggcttgacctttgcaaatagaaaatcctgaaaacgagaatgctgtaatttttctttgtgaagctcaaacatatattgaaagagattggcctcgaatctgtcaccttctcatcactaaatatggcagccctgaagttaattaaataatgcaaatgctcaaggcggccttcactcactcctttcgatgcactgataaatggaggattttagttaggggtttgttcttgttcttactcatttttttaccaaaagattttgtctttgcttgtaatacttgaggatctacactcccattatctcaattgaggctaagggactaagggattccctgtccagtgtgtgatgggccagtgtaatcattataagtgatttcaaatcaatataatttggcaatagcaaaaactatgagaatttctcctcaactttttattggttttaggtaaatacttatgaagtagaggaaagaaggtaggacatgtgaatggaaggaaggagggaaagagaaaaatactctgaagtcatgcaggaaaaaataatttctttccttggccactgaacctgttgatgtggactcatttgttttttctcccttggtggtttaaaagagaaagcctcaccaaagggtaatcaattgattattataatattattagctggattaaaataatgttatttgtgcagaaaacaattcttgcatatgtttattttaaattcctctgattatgtgttgtaatggcttagcctaggagttagccaaaaatgatgtttttctaacacaagactgttgttgaaagacttctttttccctaattatttattgtgatcctaacacaacacacaccctcctgtttcctccttcatgccatcatcatttacatttttgttacctccttgtggatttgagggacgatatctaatagtacagaacatagcattgctccaggacctagcacaatgtcttgcctagtgtaggtgtttagtaaatattgaatgaattaaattcagaaccctgagggagaaaagtcacaaatttatcaagtaattcacaaagagacatatccctgacagctaatccagttaaaagtattaaggtaagctgaaaccagaatatgtttcaaatcatttctcttcttataagagttttgttactggctggaacagttgtttcttggtatgctgatcgaatgtgacttgagccagaaagattcacaatgaataacaccaggaggcttatgaatgatgtataaagccaaccagtctaatgacaggtaaggcagaggtgagcagttactttatttcagagcagccaaagtcttggcaatgtaatgcaaccacgggaatagtgagtggttgtgaccagtttgtagtaaacttctagaatgaaacaagctttaaatgttctgatggatatttgatcttttgtattaatggagccattgcttcagatgagcacaaatgaaaatggcccctcttgctcctctagtatttgcccaggggttacaaggatcagctaagtgctatggagggtattaatcactttttacttgcagtgaaactatatttgttttttggtaactagcaattctaatacagtaaaacttcaactactaaataaatatcattagtattatgactttaattgaagaccaaggtgtcaccatcttgaagaaaatggtgaaagtttactttctgttccctattgatacaccagggccaacactgatgacctgttaacaataatgatataatttttttttaatttttcctgaattttctttctaaaatctaggttcggcaacagaataatcaaaggatttattgctttgccattctgtgcctagcactgtgaatctctgtaactgacttgatagaaacatagatcataatatttttgggtggaaatgaatcacagcttatggttgcaaaagattccacatgaagctaatggattgtagacatctgggaatgggaaatgatatggtagactggctagctgaagactgggatctactcccactgcatgtgtttctgtatataaaaccaattgctcatgcttctgtttattcattaaatgaaactcttattttatcaggtgggttccttttcagtggcaagttaaaataaattagaagaactagaaagtgatgtcacaaacatgaaatacattttctcctgtgttgtctccctgttgaaaaaaccttttcaaacagatttttccctcatggttccccaaatccaataggggggaaaaatccagggtttcttttcccctggagtttggataaaaactcaaggcttgatctctttagtccaaatgaggtcacctgtccattccaagaggccatcactgaggccaagagaatacctgggtcacagttctctactggaagtgggattagctccacataaactgggttgagcacagggcgggaattcttatgctgaggtgattttaccagaagtagaaattggatgttgtaggcacatgacagatattcactgtgcttactggtagccaggtcctttacagattgttgatacaaagacaaacatgacttgatctctttccctctctgaatctcaccacctgatctttgttaataataccctgtggtcaatttttcttacgtcatatttctaatattgtcctacccttcttcaaaaatgtttctggttctttatcatctattgattaaaatattaactccttggttaactttcttcaatctacctctcaatcctggcaaaagtgactgattacatatccttggattttcctgcctctgtgagtgtcctggaatgtcttcctccatgctaatcactgaccatctgaataccgttaaggtgtagttcagatactgtcttcataaaacacccactgatttccttcatctactgtctatagcacttaacatgaacctatcttaaagcacttactgtttgtttaacaagtagtgccaaatgcttactatgttcttattgtttttctgagtgcttaaaaatatgtttttctactttgtatcagtgttcttggtgctcttgtcttttattcccagtaagcgataagctcagtgaagccgggattcttaaaggcaatgagttacctacccatagtgggcaaacaacatatttatactggataaatacatgttaatccaatttgcacatttattgagcactagcacttcaaacctaagagagtagggccctattttctttcaaatctctctctgcacatagtatggtgacatatatgtgttaggcattcaataaacatttgctaggcctctaaatgtgatggaaatttcaaatatccagatatctaagaatgagccatttccttttgttttacattcttcagtctttaggcatcatttttgaaacctcttgtcattttgctcttcctaacagtttttacaagaatgtctaagttctactttctaagttgagcaggatttgggtccccttttttttttttaacaacagggacattttcagcaattgcaaatgcctatgctattgagccattgctaaaatactgggttttataaagtgcttctaagggccaaagagctttgctggcccatggtctgtgcaggtgttcatgagttaaagcattcaatggccctagcaaacatgacatttaaggaggtaagcattgatttgtagagtcactttcaagtacaatagaacatcttgccttcatttgtgagtttcttgtttgaaatggccgacattttaggtgtttccatgtagaaattttgtctaaaatatgtaaagcataaatgggtaaaagaaaagattcatttacttgatctcatccatgctggacaaggacaaggcttccatgttgtctttctattctgaacaagagattggaagcctttctctctcttttttcttttctgttcttttcttttcagttttcctcttttgtcgtttctcttcatgaataacttttcaaccaagttagatgaatgccaatagctgtcaattgccactgacaactagaatggccttggtgatctgtgtgagaacaattttagggaagtggtgaaggcagaagccagatgacagtggatgaacagttgactcagtagtctggtgagtgagatgtgagctccggaaagggaccacccaagctaaaacccagactctgctactcactagctgctgacaataggcatgttaccaaagcgctcactctccctgcctcaatcttttcctctataaaatgggaataaaaatagaactatctcaaggttgttatgagtagtaaatgagttcacgtggataagatgcttagaacaatgccagtttcattataagtactcggtaaaaattagctgttgtttttggtgcaygtgcgaagacagcaagttgagactacttttgaagcttaattatgaaaattggagagaaaaacgaggccagaggtagatacaggccaggaattaggtgaaaggtgattattttatattctgggggaaaagaagtggctctcggagagtgacagattacaaatgggggaagaaggattaattgatggagtaatagtgctgaaaggcgagtgaggatggaattcagagaagaggtgaatagatggatggataaatcttggatagaaggggcttcttgttctctaaggctgaggctaaagtggaggtaataaggaggaaaggctaagaatgcatgtctttgtgggtggggagtagagagttgaaaggattgaaccctaacagcttactgtctctgtgaaatagaaacaagctcatctgatgggagacaagaggtttcagagtgaggaatagagtagaactcataaatgaaggagaagtcacacagcagtaactcctagagacccgatgacactagccagaatgtatagtctaaccaaaggattgagaagtcaggtatgataagaaattgtgctcacacagtgagacactggcatttgcttccacaggtgggacatttctaggtggtgacaaatctgagatgaaccatttgaaaatttttgtggtctgcagtgtacagcttgaacttaaaaaatatttttaccacaaataaatgattgattatattcatacctttcttgagttattaaattatcttctgtttcctatacatttgcagtgctattgggatggtagactttcagagttgaattatatcctgcctctattccacctaatgcatccttgagaatagttatagatgggaaagtcacattttattgtgcttatcatgttattctttagtagacattccattaatgtagaaacatacatggtgtgatacggattttatcttgtgatgatcagatgaaaagccctcctttcctgcatactcttttgcaatgttatttcatcactcttcccatcaagaggtggagtctacatttcctcctattgaatctgagccaggcttggaattagtttaaccaggataaggcaaaagtagcacagtgtgacttctgtgcctaaaccttaagatacattgcacttttcatttttgccatgttagaatcctgagctaacaagaaaaaaaaaagctttaatttccctggcctgccagagagaaaggccaggtagacagagacccaggggatgaaaaaccatagaaagagatagggtgagacagtgagacagcatcaacgagttcaatcaccccaacagagacattggacatgttagtaggaccagcttgcctcagtcaacacatgtggcacagagacaaaccattgccatagagcctccccacaatgcagaattgtgagcaaaaacatggggactgtcactttaagcagaatagttttgagagctttattatgctgcaatagggcatgaaaagaaagagcctcaaagcagagagacaaattacaagaccactggcataatccagatgtcaggcaatgagctggaaagtatagagagaaaggtagaggaaaatgtgggagagcagtaggtggcaaggttcagcgggacctcatgattggatctgggacaaaggagaaagagaaataaagattactatgacactctgtttctaggaaaataagattgtgaacagcaatatggtctagataaagaactggattttgggggaagataagtccaattggcagttgttatttcttgatgtgataccacaacttctatgtaaaacactcctaagcagctggagatacagaccagaagcaaaggatggagtcaggtgattagaatagctattaactgtttttgtttcaaacaaaaagatgcagtcagctctacttccctgttgttccagcctaaagggtgttttctaatttccttctaactcctatattgagtaggaaaggtagagatgtcaagagaaggcggaagagagaaagagaggagagggagaggactcttgtgaagagaaaaagccaactcgcatcctgtgggattgcaccttattttagttgcacctcttggaagcttcactgcttatgtaaaaataagaaaagcaacatacacgctcaactaaaattatcgtcattcaagagtcctccctttaaatagcaccaaatgaaaataagaaaccctaacctcagctttttaaatcacaatggaaggataagagatgctttccatttatgggatcttagaaccttcaaaatggtgctacttttgttccgtgtgtgcatagggaggaagctgggaatgctgaggtggcgaggtttcacctggcagtcaggattgctacttcccactcaccaagttgtgcaatatttgcaagaagagcaaaaaataaaagatagtgtctctttaaaagggagacagtgtagtttaaagaggctacagtgtagtgtagcggcttaygctctgtggtcagcaagaactgagtttaggtccttgtcccatcacttactaactgtgagaccctggatacaatatcaactcctaaaaacctcagtcacttcagctgtaaaatagggagaatgctgtatactggggttgttttgaagagtaaagcagaatatgtatgaaaagcacttagtctggtaagggcacaagttactaagtggtaactatagtcattggaattagtaatttgggactttcacatatttggcttatcattgagactattttccaggaatgtttacaataagaaacttgggccaactgcattttagtcaaggattaaaatgtaacaaatgtgtaatattatattatgtaacagcagatgattttaaaatttacaagtgtcattaagatttctctcctagggtacaaatgttgttgtttcacagaatttttaaaaattattttatttattttttattctacttttatctctgggatacatgtgcagaacttgcagacctgccacataggcatacacgtggcatggtggtttgctgcacccatcaacccatcatctacattaggtatttctcctaatgctgtccctcccttagcccccagcccccgacaggccccgctgtgtgatgttcccctcactgtgtccttctgttctcattgttcaactcccacttataggtgagaacatgcggtgtttggttttctgttcttgtgttagtttgctgagaatgacgatttccagcttcatccatgtccctgcaaaggaaatgaactcatccttttttatggctgcatagtatttcatggtgtatatgtgccacattttccttatccagtctatcattgatgggcatttgggtcggaatttttataaaacttcaagcaaaccgaaactgacatactggctacttattttttttcttcataattctggatgtcagaaaatgaacaatgttctaatgcagaaggcaaactttctatgaaggaccagacagtaaatattttagctttgcaggccacatacgatctctatcacatacttctttgttatttcttacaacccttttaaatgtgtaaaaactattcctagctcatacaaaaacaggctattggtgggatttgcctcatagactgtagtttrctgacccctgctctagtataaatttgtcttgtttattactagagtgcttatgccagtaagtattttttaaaagagagagaaaatgcattaagtaaataacatttaagtgattctttttctgattcagacattttctgggatgaaatgagaccattgatcattttatttgatggaatagaactgtttttcattgcagtgcaatgaggttaggtatgattttgaggactggggaccattcagcacattagttctgaaccatatccttgtgctttgcagaatttttttctcttcctcagaggagcagtttgaatacagggctttatggcatcaggcataagctgccattaaaaccttcaactgaaaattgtgctgccctttatgaaaatgagcagctggtcagccggaccatcgcccaccctcagctctactcatgttgtgtacaagtagcttgaatagcccttcatgagcaggtcttctacagacattttcctatcagtgttgggagggaaagccagaccagcagctagtgtttctttcagcctgtgttgtgccttggcatctgactctctgtggacccaggagtgaaatatcttcctggaagtggtgatccaggttagtcttgtctctctgactcatgtcccaagttgcttccatagagatacctgtggcatcttttccccctttactctgttttcctgaatttccctctatttttcactgactacaaagataaagaaaaagaagaaacaattttaaaacatataaagtactttgaaatatttatccttggataactggagactagatcacattcttatcttttcatccagcattttttttttggtgaataccatattatgtgtttaaaaagacatatggagacctgactcacactctgaatcttccaattttccattgaccacattcttaatgccctgagaacacaaggtcaggcaaaggagcctctcagctgaggtcctggccccaggccctaaacaggtcttctgtgagccaggccacagagttccttttggttggggtcagtcttagcagaatgtagatcctggagcaaatttggtcaagcagcttcctttgctcccatcaccctaagcctgcactggggcctgacttctggcatctcaccaatccagtcatgagggatggctggctcagaaagagcaccttgtcaaggaagaagcagctcaagatcacgaaagcccaagcacatttgtccctgtgcccagaacagagctagactggtctgcctctccctgcattcttggggctcttcactctgtgtattctcagggcaagggttgtaccaagggagagcacactgtccagcctcctctcaccaattcattcagtcatttacccactcaatacagatttagtgagtatctgtcatatgccagacacagttctaagtactgaagacacagaagtctttgctcattttactccataacttgctctgaagaggtgcctccaaggatcttactctttcatgggctctgttctcgatcacttttgctcagtattgtgaaacctatgggcctgtgatcagaaaaaaaatgtctttaaaccagtctaatccatgtcaaggtcctctttggaaggggagtagcaaggactggtgagaagggagctgtgagtgcttcttgaatgtaggacctgctccttactggggagaatagctcactcatttctaccttcctccaggtctcatgaacatgcacagtcctgtgtgttgcatctcctaatctcatctgattctctgctgtttgcctggtcttggactaatttccctttagcccacatgatgatctttaagttaagtctcagcctatttagactcaggctgcctcactcaccttgcagttgccatctttattatattatggcagtcaaaggttattttgtttggacagagaagttactctactgtatggtggactacctgtcctgaacgttcgcaaacatatccttttgttttctggagttcctcctggtttgttttctgatggatttctgttgactcccagattgaaccaatgtttatcctgtgtttggtgtatcaggcttttctgttctggttgatttcctgtagctaatttctagggagacttcaattcctcactgaagtcaagttccttgtcatagaggcccagtatttctaactcccattcagacagaaaatttgtttttattacccacaagagaaaatgatctggctttcctgctctaaagatacccctagtactactattttttccagtcttgtgttttcagatatttttctttaattgaccttctctatggtcagattcgtgactgtattccttcccctagtttattaattcttttttttttttttttttttgagatgaagtctcactctgtctcccaggctggagtgcagtggctcgatcttggctcactgtaagctctgcctcctgggttcatgccattctcctgcctcagcctcctgagtagctgggaccacaggtgcccgccaccacgcccggctaatttttttgtatttttagtagagayggggtttcactgtgttagacaggatggtctcgatctcctgaccttgtgatctgcccaccttggcctcccaaagtgctgggattacaggcgtaacccaccatgctctgccttattaatttctaagagccttcctagaacactgtaagtatgcttaacctggtattatagagacatgtaacagaactaaatactttccactccacaaaagaagaggctattttgaactacatgtatcttcacagaggttactccagtaagtaacttgtggaagggagggtcattggaatatggaaacagacaaaataaaatctgttcccttttcctcaaacctcacatagcctcatacaattaaatgagatcttggttacctctcagcctgtaaagattcccctgagtgtgtatgtgtcaactcctgtcttggttcattttatgctgctataacagaatactgactgggtaatttataatgatcaggctgcgtgacttatgatgaacagaaatatatttgggttatggttctggaggctgagaagtccaagagcatgctggtggtatcttgtgagggccttcttgccatgtcataacatggcggaagccatcaaacggagtagagagaacatgcgcaagggtgggatagaagggggccaaactcatccttttatcagaaacacactcccatgataactcatttccctagcaacggtattaatccattcctgaaaacagagcccttatgattgtactgccccttaaaggtctcacctctcatccctgttgcattgaggattaagtttccaacagatgaactttgggggacatattcaaatcatagcaactccttattacccaaatttatcattatactggtcaacctacacattacaaatttacatttaaaaaaagtaattaagatttgctaaacttaaaagatttataagctgtaaaaaaaatcaaaaacaaaaacaaaaaaataaaaagcaaataatctttaaaaaatatgtacattttttaaatacaatgtactgacctgaaagtagtcaagttatctatagctactggttgataaaggcaacagaattgacagctcccacgtctgtaattaaatgtgtgaaactaacaaatggaaataatagagaaagattatttttctttactggtcatgttgtgacatcaatttgttttaaatgatgagaaaagaacttaaaggatttgctttttattatagtgcaaattaatattcaactactgaactgaaatagatttgcataagagttatcactatcaataatcatttgaaattcatttttcccagataaattagaatctccagtgataacaagcaagagttatctcctgcatttttgaaaaaaggttaaaataatagctatttcctataactagatcttgagattggacataaaccttatacgtgcaactttccttatctgattttaagtttcctttaactgtaaacatgagctaatgccacatgaaactaggaaaatacgatggaatttgaaaatgatgttagatagataaaagtaaggaaatcctagatttgaatgacatggaaatgtcacctagttcagtctcctgtaggggtacatagtgcctctagctgctatcatccttaatgatctccaaggaagaaagtagataaagatcctttcatcatcagttgtaggactgccctcaaccctgccccaaatattagatctttgaactctcttttagcagtaaatgttatgtaggtattaatatatatcttaaataacatatatgacagagatgatagaggtaataataataagtaatcactctccttattactctgaaaatattgtatatagcagtaatatcaaccacaatcaaaatgccatatattgagtatttgaatgggctagactctcctctgatcctttttttaaaagcatcattccactagtttccattgctattatccatgaagaaatagagacttagagaagataagtaattggctcatttccacagtttgtaagggacagagttgtaattcaggagcagaccacatacttcaaaccctcctgaccttgcatcatcatacagtaactgtgtatctattgaaaatctctagttaggtcccttctgagctttctgatctttgaattaattattttccatttctaacatttggccatagtgtcattttccagcattagtcacttacaaagatgtaggatgtgctattattttaaatccacattcatcaagaaaataggcctaattggagggaattaaggtagctgcaatttcctgatgattaagcactagaatatgttgctaggagaaactggagaattttcttttttgaaagtctgaaagaaaagtacaaataaggtttcaacaaactctaacttgaaccccagtttcctgatttgctaaatgaatggtttagagtaggtgatctcccttgggtctccccaaccctaacaacccacaagtctgtaactttaagtagcaattggatgttataacctctcaaggtcatttttagacttctatattttgcttcaatgattcttgactctctttggttcagctccacattctggagtttctttcaaatggagatctcataagagctattatttaacagtatcccaaatgtgcaatgtacagaattaaatacaaccatgcatttaagactttaacaatcatagttcatcagcactatgtgttctttctcctatttgattaaggttaaacaacaagatgatgtttcctcattgggtagcattttaaagtgtattgtgtatgtgacagatgagatcttataaatgcattaggcatgcttattttaatatctaagcatatgcaaaagttctagaaatattttacatgcaaatgtctggggctccactagggcccataatagaactccatactctgtgacttcaaagccctagtctcgacaactaatcacttggctatttccaaatcaaatttcttcaaacaaatcaaaggcatttgtcctacccaaaaaccaagttctgtggcaagtttcacatttcaaaatcaagctgcttattgagatattcatgcactgaaaaaggcacacagaatttcctttaggagatgagacacacctttttatgctccaatgaattagaaatttctcaaagagaattttaacaaattttctttacacacacacacacacacacacacacacmtgcacttcatcttagcagtaaaagccaagattcagaatttcagcccaagagatctttcattttctgaaaggttatgagcccctgagatttcattcctttcagagtcataattactgtgttgcttctgagttgttaacaataacactgattaaaaggaagacaaaaaaaagaagagatcgttcacatacccgtattaagtggcttcacaaactaggagtatttttaacaccacaacatttgtggtaagtacaacaaagtgtgtaattcactgggaagcagaacagaaaagatgggaatgataatgtcaaataactcactttacccagggctccctgtgggcaaggcactgggccaagtcctccacaggcattgttgcatttaatacaacaatttttaacaatttttaataaaagccctccaatgaggcacttttactgtagcatttttacccatgaggaaactgaggttcagagaagttgaataacttgacaagagtcacccagactcccaagcctctgttcttaattgctcaactatgctactgccttttcttttatttttattattattattatactttaaattctagggcacatgtgcacaatgtgcaggtttgttacatatgtatacatgtgccatgctggtgtgctgcacccattaactcatcatttacattagttatatctcctaatgctatccctcccccctccccccaccccaccagaggcccgggtgtgtgatgttccccttcctgtgtccatctgttctcattgttcaattcccacctatgagtgagaacatgtggtgtttggttttttgtccttgcgacagtttgctgagaatgatagtttccagcttcatccatgtccctacaaaggacatgaacttatcctttttatggctgcatattgttccatggtgtatatgtgccacattttcttaatccagtctatcactgatggacatttgggttggttccaagtctttgctgttgtgaatagtgccgcaataaacatacgtgtgcatgtgtctttatagcagcatgatttgtaatccttcgggtatatacccagtaatgggatggctgggtcaaatggtatttctagttctagatccctgaagaatcgccatactgtcttccacaatggttgaactagtttacagtcccaccaacagtgtaaaagtgttcctatttctccacatcctctccagcacttgttctttcctgattttttaatgattgccattctaactggtgtgagatggtatctcattgtggctttgatttacatttctctgatggccagtgatgatgagcattttttcatgtgtctgttggctgcataagtgtcttcttttgagaagtgtctgttcatatcctttgcccactttttgatggggttgtttgtttttttcttgtaaatttgagttctttgtagattctggatattagccctttttcagataagtagattgcaaaaattttcttccattctgtaggttgcctgttcactctgatggtagtttcttttgctgtgcagaagctctttagtttaattagatcctatttgtcagttttggcttttgttgccattgctctttgtgttttagacatgaagtccttgcccatgcctatggcctgaatggtattgcctaagttttcttccagggtttttatggttttaggtctaacatttaagtcttcaatccatcttgaattaatttttgtatacggtgcaaggaaggcatccagtttcagctttctacatacggctagccagctttcccagcaccatttattaaatagggaatcctttccccatttcttgtttttgtcaggtttgtcaaagatcagatggttgtaaatgtgtggtattatttctgagggctctcttctgttccattagtctatatgtctgttttggtaccagtaccatgctgttttggttactgtagccttgtagcagagtttgaagtcaggtagcatgatgcctccagctttgttcttttggcttaggattgacttggcaatgtgggctcttttttggttccatatgaactttaaagtagttttttccaattctgtgaagaaagtcatttgtagcttaatggggatggcattgaatctataaattaccttgggcagtatggccattttcacaatattgattcttcctatccatgagcatggaatgttcttccatttgtttgtgtcctcttttatttcgttgagcagtggtttgtagttctccttgaagaggtccttcacatcccttgtaagttggatttctaggtattttattctctttgaagcaattgtgaatgggagttcactcatgatttggctctctgtttgtctgttattggtgtataagaatgcttgtgatttttgcacattgattttgtatcctgagactttgctgatgtttcttatcagcttaaggagattttgggctgagacaatggggttttctaaatatacaatcatgtcatctgcaaacagggacaatttgacttcctcttttcctaactgaataccctttctttctttctcctgcctgaatgccctggccagaacttccaacactatactgaataggagtggtgagagacgcatccctgtcttgtgccagttttcaaagggaatgcttccagtttttgcccattcagtatgatattggctgtgggtttgtcataaatagctcttattattttgagatacatcccatcaatacttaatttattgagagtttttagcatgaaaggctgttgaatttcgtcaaaggccttttctgcatctattgagataaccatgtggtagttgtctttggctctatttatatgctggattacgtttattgatttgcatacgtcgaaccagccttgcatcccagggaagaagcccacttgatcatggtggataagctttttgatgtgctgctggattcggtttgccagtattttactgaggatttttgcatcgatgttcatcagggatattggtctaaaattctctttttttgttgtgtgtctaccaggctttggtatcaggatgatgctggcctcataaaatgagttagggaggtttccctctttttctattgattggaatagtttcagaaggaatggtaccagctcctccttgtacctctggtagaattaggctgtgaatccatctggtcctggactttttttggttggtaggctattaattattgcctcaatttcagagcctgttattggtctattcagggattcaacttcttcctggtttagtcttgggaggatgtatgtgtccaggaatttatccatttcttctagattttctagtttatttgcatagaggtgtttataatattctctgatggttgtttgtatttctgtgggatcagtggtgatatcccctttatgattttttattgtgtctatttgattcttctctgttttcttctttattagtcttgctagtgatctatcaattttgttgatcctttcaaaaaactagctcctggattcattgatttttttgaagggttttttgtgtctctatctccttcagttcttctctgatcttagctatttcttgccttctgctagcttttgmatgtgtttgctctagcttctgtagttcttttaattgtgatgttagggtgtccattttagatctttcctgctttctcttgtggacatttagtactataaatttccctctacacactgctttgaacgtgtcccagagattctggtatgttgtgtctttgttctcattggtttcaaagaacatctttatttctgccttcattttgttatgcacccagtagtcattcaggagcaggttgttcagtttccatgtagttgagcagttttgagtgagtttcttaatcctgagttctggtttgattgcactgtgatctgagagacagtttgttataatttctgttcttttacatttgctaaggagtgctttacttccaactatgtggtcaattttggaataagtgcgatgtggtgatgagaagaatgtatattttgttgatttggggtggagakttctgtagatgtctattaggtctgcttggtgcagagctgagttcaattcctggatatccttgttaaccttctgtctcattgatctgtctaatgttgacagtggggtgttaaagtctcccattattattgtgtgggagtctaagtctctttgtaggtctctaaggacttgctttatgaatctgggtgctcctgtattgggtgcatatatatttaggatagttagctcttcttgttgaattgatccctttaccattatgtaatggccttctttgtctcttttcgtctttgttggtttaaagtctgttttatcagagactaagattgcaacccttgccttttttttgttttccctttgcttgatagatcttctgccatccctttattttgagcctatatgtgtctctgcatgtgagatggatctcctgaatacagcacactggtgagtcttgactctttatccaatttgccagtctgtgtcttttaattggggcatttagcccatttacatttaaggttaatattgttatgtgtgaatttgatcctgtcattatgatgttagctggttattttgctcgttagttgatgcagtttcttcctagcctcgatggtctttacaatttggcatgtttctgcagtggctcgtaccggttgttcctttccatgtttagtgcttccttcaggagctcttttagggcaggcctggtggtgacaaaatctctcagcatttgcttgtctgtaaaggattttatttctccttcatttgtgaagcttagtttggctggatatgaaattctggattgaaaattcttctctttaagaatgttgaatattggcccctactctcttctggcttgtagagtttctgccaagagatcagctgttagtctgatagccttccctttgtgggtaacccgacctttctctctggctgcccttaacattttttccttcatttcaactttggtgaaactgacaattatatgtcttggagtttctcttctaaaggagtatctttgtggtgttttctgcatttcctgaatttgaatgttggcctgcctcgctaggttgggggagttctcctggataatatcctgcagagtgttttccaacttggttccattctccccgtcactttcaggtacaccaatcagacatagatttggtcttttcacatagtcccatatttcttggaggctttgttcatttctttttgctctcttttctctaaacctctcttctcgcttcatttcattcatttgatcttcaatcactgttaccctttcttccagttgatcgaatcrgctactgaagcttgtgcattcatcgcgtagttctcgtgccatggttttcagctccatcaggtcatttaaggacttctctacattggttgttctagttagccatttgtctaatcttttttcaaggtttttagcttctttgagatgggttcgaacttcctcctttagcttggagaagtttgatcatatgaagccttcttctctctacttgtcaaagtcattctccatccacctttgttccgttggctggcgaggagctgtgttactttggagggggagaggcactctgattttcagaattttcagcttttctgctctgtttttcccccatctttgtggttttgtctaccttggtctttgatgatggtgatgtacagatggggttttggtgtgggtgccctttctgtttgttagttttccttctaacagtcaggaccctcagctgcaggtctgttggagtttgctggaggtcaactccagaccctgtttgcctgggtatcagcagcggaggctgcagaacagagaagaataaaaccagaagtcctgggaagaagagtgatatagtctggatatttgtccctgcccaaatctcatgctgaaatataatcccccatgttggagctagggcctggtggaaggtgtttggatgataaagactgatccttcatgaatggcttgggacatcccctttgtggtaagtgagatcttgccaagttcacatgagatctggtcatttaaaagtgtgtggcacctccacccccactctctctcatttgctcctgcttttgtcatgtgatgtgccggctaccccttcaccttctgtgttgattgtaagttttctgaggcctccctagaagccaaccaggcgctagcaccatgcttcctgtaaagcccgcaaaaccatgagccgattaaaacacttctctttataaattacccaatctcaggtatttctttacagcaatgcaaaaacagccaatacaaagtggtaactaacaacatgaaaaccagggtaagcttagatccatgctgtatttatacaggctggcccagagccaacacttaatacatatttgttgaataaataaattcatgggtgaattcaagacattgtaaaataatttatggggcatactggccctttgacccccactagtcatccagtccattccagcatctgtcagttagttgtccatgagtctgtaatggaacctggcttccactcccagagccagctctgcacaaatttgtgaagaacaaaatgcctacctggcagcctctaccttctcttgttctttgctgggactgctattttccaagcctgtgttctctttcacgctggccattgactgtccagaactggctgttgactgtccagcaggcccagggcaagctccactcatagaaattgtgtratcatctttcttcttccttycttttctctattccagtcagaatttcagcatttctggaagcaattgcttgtttgcttatctgccttcttcttcacacagtaagatatgtgaagacaggagctgcatcattattatatctccagtgcctggcatcgtacttggaaaaaagtagttgtttagtcaacatttattacttaaattaatgaatgaatgcatggatggatgagtgttctccattgcaaacattgcttatcaagattgcaggtatttgagtactattactattaattgttatggtaatattgaacttatttggaagtattactgttggaagaaacatattttgcaggtgtgtgtgtgtgtgtgtaaaactattatgttcctcatttattcaacaaatatttattgagtatgtactatgtgacaggcactagggtatattattatgttgttgttgaccattatcttccaccatccctttaaatattttaggagagttctctctctctctctccctctcgctcttgctcttgctctctgtctctctcttcccctctttctctttttgcatgtggatgaaaattccaaaaggatctataattttctgcataatagacatcctgaaatgccttgacgtcagaaacacagtctcaattcaggaaatatgatttgcagttccatggaataatcaaaactctgaacttgagtaaatattaagccttctccacttccaaaggtggagccctgcttcaaggaggggtcacgggacttaggtgcgttctccgccctctccatgctgacctcttttctcacctgatctgcccagctcagggctggacaagaggtgggagggaagaaaagtggataggaccttagtctcactagttcttactcgctgttagttctctgagcctggcgtatagttccagttgtacctggttgaagaagcttttatgtcctcttcagagatcccccgacaggccatttctggtgattcttccctaagccccaggtagctggagggcacataccctcggtgtaaatcttccagacagactttcaggtatgatgtaagaaaatcccacacttgctgtctcactcacatggccctcatatgcttcatgggaaacatttacatccctgccccgacagcctctgggagttaggggtcagttaggcatcagtcctctctatctcctgacccgaaaatagcccacggacctttcgatgaccctcttgcatgtcccctctccagacctgaggtagaaataggaaggtggagatggctagagaggcgagagttttctgatgagattcctctcctgactctcctgctcaccacactctaggcctacttgaattctcaaagcagatagtaagttctaggatccagagacttaaaaaaaaatctgcatttagtaggttggccttggaaatttccattttattttgtagtctccttagacacttcaattttgggcacattattgtatatagtatatgatatatacttatatgttatatattatatataagttatatgagatatatatttatatatcaatatattgtatagatagtgtgtgtgtttctatgtatctcaagtgttttgaacacaacttgcggaatgcaataaaattattttgccacctctccctttaaaatatattcagttctttctctgctcctggatgaatactccacttgggcattctcagagcttttctaatatctcttggagaatagaaagtattctggtctcttaaagaataaaatgttgccacaatttgatattttaagtgtccagttccacgtaatagtcaaacctcccatcttcattcaaagttacacctactccccgtcttcccagtgggcctgcagtctgggaatatgatgcatttagtttcttttttttctttttttctttttttttgtttttttttgagacagagtttgactcttgttgcccaggctggagtgcaatggcgtgatctcagctcaccacaacatccacctcctgggttcaattgattctccttcctcagcctcccaagtagctgggattacggacatgcgccaccacgcccggctaattttttatttttagtagagatggggtttctccaagttggtcaggctggtctcgaactcccaacctcaggtgatccgcccaccttggccttccaaagtgctgggattacaggtgtgagccaccgcacctggccaatttcttttctttttcttgctcctcactgccctagctagctgctatttatagaccatttggagttgaagcaagagggttggaggagaggcaagatcttacatcaacagttttgctgtaagctggcctcatattttctgggtctggccaatattaaaactctttgtctcatgggatactttcagaggttctttgaaatgcccatcccaccactgtgctgggaaactttcagcagcacagttctcttgatacagatcatgtattttcctgacttgtttcctacttcttccacagtctctaggaattgggaggtggtgttcacccctggcttccacatgctgagttttcagtctcccatctcaaaggccccattgagcaggatggagtaagcacaacctcattctgagtgccttgtttgtaggcctgtgtttaatctaagggaaacataaaacctctactcctagaaactctaggagacacatctgccattgttaccactggaagtgagatgccagttcactatatctccccagctacagggcatagataccaaatttccaagagattttgtcagaatctctttcactagtagaagtgaaggggcaagcactcctttggaagagggacatcaaagtacagttcttgctaaagaaattccccctcaaattctttcttctctcaaaccttttatatcctcagtgtgcctgaattgtctacaagccatgtaattagtttttgttatctctttttcaagtcctacaggctggcctgttgcatagatcattttcgtctctgataaccgtgaaagctgagtgttcagccaaaatttccaattaaacatcctgatatgtacataattagatatacacaactgtcctgtggcatcagcagcatatattgttattcctgtttgatgtatgagtaacctaaagtacagacaagtgaagtaacctgcaccatgactagttgggttttctcactccatgtcttcactctttccctgactgagttaacacattgtccttttaagaacggactgaaggtccagcgagtagatgaacagaagtaaccttattggtgttgcacaggcctacaaaattactaagaagtccttacaacaaataaatataacacatatttcatgggaagtaaaataaaatagtagacttaatgatggtttagaataagtagtattaagtaaggaaaatagactgacataaaaaagaaacaaaaaaagactgaaaaatataggtatagtaaaaattaaaagaaaaacattatctattattgaaaattaagcatctgattatgtgataataaaagcttaacgtagtttgcccaggtttgaaagaaaactgattgacagtcgcttatcaccaataatgaaccccacctgtgccatagaaagtgtcttgggacaccaaaccacccgccaacccccatgttgtaacatcacagtagtacaaggatgtagatgcaccaacctaatttgaatgtgaagtagtccgtggtataggacagcatacgtacaagcccaccctgagggaaatactgagcaagaatctaggtgggctgaaaataagagaatgaataaaggaaggagaacagggttaaataaatatgtgagatgaagcatatggtttgagaagttttggggtcccacagatctattgcagggtactactggtaatgacactcatgaaccatgtaccttcacctgttctactaactattttcttgagtaaagaggtcatcttctggtgccttgggattgggactgcttaagtcatttctaaccctacattcttacttccctttagggttaggcctagaaggagaaagaggaaggacatgaaacaaagagttgacaccttctttttttttttttcttattttaaaggtaccatcagacctctcttatacttcattttacttcccaccacattcaatttcagattttttgttcaattgcttatatcatttagcaaccattcaaaattgaatgctgcctttggaaataaagaacatctgctctaaatcttgttgtgctggagattttgcaagaagctagagaggcagatgctgccatatagagttggcaaagtccaaaagacatgacttacaggcacaccaagcctagagaaactgataagaagtagtgctgcaaaataacccttagaggaggacttgtaaagcaaaggaatttagaggatactagaagtagaaatgtgatccaagtatgaaataaaaacacaatagctacagctataataccttcgcctctagtctcttttctcaagcctagtcttcactcctgattttgcactgtgatctcaaagtactgattcctgattttgattgaccatttctcaaatttcccctattaatttggaatcttctagttttctacatatgggccttcctggaccatacacagagaatgcctctctctctgttttaaatgggataacagatatagatgttatctccccagaataaaagagagtacaaatgttgggtctgacttctgtcttattattattcagtttggtctgatttcaggatctgtttaacatgtattgatttatctgttaggcccactttgtcattttaacatgcatattaaaaaaagaagaggtattgaattcagccattcagatctttttcaaattggaagcaacttcagaaatctccacaatctgaaaatgttcctgtgtgtagggccatttcctcaggggatatgaacagtttcatgaagatgtcccacacctccagatttgtcctctttttcatcagagctcctttcttatctttgcctgggcccttaggagggctttctgccatgtcagtatcctgtcaatttctacaactctatgaagtttttcacatagtagaatatattgtcaaaatgtcttgatgtcttattacaacctttacccaatctcggcagcaggatttctgaacacactcctggtgcctttttcctgatacatttattatctattgtgagagttaaatggtatctcgaccacatcctgttcttcctagaatccatatcaccttaaacatctagtagtctcatttctgacattctggtggggaaacctatttttaggtaaagttgcttatttttgttggaggaacgtttgattttactaagtctcttaagtttcttgaattaggttttctaatctatttgttcattcacaaatatttattgagtgtatattagagttctccaggggaataggactaataggatgtgtgcatgtgtatatatatatatatatatatatatatatatatatayaywcacacacacacacacactttccctactttcttccacttattacccttggctgaagcatgaaaatatatttcatgtgtataaacacacacacacacacacacacacacacacacactttccctactttcttacacttattacccttggctgaagcataaaaatatatttcatgtgtatgcgcacacacacacacacacacacacacacacactttccctactttcttccacttattacccttggccgaagcatgaaaatatatttcatgtgtatgcacacacacacacacacacacacacatatatatgtaggaagagatttattgtgaactggctcatgtgattatggaaattgacaagttctaagatttgaagtcagcaagtaggaaaccccaaagagccaatggtatagttcccatttgaaggctggcaggcttgagactctgaaaaagcagatgtttcagtttgagtctgaaggctgaaaaacatgatgtcccagctcaaggcagtcaggcaggaggaaattccctcttactcatgagaaggtcagtctttttgttctattcagatcttcagcagattggatgaggcatcccccacattaggaagggcaatctgctttactcagtctactgattcaaatgttaatctcctcccaaaacaccctcacagacatgcccaggataatgtttgaccaaatacctgggtactccatgagccagtcaagttgacacataaattaaccgtaacatgtacatactgtgtgtatgccaggtacttacttaacagatccttttttactgttaattttattattataaatgtggctgagaaaacagtatattcttcgtaatattgttgcaaatgaatcaggcagatatttaagggtagcatttcttgttctgttgggaagatacgtatgactgcctttgtcatctcaaacaaagttgcaaaaagtgtcatgacttagggtaactaatggtaagtaccatggtaatcaatccctaaattttctagtttaatttaaaaaaaattatttctaacttacttcactgtctgatgaaggccaggaaactctcctaggtaacttacctccaagttgtagaattcaggcccctttcatgtgtttaaatataacctttttttcttcccctccaactccccttcctaaagataaacttttaaatcaataggtatctcacagtactttgtgaaggaaggtaaaataaagtcaactcgaaaattgtatatttaattgattactgacctctataatttaaaagctgcttgatcttggacaaataattctttttcattgatgatcttggaacccagtgggaaagaactacagaacgaaatggtaaatcaaatatcgaagatgttttgttacttgaggaatcttctgttaggttggtatagcggaggaaaccttccaattgagttttgagtttaagtaacaagttttgctcatcaagctgggcaatctgggcaaaccaattaaccactctgggctttggtttcctcatttgaaacttagcatgttagccacactgattttgctaacatcacttccaaatcaaaattgcaattattctagtagaccatctctttagatctggattaaggatgaggcctacttggaggtgaaggaatcaagtagaaagatgtgaaatggtccctccctccatatggaaaaatctgcctgagatttagacagacactattcaaaactgtaagtccactgagcaccaactgcggtacaaaaagttaagttcccaggtctcatttacagagtagtagctgcttattagttatcacacgccagtgattcagctggagaagctaaggcagaaggcaattatgtaaccatcacaaaagggtatgggggaagcacttgaacccataccgggcattctggcttctggtcagatgcgagggatggattcaatgtcattttaatctttattcattgtttcaatctgttagaactgttatagtttggagctccatacagaatgcagatttgttnnnnnnnnnnnnnnnnnnnnnnnnnnnnnnnnnnnnnnnnnnnnnnnnnnnnnnnnnnnnnnnnnnnnnnnnnnnnnnnnnnnnnnnnnnnnnnnnnnnnnnnnnnnnnnnnnnnnnnnnnnnnnnnnnnnnnnnnnnnnnnnnnnnnnnnnnnnnnnnnnnnnnnnnnnnnnnnnnnnnnnnnnnnnnnnnnnnnnnnnnnnnnnnnnnnnngactgagactatttccatattcttatctgttaggtaaatgagaaacaaatgacctctccctatgtctgcatcctgaagtcactgccctctaaggctgagtgctctatggcttcgggtgggagctttgtccaaagctggggccattctgccctctggcttcttcaaataggtgaagaaagttgaaaattttggtatgcattcttctatttttcatttatgtagaaggatttgtttttaacagttacaatttggatccttgccaaaggtgccagatggcctgctttcttcgggagagctggtcatgagtattaataaccctaatttggaattctctgtggaaggggtagccacaagatttggagtgggaggaaatgtagaatcattgataacaagtgaattcagagaaaaagactcttgaatcttggtcaggagtgagacataacggtaggcaggcagctttggggggccacaggagaagcctgatgtacctgcacctacccctcttagtcttggggagccttcccaatctactgctccacaaattaagagaaatagagagaattaaaagagagctctggaagagccatagcaaagtccagagttaggttattgagctcaagtggaaagggataaaataaatggcttccagaatgtgaagaaattagctgcaagaatgtgaaactaaacagtggatctgtgactattcactttcactgagatgaaggagcaaagctcaacctagtatttagaaaagatttagggggacatagaaagaaaaccaacatctattgagttcgtgttctcctcccgttacttggctaaagagtggttaggagtgagcctgacatatattgtttctttaattcttttgcctagcccagcaggtaggtatacatatcccattttggagaggaggcagctatgtgtccagttaatgtttgtaaatttaaagccactatcatctgcatcaaagcccatactctcaacggctgaagactgatatctcactctccttcctcatctttccaatagaaagcaaggagttccattcagcacctctatgtgggcagtattgaagaggatgagcctttcttcctgtctcacttgcccttacgctcttcaaagggagggcctcatctgaaaagggagatagcctgaagccctttgactgcattgatcagggacaggaccatgatattgttacatacctaggtcaccctatggctgagctctctcttatgccctttacaccaatctgtgtcctgctccaagggccttgcccctgtgactcttattcagtaaacaggccacacagctgcttctggtagcccaggcagaactctgagcagaatcctggtctctgtttcagtttgcacctggtggccaagtcagagttgtaaagtcccaagatttaagtttagagaaggttgtcagagatcctttcatattccccaattccttttatcataaatacagctgatgctctattttcatcaccagtttgctctttctttttatcctcaattgattagattccctaggaaaagaggagtgagtacataggtaatttttctaaacaccaatctctactactgatgagacaaatggggagctttccaaatgtgagggtcattcaggtgacctgatggcttatggtgactgggatggtttaaagagaattttgattaacaggagaaagagttttttaggaaacctctaaacttgcttgaagctgatttagttgatcctgcaaagctgcgctatttttcacctaattcgagagtttattttagaggtattcatcttctaaaaatattttacctttaaccaccattttcggacataaactactttatcatttatgtagactttgaggagttaaaagcttttggtaaatcttgcctcctttgattcgcaacaaagcagaaaaaaaaaaaacggagaagaaatttcctctttgtaaaggaaaaaatttatttaattttaaatgacttgtccaaggtcacttggctggaaagtgtctgggaagagactctgcttttctgtgttctgagttggccttaaattattgcaatacttcacatacaaaaataaaaaagaaagataaatttgattatataagaatgtaagtctcctgcacagccataaatattaattaaacaatataagataaataacaaataggggagtaatttaccccactagaaaacagggttaattttcttaatatataacaatctccttgaatagcaataaaatgtataaacaaccaaatacaaaataggcaaagaaggaaacatgcaattagtcaatgaccatgaaaagatgcttaaacttatatagttaaagaaatgccactgacttatcatttttcactaactggcataattaaaaatcttgatgtaatgttggtaagaatatggggaaaaactgttggtgggagtataatttgagacagcttttccggaagggaattggcagtatttattgtaacctattagtaatgtctgcaatatctggtagggtgtgaacattgagttccattagcagaaataaagtattcctggagttacaggataaagcacttatcaaaccacacagagtccaaatcatgcaaatcagaaggcttcctctctaatcaccttattaatcccctctcttagcttcctccacagctggtctttttatctttcaggtctttcccaggtttgcagcttccacgttctcggttctactcagttctcctttggtaggagcctgttttgttctttggaccttgggctttagtggaggggaggggtccttaggaccttcacagtgaaaatgtactcagtaataaaacatttcccttgctgattttgactactacttataattcaaatgtgctatgctaatagaacctccctcttagtgtgcaagagagaaaatgaaggaggaatgaaaaattataatcaattacaatataaagtggcccagaattgacagatggaggaatctattccatggatgtacttgcaacagtatctgaagatacatctgagaaagtaattgaaactttgtaattgcagaacataaaatgtaaatagccgtaaatagacaaccgacaaaataaagcatggtgaatttctaacyggaatactatgcgatccttaagaatggggcagatcttccattatgctctaatagaaagttacctagaatacaaaagaatctcatcttcttcaatgtggagatttaaaaaaaaaagcctttggccaacttaaatatacatgcttttagaatcataaatgaaattattgaatgtttacttatatttaatttattaatctagttacacattcacatttaagattgcatatcatataacctattacttcagaaatatttctactttttgcatttcttgaatcagtattatatgaatacttcacatacatttttgacattagtcttttacaagctggagctgctttctgagtcatctgatacatattttttcagagtacattttccttatttccatctgttacttgagatacagcatttgttgacccacatatgatgctatcactggcaattttatcacaaactacaagtacccattcatagaacatcagtaaaactgttttattaagattcattctgtagggctgtatgttggatctcacaacacaactacttattctgttgctttgtaaataatctttgaaaggcttgtttttacaattttaagcttgaagctttttgtcttactccaagaaataaagactaatctgtgataaatttattttccccttttaatcaatgtcacaggtgaccacaataggtatacaaactcatgttgaccgagattgtttcaggctaatgtgtctttcccaaacaataatctttagttcaaaattaagtaataaagaaagcttctcataatctcagagactttgcaaagacctggtgataattmcctttcttttctgaaagataattttagcagagtaacctcatcatttactcaggcatttgtggaatgtatatagatgtacactcaagtattcaagatatattctgaagtaaaaggacagattgtagaatagtatttacagtgaacccatttgtagaaaataaaaaggctacaccagtaaatgttatctataattatatgtaactacatattcataaacccttcctggaataatacattgtgattaatcctaaggtagtggggggaagaccccaggaggaggaggaagactggaatgttttctctttttacccttgttccaatgttgtcagtgatgtattaaatgaaaattggttttaaaatacatgcctttccttttacttcctcccctctccctccccctacaagctatttctcatttggagttttgcttgctattatcttgagccaaattaaaccagtgatctcctgatggaaaaggccagagcctgttcaatgactccagcccctttcctgtccattctcctctggagccatcaccaaagccctggtcacactctgtaatttgtaaatcctgaaattgtggtttgcaaggcaaatgattcagagcaagggctttatcccgggatcttatcctcctagttgcacaaaaacaaacaccagggacaagaaaattccttccttccttccttctttcttttttcgtcttctctttttattctgggtaaagggagctaaaaagcaggagaggaggtcagtttgtggaaaatgaactgaaggaagtgaattgtaagagatgggtcaaagaaagaaaaaaaaccacgcctaataaggaagctaactgcagtttttccaaataaattaaacgaaagataaagaggcaggctatcaaggcagcctaaataaggacacctcaaaaggaagaacgaggaacaaagcttcagaagcttcaacaggagaacaaagaggaagaggaagcggtgtttaatgagtgcacagtatgaagccggaggctgactgctttggtttgctgttagaatctccagctaacagtgcctaaacaataaaagtttatttcttcttaagacaagcagtctggatataggcagtcactggaattgattcaacaaatcaatgaaatcagagctcctgatcagttcagcaatttctgtgatacttttctcctcttcaatgttcccacgttctgagacggctgcagcagcatcaagcatcacatactcccacaatccactttcaaagccttgagacaaagggcaacacaggccagtgttgctcctcctgtgcgcctcttatcaggaaaaaaaatatctttctcagagccccacagcagcctccctttatatctcatgggccatagctctgtcacaagctcaccctgttccagggattgcctctacctatttgagatcaagggatctcttcctgttacctaaagaaaaattagagcactgttaattagcaagaaaaggtgatgtcttggaaaaagcagccaacaacttctgccacattaaataatctccataaaccaccttttgaggtaactattattattgccatttgaattagtttgctagggttgccaaagaaaaagaccacaaactgggtgcctgaaacatcagaagtttattgtctcatagttctgaagactagaagtccaaaatctggatgtcagcagagttggttctttctgagggctgtgaggggcagatttgctctagacctctctctttggcttgttaatgagtcttttcactatatctcttcacataatcttccttctctgcatgtctgtgtccagatttcctccttttatagagacagcagtcagattggattaaggcccatcctaacaaccaagtaagttaacaatttcaacttaattacctctataaagaccctatctccactttctgaagttggggggtaagtatttagacgtataaattttaaaagggcacaattcaacctgtaacaccattgtacagaagaaaccgggtagtagagattagataacttgcccaagaccacagtagctccaaacgtacacctgccttacaacaaacttgtgttctttccaccataacacaagaaaacaaaagttaataagtgagaaatagagtgaatgaacaatattaaaatatttctaatgcatatgacagaggtgtaggactattataaggatgtgtgggcaaaaatacagattttcagctaaaacattttaattcgtatctcagtgtaggtaaggttgaaattaagagttgtacgctaaataacctgaaayggaacttacaagttgggtgctttaagctctatacaccaaaatcaatgaagccatgaaaagaatataaggaagggggcagagaggataactggctggccagcactgtcagcaagcaggatttgccaaagagaaagtcatccaatggcaacacctctctcagagctcactctcttgccttcacttctttgttctgaatgtgtgtcccactgattctcgcattcctacaaacttgcatcctgactgcccaactcccctccatttggcttagctctgccgcagtcaggcaggaagaacgcccactggggcctgctcatttgcttttacagttttataccactgcaacttgctatgcctctctttcccacatctagggcaccctttagataggaatgctgggttcattcctgctgaggtgttactgactggtaatagcaaaatctgttcctgtcttgcaggatgaatgtgtacttttacagagaatacagtctcaattcaaagaattcttaatatttttttcccacaaagtgggtagtctaataagatgtagaggagaaggagctttgagaaagctggagaagtcttgaaatctggacaagtgtgctagacactgttagtgactgcctgctctaaacattctgttcattgcagtagcaatagtagtagtagtaatcagctgaaatgtgtgtttggtcctaatcaggactgaataatctggaaagtctttacaaactcggctcaaccatcccctcttccagaaggcttccctgactayatcttgttcactttctgggttggttgtcctctatggcatcctcacagttccctatccattctaatgcattgtcactgttggtttattggacattcttccccaggcaaccacaaacttttcagaggaaggaactgggttttttatctctatatggcaagtaccaagcccagaacctggcatgttgctgatatttgtattaggttcctaggctgccatagaaaattcggtggcttaaaacaacagaaatttattctgtcacagttctggagaccagaattcagaaatcaaggtgtcagcaatgttggtttcttctggaggctctgagaggcaatgtgtcccatgcctttctcctaaattctatggctgctgactacacctggcattccttggcataaagcagtgtaactcccatctctgcctccttcttcacatggaatttccctgtgtgtctttktatctgtttcttcttctcttataagaacttgtgattggatttaaggcccaccctaatccagggttatatcatctaataatgatccttaccttaattacatctgcaaaggcctttattccatgtaagacgacattctgaggttctgggtggacatagttttggggagccaccattcaacctgatacaatattgaataagtatctggggaataaataaatgaacagtcaacatggctccaatatctagtgtgaagaattatactttcataccacatgaaagtaatctgtatttaaagtatacaagaaacccaactgatgctcgaggaacctttatatgcttgtgttaaatggtaagactaagttactttgggctttcactgtatagagtcttagatttgaaagaacctaatgtgttctttggccctggaatgtgatagatcatattaaagtgaggttttaatattgtaagatttatatgatttgctatttgagcttttctaaactattaagtagtagtatctattagtgtcaatactaggtattcagttattttaataagaagcatattaataggatcacatgcactgtcatttttttctatcgtacttcagatgtggcctcattcaaggatagagcagtcagaggcttccagtatttctctctcatacggtaatttcacacttgaaactcagcatacacaatgaggaaatagatatctttccgtcatagtcctgctaaacagaaaacaattctctattagttaatgtggccaaatattttctggtacctagtagaagcattatttttagtagcgatagaagcaggaaatgggaagccaaagctttttttttttttcagacagagtctcgctctgtcacccaggctggagtgcagaggcgcggtctcagctcactgcaacctctgcctcccgggttcaagcaatttcctgcctcagtctcccgagtagctgggactacaggtgcgtgccaccatgcccagctaattttttgtatttttactagagatggggtttcaccatgttggccaggatggtctcgatctcctgacctagtgatccacccaccttggcttcccaaagtgctgggattacaggcatgagccactgcgcctggccaccaaaactatttttaaaatttgggtatatgtcaaatagcatttagacattaatcaaactacagcttgtcctacatcatcaattattgacaccacagggaatgattgtcattcacttataaatagctccaagcaaaacctagacagggtccagaatggcaagactcagtctaactttagaattttatttccaaagaagcaaagatctcaataagtttggaagtagaatcacctcaacatccctggagaagcagatctagtccctctggctgtgcattgcttgaaatgcagtgttgtatcatatattaaaacactgaaaatggagttcagcatggagagccctaggctacactatcatgaatctttcacctttgctaatcttaaagtcagaaataattttaaaatagatgcatggggcaacgtgtgcatggggaaagtgggtgcagcttaaatttcagtgccaggaacagtgtcgatttggccattcatacctgtcaatagctgctgagggtaaccttcttatttaactgcagagaaaaaaaaagatgaaatatgttcatctcctaccttgagacataatcattatttaataaggcactatatatgaaacatgggctttatttgacacatggatatgctaataagctccagaatattgctaggctctttgaaatggaggctgtgagatcatgatagtcagtcgcttgtttacaatacatgtagaaccctttactctgctgaatcttgaggcccttgcaaatttgtattagctgatgtctacgtggtgcagggaaagcaaccatttctggtactactgacataygacagaagtgatattgcattaaaatggaaaagaaagagaagactcatatcccaggaaggaaggaatctgggcctgtctcaggcaaaactgtgaattaaatgaaagatctctaaaacttcatatcttggcctaatggtcacttttttctttcagtggtctgcttaagcagattttaattgccctgaggctttctttccctggctgtgtgcatcttcccagtcacctttgctgaggttatcaacatagcaaaaccctccctaggttgtgccacatgctccagactttcccaacccatttctcaaaaatatcaagtaattactgcgtttggttccatattgggggatttatctaggaatatatcgacatgcttttctttccaagacacatttatacttgaaggtagactgcgaagttttattccaaaggagacactaataaagggcgtttcaggttccaggcaggtgccttggctagtgaaaagaggcagaccgcggtagacaatatgtctaaagaagcttggatcagatgacaacactcaaatcatgtcacaaaggcaatcagctgtcacctctccatgtagggaaggccgtggagaaatgactggaagtcaatagaagtaaatatatatgaatgttgacatagtggagtggagccttggagcatgagtgaaatagcagaaataaatatttaaagtgaacatttctttgggaacaatgaaaagtgacatgcagttgagctctggcagaagttttcagaaagaagcaagcaggatcaaacacatgcctctgctgttcattatttcacaaacagacaaaactcaaattctgactagtccagagctatatcgctcaggagctgctgctagcttcaatcctgttggtcctaagtataaggtaggtgaacttggagggagaggtcgctggaggaggtaatatggtcaagtaaccagtgacacagctcaagaaatcatctttattggacatatttattcttttcacttcttttttccttttcttttttaaaataaaacagctttattaggatataattcacatgctatataatttacccatttaaagtgtataattcaatggcttttagtatattcagagttgtgcaatcattctcacaatcaattttaggacactttcaccactccaaaattaagccgcatacctcttagccaacacctctcaggccccccaacacttgctgggcccttgaaaccaccaatctactttctgtctctataggtttgcctattctggctattccatataaatgcactgataaatatgtggtctattgtgagtgacktaatgttttcaaggttcgtctgtattgtagcatgtatctgtacttcattcatttttatggctaagttatactctgtcatattatggaaataccrcagttcatttatccactcatcctctgacagacatttgggttatttctactttttggctattattatcatgtggttatgaacattcctttacaactctttgtgtggacacaggttttcctttctcttgggtaaatacctagaagtggaattgttaggtcatatgagaattttatgtgtaggcttttgtggaagtgctagactgtttttcaaagcagctgtacccttatacattctcaccagcagtgtacaagggttccaatttctccacattctaaccaatatttgctattacttgtcttttttattatagccatcctagtggatgtgaagcagcacctcactgtggttttgatttggactttcctgttggctaataatgttgagcgtcttttcatgtgcttattggctcctttcacttctttaccttgactagtagactcgccttagatcagcggtttccaacctttttggcaccagggactggtttcatggaagaaaaattttccatgaggtgtggatgtgggggatagcgttagattctcataaggagtgcacaacctagatycgtcgcacgcagagtwcacaacaggattcgtgctcctgtgagaatctaatgctgctgctgatctgacaggagatggaactcaggcagtaatgctcgcttgcccaccgctcacctactgctgtgttgcccagttcctaacaggccagggacaggtaccggtctgtggccctagggttagggactcctgccttagaggaatttggcmcactactatagttatataatgacaggaaaatttcaacattctaatctctgtggacaggacagctcccagagtctgcacagaaagacctaggaaggcrgcatygtgtttgaagttcggcacctgggacccagtattgctgaagcatarccccccggagtctacccctacagccccagtgttgctgaggaaggcatccaaagagacttcgggaaggrtagtcagagaatgcagagagcttcacagcaagcaccagccaggggcttagctggaccccaggtttctaggtgatcatcaggtagcatatactctgtgatcttctttcatcctccccatttattctctacagttttacagctaccggaacacactgtcacttttacattatggaaaagttgaaaatattcagctgatttctgagaaactgggcatatttctcattgaagaaccaataagaaaattttttgtcacatcaaagtagacataaatttccaggataaaccagatggtgagtttagagtgtcaacttagtaaggacaatatgcatttagaataaatactttaccaagtaggacagaataggctaggtctgggatgcttctaacatgagtctaagagttgaacagcttgtcatttttcaactcgtcgataaatgggaatggaattatttattctggaaacaccaacagagttgttcgtcaattgttgatgtagtgtaaaatgattttaatgcttgtggtctaagaaagtatctctatcactcagtgcagtctaggacaaataaacaggcaaacaaacaggaaaacacaaattggaagataaataaaaggggcagcaggcagtgagtagttgttacctaatttgcattcaaagaatggtttaaagaatattggcaggaatccagtaaactagyttgagtcagatgaacttcatattaagaatgggtggaaatktataatattggggtttggctgatgctacaggattttcttggtcagaatcataaaaagatagagaagccatgctaattctgacactttgaaatgtaagagcagttcttgaggtattgaatctacatgaaagggatggaataaactggaaatgatttataccaacgagatttgagttaggggaatgtgttagttttctattgctgctataacaaattatcaccaactttgtggtttaaaacaacacaaagttattttatacagttcgaagttagaagtctaaaatgggttgttagggctgcattccttctggaagatccaagggagaatctatttctttttccagcaaaaaatgcaagactgcctacatccttggctcayggccccactccaccaatttctgcttccattctcacatatcytttcctcacattgctgtttctctatttctcttttaaggacccccatggttacattgggccagaataatccttcaaattcaagatccttaatttaattgcacctatgaagtcctttttggcatgtaaagcaacatattcacaggtttcaagtattagagtggggatatctttagggagctattattctatctaacacagggaaaaaaaggattttctcagtcctttaagtatcagcctgrcggtgacagaaagtaagtgtttgttttctgagggctgagactgatcctgtagggcacagttaaaacatagtggttctgccctgaagtgtcatctgctgctgatgaaatcaaaggcttggatggcatagcttttccctgttagagtaagtaatcacagcattaataggtaggacatgatttaacccacagcatactaggagctctggccaacaactttaaaatgggtcttcaccatttggaggcatgattatgagctaaaaatactacgtgtaagayattgtggcctttgatttctacccttcaccaaaaatatcttgaggactttgtgccaggtgggtgctaggaaaaaaaaaaatgagacacagcctttgcagtctagaagccagcagccagttattacacataaaacacaagaacatattatataggaacaatagagtgaggtatggaaccagagagacggaacctagaaggatggtccaagaagtagaaagtgaagacagagtatagtggacccaagaataataataacaacagacagttatatggtgtttcctctaggctatgcactatctcagatctgtacacagatgctccttgacttatgatggggttatatttggataaacccattggaagttgaaaatagtggaagtcaaaaatgcattcaatactgtacacctaaattaccaaacatcatagctaaacctggcttaccggaaacatgctcagaacacttaaattagcctacggttggacaaaaatcactaagcacaatgtgcattttatgatgaagtgatgaatrtctcatgtaatctgttaaatactgtacaggaagtgaaaaccagaatggtcgtatgagtgctcaaagtacagtttctactgaatgcatgttgcttttgcatmatcataaaattaaaaaaactrtaggtcaaaccatcataaattggggactatctgtatgtattaactcatttaatcctcataacccaagcctggtaaattggcttcccagatggggtttctcaaacacatctctattttccctcccagctgttaccactgtagttcaggacatcagggtcttttgccaaagcttcctatctagtgtccctgccctctactcttatcctacaccaaagtgatccatttataaagtaaatctaactgtgtgacttaaaacccttcaaatcttgctcagaagagagctgacatcctttaactctcatttgaagccctcaagtgtctgacctcagtcctcctctctgacctcacctccaccttctcttttccacccactctcatcagttacaatccagaaagagtggattccgcctcctggcaggcagctgtgctgtttcaggcccatggacctgcctccaccttttaccttcccccactcactaactcctgctgctgctcacatccctagcctgtgtgcggtgcccctcccctttcctcccacagtgacctgarcacagctcrggtatttatgcctctgttctccccggtaggtttaaagattctttagagcaaagatacagaattttcatcttcccttttccagcccttgtgcagtacctggcacataaaagccattcagccaatgtttgttaaattcagctaaactgagcaggaaacgtctcccttgtgtgtggctgtgcctttttgccattcagagagaggcagtacaatcatggtgatttgaggacacttaaaaatggaaagggctccacatcgaaggcctcttgaatatagtgaaaatgaatatcaaaatcaatatgccgttcagtttagggatatgaataaatgatttcaaatgaattcaattttcctctcaacattaagtggtgaaggaaaataaattattggataatgtatttgaagtaatagctctcttctaactgttcctacaatttgttgttacttgtctttggacctctgtgtgtcatgtgatactgtgtgtcatggcgatctgagaaatatttatctctcctcaccttctaaaggtcagagactgtatcttaggatccaagtttggaattatttcctgacattaatctcttcttcctctgtgctcccataacataatttcttctttttaaatggttgttttaaakagaaaaatgtcgtacttgaatattttgatttttatgggggaaaaatttactactatgaaaaamatagaataaaactatgtgaaagaacgcctccatttctccttcaaacccacactgctgtccacaggtaatccctaataagagtctgttcctttttctatgcatgtatgcatccatgcatacaccatgtatttatgtgttgttttttgttgcttcttgttagtagataaaattaaaattatactctcagtattattctaccacttgagtttttttaagatgatacttctaaaacttttttattgacacattttataattacacatatttatggtgtacaatttgatattttgatacacatatgttgtataatgatcaaatcaaggtgtttagtgtatccatcacttcacagtggtggaacattcaaaagcttctcttctagatatttggtaatacacaataccatcctattaacaattgtcacctactgtgcaatagaacaccaggacttattcctcctgtctaattgtaactttgtacccgttgaccagcctctctctatcctcccttcttgctcctctccctaatctctggtaaccactgttttactctctgcttctattatatcaactctttattyatatacacacaaacacacacactttttttcttttcgataacagccattctaaatggagcaaggtgatgatatcgcattgtggttttgatttgcatttccctgattattaatgctgtcaagcattttytcatgtgcctattggccatttgtgtgtctcactttttcttttgaaaaatatctatttttmrrtatattgggttttttttcttttgtttaagtccctaatatattctggatrttaactccttgtcgaatgtatagtttacaaatattttctcccattctataggttgtctcttctctttgttaattgtttttcttgctgtgcaaaaccttttaagtttgacataattctatttgtctatttttgcttttgtgtcctatgcttttgaggtcttatttttaaaatccctgccatgcccaatgttgtaaagcattccccctatgttttcttctagtagtttcatagttatagactttacaattagcctttaatccatttagttggattttgcatgtggtgagaagtaagggtctagactcattcttctgctcgtggatatcctatttttccagcactgtttatttaaaacactgtcttttctataatgtgtattcttggcacctctgttgaaaataagttgaatgtagctaggtgaatttatttctgggctctctattgtgttccattgatctgtgtgtctgcttatatgttagtaccataatgtcttggtacttacagctttgtaatctattttaaagtcaggtagtgtgatgcctccagctttgttctttttgttcaggattgctttagctatgtcgggccttttgtggttccatataaatgttaggattttctttttctatttctttattttgataagaatttggtattttggtattttggtatttggtgttttgataagaattgcattacatctgtggataacttygggtagtatggacattttaacaatatcaattcttctaatctataaatatgtgatatctttccatttacttgtgtcttcctctatttctttcctcagcgttttatagttttcagtgtagagatctatcacttccttagttaagtttattcctagatatcttaatttttggaaactattgtaaatggaattgttttcctgaattctttttcagatagttggcttctagcatacagaaatgctactgatttttttgtatgttgatttagtgtgctgtgacttcactgaattcatttattagttttaacagttttgttgtggaatctttagggttttctatacataaaatcatgtcatttgtaaatgggaatagtttgactttcttgtttccaaattgcatgccttttatttcttcctcttgactagttgctctggcaagcacattcagtattgtgttgtgggtttgtcatatgtggcctttcctgtgttgaggtacataccttttatacttaatttgtggagagtttttatcacgaagggtgttgaatattgycagaagctttttctccrtttatttaaatgatcatatggtttttttcctcttactttttgttaatgtggttgtatggtttggatatggtttgtttgtccctaccaaaggtcatgttgaaattggatccccagtgtggcagcactggaaagtggggcctagtggtaggggtgttttggttatgggacagatctctcatgaatgacttggttctattctcagtgagttctcactctctcaggagtggactggttcttgcagaaatggataagttccagtgagagtgggttgtcataatgccaggatgcccctcaggattccctctctttacacrcatatgctcttcctttgactttccctgccatgttgtgacgcagcaaaagcccttgcaaaagccaagcatgcttttgaacttctcagcttgcagaactatgagctaaataaaccttttttctttataaattacccagtctctggtattctcttattacaacaccaaataaactaagacagtggtgtatcacatttgttgatttgcatatgttgaaccattcttgcatctctgggataaattccacttgaacacagtaattgatctttttaatatgctagtatattctgtttgctagtttcatgttgagaatttttatgtctatgtttatcaggaataktggactttagttttctttttttgttgtgtccttgtgtggctttggaatcagggtaatgctgcctcataaaattagtttggaagtatttcctagtcttctattttctggaatagtgtgacaagcatcagtattgttctttaaatgtttgatagaattcagcagtgaagccatcaggctgggctttktattttattttttgatggagggtattttattactgattcaatttcctcactcatcattgatctgtccaaattttcagtttcttcataatttaatcttacaatccttcgtatttctgtgatgtcagttgtagtgtcaccttgttcatctctgacttgaagttttgggatcttatcatattttttcatagactagctaaatgtttgtttattttatctttaaaaaaaccaactcttttgttgtkttttttaattttttagtctctgtttatttctgctctgagctttattatttcctttcttctaccaattctggcttagtttcttcttgtttgtctattttcttgaggtgtttggttaagttatttatcaggaatcttccttattttttgatgtaggcatttattgctatgaactttcctcttagaactgtttttgctgtgttccataagttttggtatgatgtgtttccattctcatttgtctcaaggaatttttaaatttccctttygtctacttacccagttggttactttggagcatgttatttaatttccatgtatttgtaagatttccaaagtttttctcgttgttgatttctaggtttgtaccattatggtctgaaaagatacttgatatgatctctatgttcttaaatttttaagtcttgttttgtagactgcagtatcatttatcctggatgttctatktkcagttgagaagaatgtgcattctgtagctgttggatggaatgttttgtaaatacctgttaggttcatttagtctgtagtgtagtttaatatgatgtttctttgttgattttctgtctgtatgatctsttcattgttgacagtggagtgttaaagtccgatactattattgtattgctgtctatctctccctttagaactaataatacgtactttatatatctgagtgctccaagctggctgtgcaaccatggatgggcatgcatatgctggaaagctgcacagtgcctttctccagtaatgtagggctgacttcaagccagctgttgtgctggaaatgggtatgtgcaggccaagaggcctttctgatgtcaaattctttgagttatttttttaaaatgttacaatatgccttggagattatagatatacatacatacatgtatgtgtgtatacatatattatacatttccttcttttttctattgtttgcttttgatgagcatatgsttttcctgtttgcttttgtttggtttggcttaaactttttaaaataggtttttataattggcaattaaaaatatacttttttgctattaatgagtatatatgtctttcgtataaatgcaagcttttttacacaaaagatttctagaagtgagcttgctatgtcagaggatatttgcattttatattttgatagctacactctgacagatagcttcaaaaagaactgtgcttagataacatctgagcttgctcttttcaccacattttcaaaaatagtatcaacctttttcttrtattctcaatctaatgagcaaaaagttactgtcttcttattttaatttttattccctctgctagtgagttaacaaacaaacacagcatatgtctcttagttcgyrtatattttctcttgtaaatggtcctttgttcagatttctattagcttgtctttatatttttttgaaagagctctgtataaaatgaatattaaacctttgtatattatagatgttatgactgtttcctcctagttatcttttaactttgttcactgtagctttttccacatggaaattaaaatatatgtatagtaaaatctttcagtcttataaaaattttttctaagtccttttatcattttctttttaaatttgatatctggtgagacagattccaattaattatggcataatttaaaaatttctttgggattcttgcctattttattgttccatataaaccaacaaattatctgtttaaattgrttaataatcattaggattttgattgaaattttatctatagatttatatagaatcaayacattaaaatatggactctccccacccaagaacacaatatattgttttatatgttcaaggctttttgaatgtcttatcatacaattttttcatttttaatatagatcttacacatttttggtacctctatgtttatgtgttttaatgtcttattgttctagtcaatatgactttttaagtatrattttaatgttttatttttgtcatatagtcaagctgatttttaaaattttatctaacttttatatagtttttcataaacttgtcaattttttatagattttatttattcttgcagagtmgccttttgctgtgattaatcaagccaaccttgattaattaaaccttttaaatttaaaccttytaaaggcttactgtaaattattgctgtgtttattttccacccttattaattmtttccttcaactttgttttactttctttgttgtttattaagttgattatttaattattttcaacatttttgctattaattggtacatttttaaggctacttatttttcctttgagtttatctttgcagtagcctattttagtatatattcacagcgactcagtgattttaattttgaattcctcttacagtcaagatttattaaaattgagattttaaatgtatgcaattggagagttttcttgtcgttctttgtttttgcaggaaggaggtgttcatttttactatttatttatttagccagaaagtgtggaccataatttctactgttacaaatgtgtaaaattattttgtggccttatgtagtcaatcttttaaaatattctgtaactattaaaaataagtcatttttgtttgttggatataacttttaatattgaataatctatattgctgtttatttctgactacttcatatcattgatttataatttgtgtccaaatacaacagtgaayttgtttatttctccttataaaattttaataagttgaccttatatttttgatgcatgttgctaagtacctatgatgtattatcttaatattttttaattattttcatcttatactcaagtatatttatgattgataggaccagtcttgatttattagtgaatcttcatgttcgaccattctatgtcattttcatgtaattatgattctagtaaagagaatgtagctaaaattattatgtatrtctgacatggcttctatttttaatgaggagttttacttaattcacatttgttgtaatgatcgaaatatttaatcatgtataacctgcttgtttatttttcttcttcttttgtattaagcttattttattagggtattttttcttcattctttctttagtaattctgcattccatttttctcacatcgtgtttgtttaaatacagtatgtaaacttacaatttccaattctatgttgacattaagtatgtcctaaaattgctctttctgaattagattctcagtaatttttcattttctttctacttccctgccccttcctgtgttttgttaaaatgatcatcaacatatatattcagcttatttgttctttaaagccattttcttaggaattatttcctggaaattgccctttaargtgtcatttagtgggggcgcagtggctcatgcctgtaatcccagcactttgggaggccaaggcgggcggattactggaggtcagaagttcaagaccagcctgaccaacatggtgaaaccctgtctctactaaaaatacaaaaaaattagccaagcattgtgatgcacgcctatagcctagctactcaggaggctaagrcaggagaatcacttgaacccggaaggcagaggttgcagtgagccaagatcgtgccacgaaactctgtctggaaaaaaataaaataaaatgtatcacttagctttattatcaatactttttagacttaaaaacatgcattctggttaaattgttgaccgtctttccttgtatctcacagtgtcatctttttttagatttttttttgtttttcctcaaatatatcctcaaatattttcttcaaaagactcctattagataaagcttcctgagaccctgtgactgaaaatgttacctcagccttcacacattaaagataatttcaatgtaaaattctaggttaaaaattatgttttctcagaattttgaagacatgcttctacagtctctttgcatccacattttctgatgaagataatggtatcaatcagttccttgtttctttgcaaggaattattcactgcactgtccaaaacacagccacctagcacatatgtctcttgaacctttctttgaaatgtgagtagtagactgacgaactgaattttaaaatttcttaaattttaattaatttaaacttaaatgtaaatagccatgtgtagctagtgattagtgcagctctacatcacgaagatacgtatagttggttcattaatctttrtggatatgcagtatgggcattctccatgagttaaytcatttttcatacttttcaaccctttgtcatctgtactcttttctaggagaatccctcattttaatcttctattttattattctagtttcaactattctgctgatttattaagtttatggtaattgtgcttttaatttccaaggattctgcccattaattttttatagcagccagttgcttttatcataaatatttatgaaaattttaaaaagtgtataaatatatataaatatatacatgcatgcatgcacacacactgtatgtatattttcatatatatttatacactttaaaaattatatatttttacacttatatacactgaagtgtatatayttttaaatatacactttaaaaaattaaatacatatttccattttatttctgtttcctctatattaactctcattttcttagtggttacctttttgcttgttgagtcagtgactcttttttcatactgtgattctatcaaatgtttagtaattgattatgtcttgatggaaaagtattgatagtgtcatcttatttactcagcacaaatgagaagtaatggtaaatacaggtactagtaacaggagccttcgttctatgtactagacaagggaagagagacacataaagggcccctctataaggataggtcatagcctcttgtattggcacaggagaccataagttatcagaggtacttctcagaattcccattttataaagctgtatttacagcataatcctagaagcaaacattgaggtcagctgctctgaggacagggaattggcatagtatacacacacataccatacacacacatacacacatacacacacacacacaataataaacatactggtccaaccacccatagttttctacttctagccttcactactrcttctgatcttgtgcttatttgtggttcatctggaaaaaattacttactttggaggctcttttatctgcatggcttatagatttcagagacctggctaagttttttttttaattggttgcattgagatttagaattggtatatatcgtcctggtggacggacaccttatcactgtgatatgaccttgtttattccaagtaatgctttctgtttgactaatatcaatatagccataccagttttatttggtttgtaactacatggtacacagtaccactctactgttgtacacacatataaattttaaaaattagcttgaaaatattaatcttctacttgaattattttgtttgttaatgtacttattgatgtatttggatttatatccaccttattattatttagcctacctgatcttttttaaatgcctwtggtttttctttcttttagattaatcaggtgatttgtcattcaatagtttattatcttattatttttacattttaaacaattcttttaatgcctaagagataaaaatatgtacccatgtcttattacagcttaattcaaatgattgctttcacctcttccacaataaggatacaaccttataacactttaacttcatttatccctttggtattattgtcatgtattttaattttatatatattttaaattccccaaacataaacattgttattttgtgccatatatatacagacatatatatatatayacacacacacrcgcgcgtacatacatgcatatacacacacacacacaaacacacatggagaggaaaagaaggtgggagaaagggagggagattgatagagagcctcactatgttgctaagtgggcaactgagcttatctcaaaacttctgggctcaagcaaaccccctgccttagcttcttgaatagctgggattacagttgtgagccatggcacctggcttatattcacttatgtttacccaagtatttatctttgtattgctcttcattttttccttcatttctgcattttcctttatgattgattatgttatttatgaagaagaagttgacttaatatttcctttagtacagtcctaccaagaggaattgttttgatttttgtttttctggaaatattagtatttcatatttatttttgagatatattttcattgagtgtacaatgctagttgacatttatttttagcatttaaaaaatattccaggccaggcgtggtggctcacacctgtaatcctagcactttgggaggccgaggcaggtggattgcctgagctcaggagttcgagaccagcctgggcaacacggtgaaaccccgtctctactaaaatacaaaaaattagctggatgtggtggcatgcacctgtagtcccagctactcgggaggctgaggcaagagaattgcttgaactcaggaactcaggaggtggaggttgcagtgagctgggatcccaccactgcactccagcctgggtgcctgggtgacagagtgagactccatttctaaaaaaaaaaaaaaaacaccattctaatttcttctggcttatatcatttctactgagaagtcagctgtaatcttatttctgctccttcaaagatactgtgtattttttccttttgcttcttttatgatttattttacttctgtattttttaaaaatcagtttttctatgatatgccttaatggtttaaaaagtgtttattatgcttttagtttgctgatttttttgaatttatggattgatacttttcttcaatttggaaattttttttgccattatctcttcaaatatagtttctttccaattattttctctctttctgatatacaagttacatatatgtgatgcaatttctctttctctctattcttgcctcctccctttctttttctttctgtgtttccacttgggtcttttctattgactgtctttgagttcattaatcttgtcctcaactctgtccagcttggtactgtatgtatccatttagttcttattttaagacataacactttttatttctagaaatcccatctcattattttgtatagattctatggtggctttatattatgccaactaggttaggctgatctacatttctcacagttctttttcttccatgtttccaattgaagtgggtcatgaaagacatttcatgtgaaattcggaaggtggaattaaagcggtgatcagattaatttacacctggaaagtcatgaacagactcaaatgctgttgcagctcacacatgctgtcattgatctgttggttcacatcattggtgttgagcagcagacaggccttcagctactcctctttcagcttctcggaatcgttagccaaaggtgtgccaactgtatgacraaggcttttaacttcttgtgcrcaaccattcccactgatggtagaagtagtgagaaactggaaggagcctaggtccatccccatgtgttccagtttattcctgtggattccagtttattctcactgacccaaccttgatatctgttctttttcctcaaatgtttaaccttgagacatgaacctccagtatcagatacaaaggcgtcaaccttaatgtgacttctaaccaactagatagaacatgactggttcagattttaattatctgataaaattctccaacattttatctttttgctgtataatttatctatttttcttattcatgttattcaktttttttrtaatgtttgtcttaatatctacatcatgtgtggatttgtttctgttgcctatttctttttctcttgggttttggacccatggccctgtctcttgccatgcccaaaaggattttaataaatgcagaacactgagaataaagactacagaggctccagatrttgtgatcttgcattagaaaagggttaccctttcttctgccaggcagatagagaggctatcaccttaatttatccaggaataggctgactttagacatgctagaagttttgattaagattcagyctatctttggtttcctttgtctgtagtctggagatctctgtggcttgcaattaagacactacttcattcactagctcattcatcctagcaagtttttgtattctcagcactgggagagtacaaaatgtcccactccaccactcagggtttgtagcttagctctttagctccaccctgcacaccttcaatatttggcaaatattttgaggggaaaatcagttgtgtcttgagcctcttcaattctccaattttttgactccaatccttgtaaatgccaaaatgtctaatggtttctgtgtccccaacggtgcccccttgccatttgaaagcctactttcccagtctacccatgtcaagaatcagcacaatcttccagaaaaaaatgcagctgaagatcattattacacctgtccaatagccttcctttccaatgattttagcctctctaatacttattatctacaactatctattgcatacctttaaacagatgatttttgtgtttgttttgttttaaaaaaatcaacaggtaaatcaatctacttaaaactaatcttcatgcaacaaaaagcctgccaatctgttcttatttatatcaaactgaaatttctattagtttactgctctgctcttaggataaccagttccctagtcttaccatggcttttacaatcatattataatgtcttgtcagtagtaatttgagagggaagataggtgaacatgtcccttcaataagccatcttgaactagaacccccagggcattttgaaccttctgcctgtattacagttatctgattatatttgtctctactgctatgttatacatttcttaaaggtaaagactatatatgttatagttatctgattatatctgtctctactactatgatatacatttcttaaaggtaaagactttatgttattcatattcatgcttaccataatacttagcatatgtaatcatatatagtaggtattcatcatttatttattaaagaacttgtgaatagataactgcatgaagttcagagtcagtggctttcttggtatctttcacatgatgaatagtattgcttttaacaatccaaatattgtgtataatattatagaaatagaggcaaatatttcagttttttttttttttttacagaacgtggtatattctatgcccctaacaaaactcaagcaatattaaaaacaatttgcatctagcttctgggatttttgagagaattctttaaaaatgaaggactttaatcatctggtccctctagattttatagtagttgaagaaatatataaaaaaattttgtgatatatattttggttatctcctaacatttatatttccctttagaaaagaaaaaaatcccacatgaaaagrgaaattgaagagaaatattacctaccacataaaaagtcatacttttgtaagattatatttccatttctacataatattctctcattatgaaatcatcagtgcattttttagtcataaacaagacagtgaaaagaaaatgagtaacaatataaatgactttctggaaaatgaggtctattcaaatttcaggaaaaaagttaactctgaartattaattgatcataatgaggaggccaaacttcagatacacagaggagccatggaacatttcccataggcctgcagcttgtgaagacgtctaggaacactgacatgaagttaaatttaaaagtaaataaaaatagataagactatcagactgtcaacttgaagaacttcaacaaggaatgctatgctctggctttttgcaattcaaatatacagtaggaagaaacataatcccactaaaaaatacaattgccgtcattcttggccactagaaagaaatttcaaaaaggtcagcctctgctccttycttccctaagaagtgaatcgatgatatagattatctcatgagcccatgaacagatgcccagttgttttggcagaatttcaaccctcgggagagaatcttaatctagtatctttctcactactggtacaagaggcaccaccactttctacaaacttcccaaccctgtttaatcttcacattctggtcttctcctttgacattccacctgaatattacatttttcattaaacaactatatatatgtgtgtgtatatgtatatatatatgtgtatatatgtgtatgtgtgtttgtgtgtgtgtgtgtgtgtgtatatatatatatatatatatatgaccgttttgcagggactaagacaactcattcagtacagctcctccaaacaccaaatttttattaccaaatgcttcagatggacacctctttaatatgtacctgtcttaaaaatggaagcagactctcaagttccaaacttaagagcaaataccaaaaacaatgacaaactcagtggctgtgcaatacactgaccattcagaaagagaggcttgacctttcttcatcttacattgtcttctgaattcactaccattagattttggaagagcataaatttagaagaatgaagactcaccttccctacttcctttgcctatctctccaggacgacgatagaattttcccttctctctgacacttatcctgactatataatatgcaacactcccagatcttctcaatggactagtgaccacatcacttccattcctagcaccatttatcaaacagtgacctatggaatcaaagtttagcaaaattttttagaacctggcttaagaaaaccaaatcccttgtggttacaacttcaagttgtttcatgcccagagaatgagctacagtcctttccagatattcatgcctgaagctcattaataattttcttctctcagtaagtgaagacgaatcctttaatttgaagtggccttcacactaatgagtcmtgtcattactctggaatcctttaagttgattttttatcttgttgactcagtgaggtagaaattaaggacagctcccattagctttatgtatttcttgaagcatctgctcatgatggcaaactgatccatcctaaatatttatttgcctataaatgccatggagtcaacacttcactttcarctactttctttctttcttttctaacccaaacataaaatttctttaaaagttctgtcaataacatcacttgcaatttaaacgctttaaaaatatgatcctttttgctgtgtttttgaatacttccttcatatttaattgctgtagacactttagttcctaattaaactgtattgtttatgatgttcggtctttaatagacatgataacaaaaaaagccagttgtagaaaattctctgattgttaattccagtcttaatcttaatactttccatagccagtgaactcatggggttgagaggagaatgggtagaaaatgagatacaaagcaaatacatagttcatgtttttgaggatttactagatgttctggaagacaagcttgaattagacttgaattgaattgaactctatgatttgtaggggagattagcttagaaatagtatctcaaccacttgcaagataaatatcctcctttgtcaagtctcttttcagcacatccccaggtttcgcgttggtgacagagaggagcatatattgcacacagaaagcttgcttcatcctcagagccctaaaatacttttattgtgagagaatggagacacttgatgaatctgatgggttctggtcatggaaagatttgctatgaaccattgcatcaaggttgaaatgcccaagaggctgacaagcttattgtccatttcaaagattaaatagttttggaaaaattttctcccctggmagttgtaattgtgtccatgaaataagtgttcattctgcttgagccctgtggtttgaatgcttccttctatatttccctccagtggattgattcaaaaaaagatttacttttttagacaatgcaaattaaccctgtgaacctgataacacctcccccaagtcctaacatccttgctgtgtcccatgctaataggcaatcagagacactgtcaagtctctttatcatggattatctttgtatctgtttgaagggagggaaaggaactgagaaatcattcttctaggttaataatgtggttctaggaaatggacaaaagctgccattaataaccttgagagccttgtgctgccagaatagcactcatgagttggtaaagtggccatttagttgtgggacttccaagacacctgaaaaggccttgattgtcccacataaactatagggaggataacgtctccaaaagaagaaagagggtatcagcagaaaaataaaatacaggctcatcataaagcaatcaactgttccctgactttgcccagggtcaacattacatattagtatgctacstgctgacaaatatttgaccttttgagtgacttacagcatttctgtttctaacctggttaggtaaagatcattatgtgttaacacagaccacaacatattcctacttcacaggtaattatatctagaattcttaagtttatcattttacaatagcctcaatatcatgccttaaaattgaatgtgagaatatcaaagaagcctggggacagttaatggtatttacttctgagcattcactatgtccctggcactgggctaagcctgtgagtaattattttgtgtaatcctgtaacaattctatgaggtaggctctggggctatcctgtagaaactgacactgacactcagagagattgagacgcttgcctaaggtcacacagttagtaattcactgcatcagtttgaacccaggtcttcttcgggatcctggaattggagctcattcataactattgtcctgtactaccttcctgtactatctcaatcctcagtgtcctgagatagaaggataagctaatgctagaaagaagattctttactaaccagacgcatacatagtatgtcgactcttgttggatatgatttttgtgtcattctattattaataagaatagcttctaactgtttttgaaaatgtcgtttgtggctcgaaagcatcttaggatagtgtttgttgcccttgttcaggtactgttctctctccacatttttgggtcttcagaatgatcagcatccatgcctgaagtgaggcaatggtggtccacatatacgagtgagaaaacaacgagcaagaatatctttgttcaggtggctggcaaaatcagctcaccatagttctctagaaactatgagccaaataacaaggcaacattaaggaagctattaatatattgaacatgactgaagccatactagatattagcatcaagcagattcttttctgtgaaaagtagaaatagcagtgggaaacaggacttggaatataagtatgccaatatcatgaacactgacaactagaagcactttttaattaatggaaatgaccattgctgatatcccaagtgatctgtgtgcaggcatcacctgttgaagatgaagatgaaggctgattggtgttttcttacatttccaccagtcagaagtgaataataattgttatatgaatattgtatgctgaaattcatgtgttgaagacaaacctccgcagagccagaggattttctttcaccttcactrcccacaagtctctgtcattcttggctgcacgtgtttccttgcttgatttatctaattattttcttccttctttagtcgaccaagtatttagataccagatggtagggagatcagaagcaggaaccttttctgtctcacatggatgttgtagggattaatgaactaacatattctaaaatgattttaaaaggtgaagtgctatataagtgtcaagcatgattaactagcagccaagttattaggcacctgaatattatgcatcttttctgaatttcagaaaaatggatgtacatattaattttcaacagcactgttatttgaatgatattcatacactcaaataaaagtttagcccaatcccaattatctctacttttctcataccagtcatgtaggccttaaggatggaatatgtatgcaactttgagtaatacagacacaattaccaatcttgtggcgtttttagtgcctcaaggaaaagatacacagtaaaatgcaaaatattacaggaagattgagggacagcaatgagtatgaactgtagctcagaccctctggttccaaactctggtttaaccactagttctgtgactttgggcaaattgttttacctctctttgcattagttatttatgcaaacattggggtggatgatagtacctacttcatagctcatacatataaaatgctcacaaaagcagttcctcacatgcagtgattgctccttaaatattaactattatcattataattgtcactaacactggccttggctggtttcaccctctgagagcgttaataaataagatgtgtagttacttggctaggattcatgtataacttttagtagtttacaaagcccagttacttataatcctaacctatgattattcaacacttgcttgtgccagaatccacaaacctcggtgaaataggttagcaaaatggtagcttttatttttgccttatttgctcagcaaggtttttatttccgttcttctggtaatacactctaaccactaccttttatcccaggtacaggggcggacaaaacttcatacctgattaatcgtagtacttcttaacctaaggcaaacatgtaaaccagcagggctgacctgaggccccctctgacatactaagtaaggatttgatttgaaataaataaaaatagccttgcctaggggttcattatacttgaaaaatgtgagattggggttaaaactgaccacgttcattgccacatgaagaaagtccagctatagtaaaaaagaatgaagccgaacagagctgagctgagctgagagatggaaaagggagagagttctcttagctttgagttttgatcctagcaattgagaccttgatccctatcctttgatttggtcagatagcacagtatcccttccagccatgtgagccaataaatgttttctttttgtttactttaaaatagtttgaactgggtttctgtctcttgaaacttaaaggatccttacaaaacaaatgctataattcacccatttcgtggataagggaattgaggcttagagagattaagtgacttgctcatggtaacataaccagtgatttttcagagccagaacttcataccctatttaatgactccaaatgctatattctagtcaagacaacaaggccagggagctgggagatggagctggtcattaatgaaaggggcagagaagttatagggcaccatcaaattgtggctatcctcgtagctaattcatgcactggttcatcacatatttgttctaaatatgtgatgcacaaagaaaagaaaatctaaggccagttgtttagatagagaaagtgagtgatctgcaggtaccctcaaccctcaagggtggctgtctgctgtcagctgctgttacccagcaaggggtgagaagccacagagccagcctactcgtgtctccaagttgctattccagtgaatgcaatgtatgcagaacatgtcaaactcttgggccgctcagaaaattgattatggagcttgccccttccttaaaaagcaggcttttgtttttattagcatgtgtaaatatggaataacttctaaatgcaaatatggatgacatttgatttttctgacatgtttggaagcagcctggggcaaggtggcagtgaatcagtaaacatcacrggaactacactgggaatgtatcaactgtgcatactattaatgggtttatgccatatgttccataataacatgtttgctaacatgggattggactgcctggttgtatgacaaagctgccacgtcagttttctgatgtatagaaactgagtctgttagccagatatagaaatctagcaaggtcattttaggagtaatttccattttgtgtgcttttttccccctcattgactgtaagagaatgtgatttgcctcattacaatacaattccaggtacaaaatacaataatgacctttatgccaaagactgaagttcatgtaattgataaaatagactcagttctgcagtgttggaaaccattagctggaggcaggaaccgtgttaacttcatgacgtgggaggtcaaaggtcaaggtaaaggcccaggctgcaccacttctggactcagaaagaggaaaacagggctgcccagcaacattggagtttgcggcgctccctaggtgtgtcagagacatcctggggcatgtggaaagtgaaggaaaggcctgttattaaggtgagggtcaaaaagaaactagccaaacacagctgcacagtaacagactggaacaatgggccttatgaagcagggatactgggatagctgtcgctccatttgtcttctctttactgacttcatctgcttcatatctgaccccaaattatactgcccatttggaggcattgcttctttttcctctcctggattcttgattgttggtgctctggtgagaaamcagaaatgtcttatgaaatctttatagctacgtaggaaacttgagcctgccattttcacccacccagggaaggtatttgcctcccgaaaccgtagggtggcctgacatctgctttttattgaaagtagccaaacaaatcacgtccaccatgtggtgattatgacaagtgtattgattgacattttatgaaacatgcatttacaaatggcatctgaataccgaatgccactacggaccttaggactcttcctcaggcagcttggtcggagtgagatattgccagcattcattctccccttcactctgattccactctgattgagagtgcattgtttaatatcccctacgaacgacaacaacccaaacgtaacatagaaatcgggagtgaaaagggactgtgaagagtcacatactatatgaaacttgcagcttataaagagagaattaagaaagaaccagaaatgtatatatttggtcagaaggaaagagaagtgtgaacttaagggtattaagcagaggaaactgcctaaaatgataaataaaatggttagttcagttgtttctttacatccctggagttataagtatctccatctgaccatgagttaatggtattgkgtatatttactgttgtatgattttcagagcttctagcccaaaactggagacaaaagctctatgttctaccaatgctcacagatgaataatgcttttttaaaaatatcaccaattctgctgtcatttcagacctcagagactctgcttattaggataggaggcaagcaaagaaatgaggtgggcatagaggtggcaggggttaatttcatatttatcatgagatcttgcatgatttccctaaaagatatttaatttccactgggcataataacttgcagctgccagaatgtgctgtgtaccagtggcgagttcttgtctttggagacttatgcaagtcattatttaaaaatagagatccgggagttacagctggctaattaatctaccactaaggaaagctaagcgagtgacccacttaactgctttcaggaaccatggctactctgaagcaaacttttgaaaaagtcctgtacaaagaaccaaactgatacatcctcatggcactgtcgtggtcttctcagggaacatgttccttctccatctgctcctcattcccacaaacaaacaccactaattcagacccttatccatacacatgtgaacgtccacagtgtgggttcccagatactttgccttttgggtccttctttctgaggttgctgccagtctcttattcttctctttttcctacatcacccgcctgctcaggaaccccgcttcagtccatgttccctattacttccactctgaggcttctgcctgtcttctgaggattcccctaagagactcacaccacatagttacccatatttcttccattccctccactgcacctttccctccaggcagaacaggtctctgccctctcatcctgtccccttacccagaccacctttcccattcctctctcagcctgaatatggtccgtacatcctgcaaagctctactgtatctatcccaggatatttttccttggacttgatagcagatggttgacataatcaaatcatgacacattttcatcattggtctgtgaggaccctaaccttattcttcagtaagtctattgatatatttattatttttcttcctactcctttccccctccctgcagaggcaggcattctattatattttatatacaccttttttattgcacacacccttgtcaaaaaattattrtcatacgtatatgtattttaatttccataaatgacatgtgttaaatttcatctgttttttactttatttacccagtcctatatcttttttcttttttttgagacagagtctcactctgttgcccaggctggagtgcagtgccgtgatcttgactcactgcaacctccacctcctgggttcgagtgatcctcctgcctcagcctcctgagtagctgggactacaggcacccaccaccactgccggctaatttttgtatttttagtagagacagggttttaccatgttggccagactggtctcaaactcctgacttcargtgatccacccgcctcaacctcccaaagtgctgggataacaggcttgaaccaccatgcctggcccagtcctatacctttaaagtccatccatgtctctaatactccatggtaggcaaccaccacctttaactcttygctgtcttcataatgtacacatcgagatccctctcaccccctgtaactccccttctctaaaatcccctggccttcatttactataaactagactcttaattatatgctgttttgtattttcctaggaagggtttatgtttctcccttgtctctcatgtaattcctttgagatcagagaccacctcctatactctttcctttcctactccacccaacactacttctgtagatgttctttggagctctgtgcataattgatattcaataaatcattgtttattcagtgaactgaatagtgtaactccatgaaggtaggtatttttctttgttcataaccatatctccagtgtctaaattgtacatggcatgtcataggtgatcaggtaataggcttgaagaaaatgattgtctcacctttcacataagaaagggttatggaataatagattatacaggggtcaggatacctatgttctagtttctagtttgctgccaactagattgtgtgacactgagcacatcaggtatcttctctggatcttggtttgactgaattatttctcatatccttttccaatctaacttgctaagactgattttattaacaatttttcaacatgaaataaaataatcttcaatgtaaaatcatctctagagatagaataatcatactcaaggcagtagggcatgggatacatagggttagggaaagagatgagaaaacatcctatggttccaatctttcgctttcagaatgattggtacaacaaaatgaactactacctgtaaagagcttagaaaagttcctggcacayaataagtcctaaatagtgtctactattatttttataaacttaagaaattctactagcctttatsataatattttacctggcatttggaagttatcacagttataaaccaaacaataccaggaattctagtatcactactgaaattaataggtttctttgatgggacagtaatcacaagacacattctgatttctttaagtataaatatttttttccccaggtaatggacaagttctaattctcatggtttttataargtgaagtaaaggaatattgtccttcaagatcagttagcagccaagaatgatatttgggccagaatcctgagttctatatttgcaatctattttaaaaaatgactatttctactatagagcagtcacttaaaaatggaaacagaatagagctgtgaatttattaatatcatatgaggatgctatttttccctttggtaaggaagtagtaactaaataacctaatctagtttctcttatcctcagggaagtgaatccaaatattggataaaccattattaaaattctaaacagcatttaaagcatgagcttgtttgttgctataaggctattttttttttctctaggtcgagaggtaaagttatttgtcttaaagaaaaaatcattaaatggtattggtaatgggctgcaggttttataacttaactatatttgcttcacgagcaaaaatagcatttgatgrctattttattctactcttcttgggcaaaagaaatcttaatcaaacatcatttcagtttaatgcttttacatgcaaaattcaatttgtgaatttatctgctatctaaatgttaagataaaataagatagaaatacaaaataaggacyggagactccatataagctagaaatttttggacaaaggaaggattacaacttctactcaaagggtttgagaaacaggtagataaaatatctagttaccaataacgacctaggaaaatgatcacaattcagttgttttagagctcacaaacactggagtaaattataatacttacatgatgtcttagtctgttctcacactgctatgaagaaatacctgaggctgggtaatttataaaggaaagagatttaattgactcacagttcagcatggctggggaggcctcaagaaacttacaatcatggtggaaggggaagcaaacatatccttcacatggtgtcaagaaggagaagtgcaaagcaaaagctccatataaaaccatcagatctcatgagaactcactcaacatcatgagaacagcatgttggaaacctcccccatgattcaatcatctccacattgtcactcccccaacatgtggtgaccacagttcgtattacaattcaagatgagatttgggtggggacacagagccagaccatatcacatggtgaaatggaaagcaaaaaaaaaaaaaaaaaaaaagcaggggttgtaatcctagtctctgacaaaactgactttaaaccaacaaagatcaaaaaagacaaagaagagcattacataaaagggaacaattcaacaagaagagctaactattctaaatatatatgcacccaatagaggagcatccagattcataaaacaagttcttggagacctacaaagagacttagactcccacacactaaatagtgggagacttttacaccccactgtcaatattagacagatcaacgagtcagaaaattaacaaggatattcaggactcgaactcagctctggatcaagtggacccaataggtatctacagaactctccacgccaaattaacagactatacgttcttctcagtgccacatggcacttattctaaaatcaaccacataattggaagtaaaacactctgcaacaaatgcaaaaaaactgaaattgtaacaaacagtctctcagaccacagtgcaatcaaattagaactcaagaataagaaactcactcaaaaccacaaaattacatggaaatttgaatgactcctgattaaataaggaaattaagacagagataaataatttctttaaaaccaataaaaacaaagagacaatgtaccagaatctctgcgacatagctaaagcagtgttaagcgggaaatttatagtactaaatgcccatatcagaaagctaaaaagatctcaaattgacaccctamcatcacaattaaaagagctagagaggcaagagcaaactaaccctagcagaaaacaagaagtaactaagatcagagcagaattgaatgagatggagacatgaaaaaccctccaaaaatcaatgaatccaggagctgcttttttgaaaaaatgaacaaaatagaccattagataaacgaataaagaggaaaagagagaagaatcaaataaataatgatacaatattgtgtaccatcattttacatttccatataaaagcrttaaacacaataagaaatgataaagaggatgtcaccactgatcccacagaaatgcaaactaccatcagaggatactataaatacctctgtgcaaattaactagaaaatacagtagaaaaggctaaattcctagacacatacaccctcccaagactaaaccaggaggaagtcaaatctctgaatagaccaattacaagttctgaaattggggcagtaattaatagcctaccaaccaaaaaaaagaccatgaccagatggattcacagccgaattctaccagaagtacaaagaggagctggtaccattccttctgaaactatcttaaacaattgaaaaggagggactcctccctaattcattttatgaagccagcatcatcctgataccaagacagggaagaagcacaacaaaaagagaaaatttcaggccaatatccrtgatgaacatcgacacaaaaatcctcaataaaatactggcaaaccgagtccagcagtacatcagaaaatttatctgctatgatcaagtcagcttcatccctgggatgcaagtctggttcaaygtacacaaatcgataaacgtaatccatcacataaacagaaccaaagacaaaaaccacattattatctcaatagatggagaaaaggtatttgataaaattcaacatgacttcatgttaaaaactctcaataaactaggtattgatggaacatatctcaaaataataagagctattcatgacaaacccacagccaatatcatattgaatgggcaaaaactggaagcattccttttgcaaaccagtacaagacaaggatgccctctctcaycactcctattcaacatagtactggaagttctggccagggcaatcaggcaacagaaggaaataaatcatattcaaataggaagagaggaaatcaaattatctctgtttgcagatgacatgattttatatttagaaaaccccatcatatcagccccaaaactctttaaactgataagcaatttcagcagtctraggatacagaatcaatgtgcaaaaatcacatgcattccttacaccaacagtagacaaccagagtgccaaatcatgaatgaactcccattcacaatcactacaaagagagtacaatacctaggaatatagctaacacggtatgtgaaggacctcatcaaggagaactacaaaacactgctcaaggaaataagagaggacacaaacaaatggaaaaacattccctcctcatgggtaggaagaatcggtatcacaaaaaggccatactgcccaaagtaatttatagattcaatgctattcccattaaattaccattgatgttcttcatcaaatgagaaaatactactttaaatttcatgtggaatcaaagaagaccctayatagccaagacaatttcaagcaaaaagaacaaagctggaggcatcatgctacctgacctcaaactatactacaaggctaccataaccaaaacagcatggtactagaccaaaacagacatatagaccaagggaacagaacagagacctcagaaataacaccacacatctacaaccatctgatctttgacaaacctgacaaaaacaagcaatggggaaatgatctcctattcaataaatggtgctgggaaaactggctagccatatgcagaaaactgaaactggactccttcgttacactttattcaaaaattaactcaagatggattaaagacttaaatgtaaaaccccaaaccataaaaaccttagaagaaaacctaggcaataccattcaggacataggcatgggcaaagacttcatgataaaaatgccaaaagcaatggtaacaaaagccaaaattgacaaatgggatctaattaaactaaagagcttctgcacagcaaaagaaactattgtcagcgtgaacaggcaacctgcaccatgggagaaaatttttgcagtctacccatctgacaaaggtctaatatccagaatttactaggaacttaaatttgcaagaaaaaaaaaaccccatcraaaagtgggcaaaggatatgaacagacacttctcaaaagaagacatttatgcagccaacaaacaggaaaaaaatctccacatcaatgatcatcagagaaatgcaaatcaaaaccacaatgagataccatctcacatckgtcagaatggtgattattaaaaagtcaagaaacaatagatgttggtgaggctgaggagaaataagaatgcttttacactgttggtgggaatgcaaattagttcaaccactgtggaagacagtatggtgattcctcaaggatctagaaccagaaataccatttgacctaacaatcccattactgcgtatgtatccaaaggaatataaattattctgctgtaaagatgcatgcacatatatgtttactgcagcactatttataatagcaaagacatggaaccaacccaaatgtccatcagtgatagactggatagaaaaaatgtggtacatatacactatggaatactatgcagccataaaaaatactgagatcatttcctttgcagggacatggatgaagctggaagccttcatctccagcaaactaacacaggaacagaaaaccaaacaccacacgttctcactcataagtgggagttgaacaatgagaacatatggacacaaagaggggaacaacacacactagggcctgttggggagtggggggtgaggtgagggaacttagaggacggatcaatagggtcagcaaaccatcatgacacactatacctatgtaacaaggctgcatcttctgcacatgtatcccatttttattaaaagaaataaaaacaagcattaaaaatggaaatttgtttttaatcataaatttaattttggggagtaccatagtcttctattaagataaaaatgggctatattctaataatgttattctgtgttgtggggctatattatcacaatagttcttagctgaagctgccgttttttcttatatggtataaattgtgataaaataagcattttgaacacccatggagtgttgccattaattaaagaagataatatttagaaaggcaatttgaaaaatctcaagtcctatacacatttgcttctgttattattttattcaatacaaatcacaaaagtgcctattgtgtaccagaaactgctttaggcacttgaacatttatggagaaataataacactgacctttgcctttaaggatttcataatgttggggaaaccaatatgtaaacagagaatgccaatgtaatgtggtaagtgtgatgatagatacatgccaaggtgcttgggagcatagaaagggacccctaagtaagtttttagagtcagagagttcagaggaggttasagaaaatacaggaagggagtttcagaggaggaggtggcaagaatgtagccttcaggtgaaaaatagcatagtatattctgagcagtaaagagatcagcattcctagagcttaaaatattgagcagagaaagcagaagatgagtctctagaagtcggattacagaaggtctgtctattatrttaaaggttcagatttatctgcttggtgatgaaaagtaaggaaacaatggggtccctccgggggagtatggaacgtggatccaagggtcagagagaacagtgaagagggtattgctgaagtctaggggaaagagccttcagttattcatgtttccatgctgtttcttagaggctcrgcccaagtatctgatctttcccgcatctatgcataagttttctcaagcagtgctggtgatctccacaccgcatcttcctcctaaaatatttactgattatctgcattcaagtatgttataaactattttaatttgagatataaatattagtcatgcagctaactgcacccacctttccaggagcatctgctttttgtgacagacactgtggctttcaagggccttgccttattacttattacttattgcaccccactattcaacctgtcttcctactgcactaatatgcaccctgtgctgcagtcatgcagaagtcttcactgttctagaaaatgaagcacatgctgtgtgtatcacatggctggagtaatcatttggacagtgaagattttctgaggtgtccccatcatctygtcacacctgttgcagaatgccacaggcagctctgtgaggcacgtgctgctgcttctgaaatgatgcattcccactcaattacctcattcattacaagttttcagctacagattaggagtactattcaccccttctgtcttagcagaatgttaggaacatttgaatcagtggtactttttaaaaaaaattagattttactgctgtttgctgtttactattacaatcacagaagtaaaggctaagccattttcttctttaaaaaatagtgttttccaatatgttcaaacaatctccaaatgaatagaagaaaaaaatgcccacagaagtttcttagactcactgtcatatctggatactttaatctcagatgttctggctcttcccaggctgataggatggctgggctaataatacaaataccttaagggctctgttctctactgagtctggacctagaatgtgcagctttaggattaggggtactagttttagagtcaaactgattcccttcctgattaccacttacaaactgtgagatgtctttagggtggttggagggattaaatgtgatcatctgcactgctagtatatagtaagggctcaaaaaatgaagcctgctatggaattatgactattaataattcatgctctaatttaagaaattgcctggtttaactagcctcaggcagaggctgggactgctttctcatcaggcctcagctacatggctacaatatagagaggttccttttcagatatgcacacacacttgcttctctcatcactgatgatgcttgctctctctagtcaattaatatgatccacctctcagggtaatcatttccctaaggaccaaatgtgcttacattcagttgcacccattgtaatgcaattaatttttccaataatatccatctaatagataggtacattataaaggagagccataataataagctacctcctgtttgctcattttgaagagactcattacggacaatggtcctcaatgttaatgaagtgacacaatccaattagaagattgcagttacacatggtagtggtagaatgagaggaattgctacctaayaggtaatgtcactgtttgtgccttgtttttgccctctgtggggttgtttctgctttggtccagatctcactctgtccttgggcctactttgggattctgccatcttctgaatgctggtaaatgcctaagctgtaaacagcttgcttttctgcagaacagctcatgcctgaaaaagttgataatgatttcaaaatttcttttaattgagtttttaattacaacacaratagcaaatagccctatcacatgtaattttgacaaagataacaagcaatttcatattctttggagaatgacagtgtgggagcctacagttaagtaccgactgccttgtttttagacaggaatatctgacaaccactcactcagggaaggtcgggaactggaacatctggatctcaataaattgttcaatataacaatccaagtgctrtaacacaagctgctactgggaatgtaaatctgactggctggtttaggatcttgtctttctaattaatagaccacgtattatgaattgggatactgtagagccagttggtgtatgggcatgccttcaccttaaataaatatttttatcttcagatcttatcacatcagaaaaaaatatgcagataaattattccaaaatgcaaagcttaaatttgatatgggtgccgtgtttcttcattacttttcttttattggcatttacttragagttctagagccatgcccagagttccagaactccagagctaaaattagacaaagaaacttctccatctcagagagcagagaactcgcccacattagctgatctactggcacctcccacagactcacaaaggccatttgcataactcccatgcctcctagtaacatccaaaggctcaagccgatgtatctttttcaaccacagagcagtaattatcagacttttgcatttcaaaaacctggaaaacaaaaattcttcttaattcaagtcctacagagtggtcaacttcttattttgctaagtaaagatcattaatttttttccttttcactcatttgttaattcagtgaatatttattgagcacatactatctgcagctactaaagtatgtctgggaatgcgatgaaaatcaaagctagatatagcccatgacctcaagcatcatatagtctagtgggggagatagtcatcattaattaattacatttatatatatatatatatatatgaaatttaaattgagctacgtactctacaggaaatagacatggttctctgcaagcatgtaatatcatatattaattttatatggaaagagagtatcagggaaatattccccttaaaattaatgcttccactgaacaaatctcagactatgcaggccatggtaaggattttgagcttcatgttaagagtaataaaaagtaactaaggaattttaagcaggattgatgtttttaaagaattcctctggatgctattggggaatggattggaagaaaagcaagagtggaaggagtgagatcaattgaaatgacatttcagtggcctagatatgacctgtgtgatggccatggtgcaagtaactagttggatttaaaacatatcttgaaactagaatttttgagactctgacaaatgaagagagaagagagaaagagagaagtatcaaggatgattctcatattcctggcaagagcaacttgccatttaatacaccatttactgagctctaaagaccaagaaaggagcaggttaggggaggaagggggaatcagaggttccttttggggcttgttaaatttaaggtgcctatgaaatatccaaggcaggaagatacaggtgtcagaagattagaggaggattctgacgctagatatacatttaggagttatcagcgtatcgatggtatttaaagctatgggagtcaataacatttcacaggaataagcatgatggaagttataatatttttgaggcctgatacagaaggagaaatcttcagagcatctttccatgaaagggatcacattttaacacccacaaagtagaaagaacataatatcaattctttaatttaaggacatttagctgcatgaaatcctctctccattgtccttatctttctcattttgctgcagatcagtgagaactttgttataaaacagcagtggcaaaccactaccgtagcgtttctgcaactgccttaggcaggaattacctcattttggtagcagaaagtcttgtccacatccagcctcgcctcacctcttagattttccaagcttaaaacacatctggagattctgaatcaatttaggacggactaaaagtcacaaagtagcacagatcctacattatgacatccgttctgtcctatcctacattgcaaaatctgtgtctatgcattttgtagcattcctaagtcaggggactacattgcaaattgtaatattgtyagtcatatatagggtcaaaaacacacttgcataaatwtcgcctcttcctgccaatcacagtactgtcattcgtcgtagtattctttcctactgaacctaatataagtttccagatcctcctgttacagtgtccaagacagtcctaatcaaccaggttgaatatgggaggtaatagtaataataaaaataattatattatacttatagctgttataattaataacattttttgtactttgtctcatgcactgcactaagtgttgtctatgcctcaccttatgtaaacattaactgcaacttagaagattgctaagagatgaagaaactttttttttttttttgagacggagtttcactcttgttgcccaggctggagtgcaatggcgcactctcagctcaccacagcctccgcctctcaggttcaagtgattctcctgcctcagcctcccgagtagctgrgattacaggcatgcccccccacatccagctaatttttttgtatttttagtagagacagggtttctccatgttggtcaggctggtcgcaaactcctgacctcaggtgatccacccgcctcagccttccaaagtgctgggatcactggcgtgagccaccgcacttggcagaagaaacgttttacagatgaaaaaactgaggttgaacaatgagcatcccaggtgtacatttcattattgtttctacattgtgttgtaattatatgaaaagtacagattgagactctgtactttccaatttggaatcttaacacctaacagtgcttggcacatttaaggcacgtattaaatgttgaattatggaaggccttacatacgctatagtgatagaagcttttcaaatggaagtggttatgtcctgcgtgatttggaccctcttacagcacctagcataatactcaataagtatttggaaggttgagtatatggatttaaaattggctggaaaaattccagtaaactcagaggttttggagtgatggtgctagtagtgggatcactactgaagaaggataaagaagatgaacctcctaatatgctcttgccacaactgtgggtctgactcttatttaagcattcttattcatgacctggatggaaaaaaaaggaagaagctgctcctttttagaattcactaatgattctaatttggaaagtatcttgagcagctcgggcaacaraaataaaatgcaaatgacctttgagacatgaggtatgyaggctgggaataataactttgtgagcatttgaaaaaggcaaggcagtgaatacacctggggaaagagaatccaaacacagagctgttctgggaagcagatgccagatctcagtgatgccaaagtaggcccaggaggcacagtggttggcaaattaaattcaggccagccatgcagtctggcaggatgaaagagaagtccaggttgaggctgcctgtgcagaagggcacggaataacagttcctctgtggacagttgtagctgagcagcacctggcaccacacgttgtgttcccaccacttcattactagggaagctcaggcaatttggaagtgcagagaatagcaataagagtgaatgaattcaagagcccgaggaaggatgcggatgaaagattaaaaggattggatagctgtagtttagctacagaaagctaagggaagagaaaggagaggcctggaaactaataataaatatccaagtctgttctaaaatagccaagaagaaacttgcagagtaaccattaaattaagatttttcaattgaaaatggacattttcttccaagccataggcttcttgcctaaaccagcactctgcctacgcaggtgcttagtaaatactatcttatggaataacttttgtttgccaaaagagtatatgatctgggaactagaccaaccgaaaacacattaaaaaatcagacaacccattccttagcgccccgtgaggacaggattaaaggaactggatttttgttgtgttgttcaagtcatactcttcaacaatgaagttacctcttcccattcagacaaataaagaacaaaatagaaacctttgtagcacagggaatgcctaagacacggttgactaggctctggttaaatcccagtattgcaatttactttatgtcaaagggaacaagcaaaatgctaatgcctaccctctcagacaaaccttcctaggcaatggagggggtgtagaaaagggtgtactttctggactaatggtgtacttggtggacttcacttttaaatgatcaaccacttgggaggcggaggggagtggatcacaaggtcaggaatttgagaccagcctggccaacatagtgaaaccccatctctactaaaaatacaaaaaagtagctgggtgcggtggcaggtgcctgtactctcagctacttgggaggctgaggcaggagaatcacttgaacctgggaggaggcagaggttgcagtgagccaggatcgcgccactgcactgcactccagccccagcgacaatgcgagattmtgtctcaaaaaaaaaaaaaaaaaaatcaaccacaaatatccaagtagataagttagaggtaatttcttgttttatagaaggagtctctataaacagccagctccccttgctttgagccattctttgtttacagatcattaaccacacctttcttaacttagtgcctgggtaagaaaataaagtattcagcttcccagccaattgcaaagccttcatagtgccattgttaagctccaggctcagagggcttcctcaaacaagccagacctttgaaacatactgctcctccctctgctggtcttgtttatcctcccacttctctgccccattcttgctttcttcctggctggctccctctcattcttttcctctcaacttaaatgtcccctcttctaaaaggccaccctatgtgtgtttatctgcttgggatgattttggctgcaaataagaggaaactgtatcgatagtggcccaggccagtagatattaattcacttgcttgaagtccataagcacatagttcagctctggtaccatggctcagcaatgcagtcaaggaccaggcagccttctagctctctgcttcatctcataccattggcttccatctttattatttcaatatatatgcttcaccccagcatcacttccatgccccaggcaggatgacatagcaggagttaagggagcataaagtctttcttacgtgaggcgttgttgcttttttcaggaaggagaatagtccccagagactcctaactatctctgattgattagaactgtgtcacgtgcaagatagtctgaaatatcatgattagctttccaacctctatagtaaaggaaggcaagggccaggggtctgtggatatcttttaggcagccaaacttcagtgtctgccatggyatatgcctctccctctcctaccccccatttaccctcagtcatggttccatatttttttctcttcatggcatttaccatgatttgtagttgtacattttaatcccactgggatagatatcttccatagctggctctgccgccactgtatccccagcctttagtgccctgtgcctgatgaatagcaggtacttaataaacatggtttgatttgtagcttagctggctgctagatgaaaagagaagagaagttatttctgaagttatcacacaatcacaacatcctggaaaaacaggattctggttatcaaaatttgatttacacatacatcctttgtatttattataccatgtttcaaatataaagagatgtatatatgaaataaaataacgaacactcaaattcccaccattcagctctatcaaatttacagattttgccataggcccttgaggtctgttgatactgttatattttaagaaacaaaacatctcaaatccaattgatgtccccgtgtcccttccctgtccgtgctcctgtctttctgtctccagaaataaccattaccctgaatttgagtttaccagtctagtatgcatttttatactatgactatatatgtacatagtcatagcaattacagggcattattttgcaggttttcaagctgytatataaatattatattttgtataaaattatatagattatataaatactaaaaatattattacctttttggtctatttgtttaactacatttttgcatatagctatgtagtgttttgttgtataaatataccacaatttatttttccatttttctgttgataaacattttgattgtttacagtcttcccctgtaataggtaatgccacatacaattaacattcttttacatatttttttttgtcacacatgtgagggtttcttagtctaagatatatacctagaagtaaatttacagggggaaggaggtaggattgctctgattttctttgattcggccaaagtgttctacaaaacagttgtgccaactgatgcttccacaagcagtggatgagagaagctgtttcaggtttcagcagttggtatcatcagacagatctgtatcaatcttttagtgtgaaatggcatcacatcattttattttgtgtttccctgacaatgaggaaggtygaagatctttraataggtatcttggccaatcaagttttgttttataaaaatttgtgtccatttcccttttagagggaatgggttttgttttcttattgatttatacagtactttatatattctggatagcaattctttgttgttaacatgcattgcaaatgtctttttccacactgttgctaggcttttcatgttgtttatgatgttgctttattaatagcagtattcaattttaatatcatacaatttatcaacctattactttgtggtttgggctttttatgtctcatataagaaaaccttcttcatytccaaaattctaaagattctaccatatttacttataaaagctttacagtttggctttctacaagtagtccagctggaatcattgttatataatataatgggctctaattttattttattttttgctgcatagataactagtcatctcagcagcattattgaatgcttcattttttggtcactgattgattgataccaagtttgcatgtatgtgtgtgtctctttttggattctgtattatgcttcagtgttctatttttttccccatgacagtactactccttgattattcctgtagctttagagatattattgcatagggttaggtgtaggggcttagtagccaygctgcttgagtttgaatcctaacaatgccactgcctagccatgggatcttgaaagagttccataatctctttgtgtaccagtttcttttttatctgtaaaatggtgacaataatcatatctaacttataatggataaaaagcttttgcctgttttttgttttgttttgttttttgagayggagttttgctcttgtcacccaggctggaatgcaatggagcgatctcagttcggttcactgcaacctctgcctcccgggttcaagcgattttcctgycacagcctccygagtagctgggattacagcacctgccaccacacccagctaatttaatttttgtagttttagtaaagacagggtttcaccacgtttgccagtctggtcttgaactcctgatctcaggtgatctgcacccccgccctgcctgcaccggcttgccaaagtgctaggattacaggtgtgagccactgtgcctggccttgcctggtattttaataaaccttaaaagttagcagttttagtcatagtgtgagtatcagcattattattactaattgtgatatctgataggtcaggtcacttctaccctttcttcttctccaaaatggtcttaaacattgttgaccttttgctctttcacatgaatttcaagatcagcttatagtgcttcatgacaaagttgattgaaaacacaaatgtcattgcattgacatatggattaatttgattctccttatccgtaaacttgacataactttgtttattcagctcttttatgccaattagaaagtaattttgtaatttattccacagaggcccacacatgtttcttagaattatttttagctgcattgcagtttgttgttgctattgtgaataagatttttttcatcttattaattattattattacagcttggattctggtgtcaatgccatgttcttttttattgatacataatatttgcacatatttattcagtccatgtgatattttgttgcattcatagcatgtgcaattattaagtcaaggtatttggagtatccatcacctagaatttttactatttctgtgtgttggtaacatttcaagtcctttcttctaggtgttttgaaatttacgatacatttttgtaaactatagtcrtcatactctgctgtcatatattagagcttatttcttctatttcactgtatgcttgtattcattaaccaacctctcttcatacccctcccaacccccaccacacacacacttcacagcctctggtaactatcattccactctgtacctccatgaggtcaacattttcagttgcatgtcagctccactgttgggggcagtggggtcactgccaatggttcatgctttggccctggtgacagcagccaggagcagcagctgctgcaggtgggggaggtcaatgggtttccaagggtgtggatatgcagagactgttgcaccctagggcaagatgcagtgtagcggaggctgggctctaaaaatggcaccttgctgtagctagttaggacttggggtatgtgtgggacccaatgtgagctccctctctggagcaatgctgtcatgtggattccaggcagctccctatgttagtctcagggcccacaaagatcaagggactctctcacggctaggattgctggagtctgtggtgggaatgtggaccactgagggtctctcacttaccctttcccccacattggagagcttttgcaggctctgagctgctccctactgaattggatgcctcacttccctcttcctttgctttcctttcacttttctgctgaattccagtgtcctctcttagatgacttacttgaagtgtgattatctgttcactcttttggctcctctttgtggaggaggtgagtaccagatacctctagtcagccatcttgaagcccctcagcgttattattcttgaatgagttgttactgctctgtagaaattctgttgttacctttatgttgatcmtgtatctggccaccttgctgaacactgactaatgtttatggtctgcagattcccatgaattatttatgtaaacaaaccatttatgctttaatatagctttgtttctgtctttctaatatgtgcctcatatttatttttatttttcttttcttaaaatgttgactaagaactcctaacagcattaaagaggagtattgatagcaggcatccttatcttattctaacyctaatggtaactttatgttgcattattaggtttgattcttgctatcggtttttggtagataatatttatcaagtttagaaagttaccttttatttctagtttacaaagatttttagacataaaagaatgttaaatttcatgaaatattttttggagtctcttgagtttatcatggattatctatttttaatttgttattattgggtagtactttaatagattttctaatgttgaaacatctttttatcctaggataataatacacattggtaatcaatagygtttcaaagaaatacttgggtcttttcccaaaggacaaaaaacctgaaggtttcaagcaattactttgatttgattttacataagttgtttttagatctttgtaggtaccattcctttatctctgtcatcttttggcatttatttattttttaatatggagcatgtaaaacgtgtataatagtaacaaaagatatgaacagtgggagatgaggaaggtggaaatgttagctctacttattttggaccacaaaatgagggttgctagaatctcctctgaagtactggatttgaaaatcgatcagccaagaatttctggagtcactcaggcccgtgccatataattacattatttgctgaggaggttaatcaggctggccatttgtctaaagacctggtgacacctatatccaaaattattttcaaaacgagcccttaactgccccgcataactgggtcctgcttgtgagctgcaagggcttgacttcttaggagttgtcctgtgtggcactgatgatacctggtgatggaaaatgtgtctgctcttattcccttacagccactttgttttctctctatttttactcgtctttagtaattacatgatttttgagactaacatacatgtaaaaccttttgtagatctgatgctaagcaaagaaacgatgttctgctcaataagtagagtttccatcttacaaaattatttcagtgcaattgcttttggtggtaaaatgccaagcattgtagaaatatgattttgatggtggttgagcagtactgtttctgtctaattacactcacgtattcatayaattactgtgaaattactgtaccaaaagcagtatatacacatagtaataataatgcaatgttctgattggctggctttttaaaagatttcagaaattgattaaaacatttaatggttcttctttcaagtatttgtgaaccaaatttcttattccaattgaaaatatgttacaaagagaatattcatttctccttcccccttcatcatgtagaacatagggagaaagatacggaactcctgggagttatctccttgattaactatgaagtaataaacagaagaaaacagcaacaattcatgtagttgggtactaaatctacacctttatggcctgcatttgccaactgtctccatatttgacagataaagtgcatctgtgaattttaagtctctcgggttatagttaagatatgtaattagagttccagatatacatcttacctaaaaacttctgctatggggaggggagaaaccaattaagtcagttttactcagcttcaaaaaaaacccytcaacctgaaaactgatgaaataactaatgaggacacttcatgtggggcatgttatttcttgatagagcaagtgtgttctgggacagaggctctttccctgaaggctggagtcaggaggtttacttggttaataaaaccacctccttgagacatgtgacttgatgtgtgtgtggtggagggggtagaaactagtatttttgaacatttgttatatatagtttcctaagcatttatacttatcagaagaaagttagctatctgagaaactctattaacttaaacaggccaatgaagagctgcttcaatgcactgaagcacaaatgcattacaatccctgggctgctgaggactaattccagactagaaacacttctaataattctaatgactataatgacaaaaagtaactaatatttmctgagcagatagtacatgcaagacttactaaatgttaagtaagtgttaacttatttaatattcaagaaaaacacatggtaggtaataggtcattaatagttagaaactgaggttcaaaacagttaactaatttgcccaaggtactataaatatctcctttgataggytaaatcatttttcttctgtaaaatggaaacagaccagttgattattgccatttataaaatagccttaatgcccttaaaaataaaaactcccttgaataatatatgargagaaggcaggaagatgctagaaatgtcagcttattagagtaagkatgtattatattgttaacagccaccaaaaattcacatagaaagaagttactagagatcttcaggaagattacaatctaatcagacagataaaacacacacacaagaaattacttgaaataattaaataataaaatgtcaacaaatgcaaagtagatacataattggaattgaattctagtttctgtggaattaatatcattaaatcagatacaaaatgatggggcagggagagagtgggtgactccttctcttaaaggattcttcctgctttcaacataagctggtgattccaatgagtgcatgaggacaaatcaatgtgaagggcccaggaaatgctgactgatccaaacaaagtgaacctggtcattaatgttctcctaaaggtgagatttgagattcaaagaaggtgagacccattgatcagttcagaggagccaagggatattctgatttgaggataaggtggagagagcasattaggctattgatagactgaagaamgagtgaaaaagtagcaggtgtaaaggagggaggcaggagtgagagatgcaataaatttttctaaagtagctgggtcaggaaaatttgaagagctagataaagattacagtagrattcccagggttctatatttttagagggattctgggtaccaggaaaattcaataagaaattctggggttaggacataatttttataaaagatttattaaatatattattcatataccatacaactcayccatttaaggcatatgatmctgtgttttttagtgtattcagagttgtgcaaccatcactgcaaccaattttagaacatttttatcacttcaaaagggaactatacccattagcagtctactcccccgtcctcctaataacccyagctgtaagcagccactaatctgctgtctctatagatttgcctattccggatactccatacaaatggaatcatacagtacgtggccttttgtgtccagcttctttcattaagcataatattttccagtttcatccatgccatagtatgtatctgtacttcatgatttttatggctgaataatattttattctatggacatatacacatacattttattaattaatktatcagttcatggacatttgggttgtcactttttggccattatgaataatgctgctatcaacattcatgtacaagttttggtgtgaaaataagtttttttyttttttggataaatacctgcctgtgagtggaattgctggtgcttatactaactctatgttcaacattttcaggaactaccagactattttttagagtagctgtaccagtttacatttctaccaacagtttatgagggttctgatttctccatatcttagccaactcttgttattatctatcattctgatagtagccatgataatgggtatacctcattatggctttggttgcatttcctagttggctaataatgttgagcatcttttcctgtacttaytgactatatatcttctttggataaatgtttcttcaaatcgtttgaccatttttaattgggctatttatctttttcttattgagctttaaaaattctttatatattctacatgcacatccttaattatatgtatgatgtgcaaatattttctctcaccttgtgggctatcttttcactttcttgcyagtgtgctttgaacacaaatgtttttaattttgataaatccaatttatctgtttttttcttttgtcacttatgcttttagtgtcgtatttaaaaaggcttgcctaatccaaagtaaggagtatttactcctacattttcttttgagagtagtagaattttagctcttatgcttaggtctattatctattttgagtttaattttgtgaatggtgtgaggaaggtgtctaacttcactttttttgcatgtgaatatacagttatcacmgaaccagatgttgaaaaaattaccccctccccgaccctcaccattggattgtcttagcactctyataaaaaattgatcatagatatatattcttattttgggactcttaagtttattccattgatcttcatgtatttccttcttccactgygtgcagttttgattaccataactttgtggcaaattttgaaatcagaaagtgtgaatcctccaacttttttatcctttcataggattgcttctggctatgctgggtcccttgaatttccgtgtgaattttaggattaactcatcaatgggaaattgggatgcrggcttctccaaactctccaggcaaaactaatgttccatcaggattgtaaaccacaggtaaagatctgagaggaggcaaataacatttactgattacctaccatgcatctaaattctgcagtggtgaatttatatgtyttattgtttaatccccatggtagccttatggarcaaatactccaattttcaggtaataaatatgagtctaagaaaggttgtcttgccatagtttataaatagtgatgtcaagatttatcttaggtttccacattagttattctacctctctccccaaagaaaagtagagtagataggctggaaactaacccttccactcctatgaatagcctttgcatcccattagggatgcaatgtaacatttatgttgtattagactttatacatatatttcttccatttgtagaatgggaatgtgtggagtcattccagccaaaagcagaagaacaaaagaaaatgaatcatacattttcaatatggctacatcataaagttatataagaggaagaatacaaaagatgaaacatgttagtaagagggagctatggtggttcccaaatgacaaactatgataaatatttccccaaaaacaaaactacaatgagacaccccctcacaaaagtcagaatggctattactacaaaaacaaaaagtagccaacattggagaagttgtggagaaaagggaacacttatacactgttagaaggaatgtaaattagttcagccactgtggaaagcagtttggagatttctgaaagaatttttaaaacagaactacctttcaactcagcaatcctattactgggtatatacccaaaggaaaataaattgttctaccaaatgacacctgcactcatacgttcatcacagcactattcacaatagcaaagacagggaattaacctagatgcctatcaacagtgggctggataaaraaaatgtacatatacaccatggaatactaagcagccataaaaaataatgaaatattgccctttgcagcaacatggatgcagctggagcccataatcctaatcaatttaactcaggaacagaaaatcaaatgccacatgttctcacttataagtgggagctaaacattgagtacacatggacatgtagaagagatcaatagacactgggcactggggacccctagagtagggagaatgggaggggaggaagggctgaaaaactacctactgggtactatgctaactacctgaataacaggattatttgtacaccaaagtttagtgctgcaatttacccatgtaacaaacctgcacatgtacccgtaaacctaaaataaaagttgaaaataaagtaaaatggcataaaatgttatagatacatttatctatgccaatgttttgaatttgatattttactatagttacacaggtatagctcttggggaaaattgggtaaagagtatgtgggaccattctgtattatattttcaacttcctataaatacacaactatttaataataaatttttaaaaaagaaaaaagaggaggcaatgtgctgagttttcagtaaagctaaaattacttaaatacttctgaaattattttccttcctggtgtgtgactatatatgaaaaatatcttattaaataatagagaaaatgcatagataatatatctttttcctttttctctctttacttggagtaataaaaagtttgtaacccttggtaagtcttccaaaattgttaattttactttgctggttcaagaaggccaaatctagaaaccactaccatagatgacgggaagctactgaagaattttgaatattaagtggaatgaatctttagacttatgtgtaagacaaatcacccttccaacaaacgacgttaggacaactgcacatgcaaatgcaaaagaatgaagttgaacccatacctcacacaaccctccaaaattaacaaagtaaattatagacttaaatggaggatataaaactcctgcaggaaaacagaagagtaaatttccatgatcatggagtagrcaattactttttacatttgaaatcagaagcataagcaacaacaataaagaacaatagatacgttaaactttrtcaaaattaaaaacctttgtccttcaaagggtaccatcaagaaaatgaaaaatcaggacttggggtggagcaaggtggagtaggagtctccactgatcatccctcacacaaggagattaatttaacaactatgtacacagaataaaacaccttcataagaaccaaaactcaggtgagcattcacagtacacagtacgtggttttaacttcatatcaatgcaagaggcactgaagaggcaggaaaaacagccttgaattgctgatgccgcctctctcccatgccccagmggtgacagcatggtggagaatgctactgtgtgctggcaagagggaaatcacagcaactgtgacacatttaataatgtctcagggcatttaataatcaaactcccaaaggtcaaggatagcataaagatcatcctaaaagcagcaagggaaaagaagcaaatgacatacaatggagctccaataaagcatagagaacccagaaacaaatccatgcacctaaagtgaactcatttttgacagaggagaaccaagatcatgcactggggaaaagaccatctcttcaataaatgatgctgggaaaactagatatccatatgcagaagaataaaactagaccccctatctctcaccatatacaaaaatcaaatcaaaatggatttaagacttaagtctgagacctcaaactataaaaccactacaggaaacattggagaaactcttcaggacgttgatttgggcgaaattttattgagataccccaaaagtagaggccaccaaagcaaaaatggacaaatgggatcacctcaagttaaaaagctctgcacagcaaaagaaataattaatgaagtgaagcgacaacccacagaatgggagaaaatacttgcaaactacccatctgacaagagattaacaaccagaatatataaggagctgaaacaactccataggaaaaaatctaataatccaattaaaaaatgagcaaaatatttgaatagatatttctcaaaggaagacatacaaatggcaaacaggcatatgaagtagtgctcaacatcgctgatcatcagaaaagtgaaaatcaaaactacaatgagatatcatctcaccccacttaaaatggcttgtatccaaaagacaggcaattgcaaacactggtgaagatgtggaggaaaggaaacccttgcacactgttggtgggaatgtaaattagtacaatcactgtggagaacagtttgaacgttccttgaaaaactaaatatagagttactgtatgatccagcaatcccaccgctgggtatataaccaaaagaaaggaaatcagtaaatcaaagagatatctgcattcccatgtttgttgcagcaagaacttggaagccaaaatttggaagccaaaacttggaagcaacctaagtgtccatcaatagatgaatggataaagaaaatctggtacttatacacaacagaatactgtttagccatttaaaaacatgagatcctgtcatttgcagcaacacggatggaactggaggtcattatgctaagtaaaataactcaagcacagaaagacaaatattgcctgttctctcactcatttgtgggatctagaaaccaaaggaatagaattcatggagatagagagtagaacgatggttaccagaggctaggaaggatagtgggagggttgtggggaagtggggatgtttaacgggtacagaataaatagaaagaatgaataagaaatggtgtttgatagcccaatagggtacaatagtcagtaatagtttagttgtgaatgttttaaaaagacaatgaaaaatctactcacagaatgggagaatatatttgcaaattatatatcagataaaggactcayatctagaatatataaataattattacaatgtaatttaaaaatttgtctaatgattttagtagccatctcccgaaagaagatatataaatggccaataaatacatgaaaagatgctcaacaccattagaaatctgaaaaatgcaaatcaaaccacaatgagataccacttcacaccggcttgatggctactgtcaaaatgatagataataaaaatgattggcaaagatggagaaactggaatcctcatacactgctgatagggaatcaaaatggcacagcagttttgaaacatagtctagcggttccttaaaatgttggacatagaggccacacakgattcagtaatttcactctgagaaaaataaaaacacatccacacaaaaacttttacatgcattttcaaagcagcattatttttacagtcaaagagtggaaggaacctacatgtctgtcaactgattaatggattgaaaaatgtatgaggtccatacaatctaatattattcagcaattaaaaatacagatacatggtacaacatgtatgaatcttrgaaacattctaagtgaagcaagctagtcacaaaagaccaaatattatataattctatttatatgaaatgtccagaataggcacatctatggagatagtagtttagttgtttcctggggctgggacaagggagtaggagcaggaataagaaatgaccataaatggggacagtgtttctccttgggctgatgaaaatgttctaaaattagattgtggtgataaatgcacaatgcagtgaatataacaaaatgcactgaactcactttaaatgagtgaattatatggtatgtgagttttatcaaaataaaactcttaaaaaagtcgggggaggatcactaagtgtcacagtggaggacaggatgtaagaagctgagatgatagacaaggatataagcaaagaccatgtttacatagttcaggaaaattaaaagcagggcttgaactaccatagtggcaatgggaatgatatagtgggaacaaatgcaggatgatgtggtggtaactaggcacactttctctctacatcatcaacacccacttgatagccactttcacccacttgagcgctactgtctctgatgggtagaaacctcactttatttgaaaacacccagagccaaacgtctgtccaccatctcctgagttggcctgcctatgtggagaatcatttaaattatttttactatttgaggcaaaatgtgcttgtctgcaacatctacccattgtctttcattgtgccttgtaaaagtaaatatattactatgataatgtttgaaaacgtttgtttaatagatgatccagatctgctggagattatagactgtatcaatatttgtacaataaaggtcagagagacaattctcaagttagaatttttgaaaatctaaactgttcatcagataggtagatgaagagaccaagccctcatgtggtgtcagaccagctttctcatcccaaatattaatacattttggttgcacatagaaggaaggcataggaaccccattgctatgtggggcttttactgatggcatctttctggaatcctgagaaggtactatccacactcctgtcattcagtttaattgaaatgtgaccctttcaggcaacctaacaatatgtttacattacacagaatttttcacttaagattccccttaatatttaactaacaccactaaagaataatgcgactggcactatagctgtatcagaatgggaaatcaatcagttttcaatcttgtttggcaaccctctcactaacccaggcagacagagacccggggaaggggagaaagggatgttaggccttgagccagaggtgaaattaaatctgctttgtatctattgtgaaatctgcctcactttccaagtgctaacaaagggacaaactgggagaggcaggtgcctgatgtgtcttctatctggaaaatcgggaggtatcccaagaagtcacgctcattgcttctgacactttctttaaaatattgctcttttcacccatacaatttttgtcagtaatcctcaaaggaagataatacttggaatttcaaatcagcagcaccttgatggcaaagtcaggtatttagaacccaatttaactcttatgctcccaaacagtagaaataaaaacaacaataacaataataaagttattttacattaaattatcatggtacagttacaaagtacttcacatatattgtcttaatttacccagtggagaaaactgtgctgtttagctattcaatatatgttttgtttgattttattatgaaaatatatgaagcaaaaagtctttctccatagaaaaatcaagtaaagcccatagaatagttattagcctagcatatatgagagtgctcagtgtaggttctttctcccttctgcccctctaaagctactttggctaataggcagtaaatgttcctaataccttcagcagtagagattagttatcatttcccccattatgtacaagaaggatccattaagcatcccaagtccagggaagggaaagggatgccaagaagtagacaagaggtacragagtaccacatccccctttctcccacaaagacaatcatgccaagacagtaggctgtgttcttctgacctactagtttgctcctagttagaccgtagacttaatcttgcagcattggttcttgtggaaaacaggatgatctgttggaataaactgagtacctgagatacaacacaaagcaggtgaagcttgtgtcagcgcctctcccttgcatggacccagtgggagataaagagattatagaagaaaagaaactgaattaccaggtcttcaataatttgttgtgatctattttttcatwctatttacttttaaacctactttgtatttgtaattttattttttcttaaagattctcacttccttcagtaatataggccacacaagctagatccacccttgaagagaacttaattcaaaagaatcccacagcaaatgactgcaaccttcacagccaggccagattcaggattcaatgctaaattagtggtggattcactggtgatgccaaattggtgatatcaaaagacaacaaaccaggctcaaatatgcaagttgaatgcagcattttttttttttttttgagatggagtctagctctgttgcccaggctggagtgcagtggctctatctcggctcactgcaagctccgcctcccgggttcacgccattctcctgcctcagcctcccaagtagctgggactataggcgcccaccaccacgcctggctaattttttgtatttttagtagagacggggtttcaccgttagccaggatggtctcgatctcctgacctcaagatccgcctgcttcggcctcccaaagtgctgggattacaggcgtggcagcatttttattattctgaaactgatctaattttgatgaatttttaccttcctcctaggtggcagaaaaagttcaacttgttagttctgtttcttatttttgattccacttaaaatgctcccctgcaagaaaattcttgcccttttcagaattcttcccttccccatttccgtttccaaagatgattgctgagtacaagggtgggaggatgkctctcagtccggtgtccaacgggaggggcccctctgatctcatggagggtgcctgtgccttttgctgggctcccattgggtcagcattaagggggctgcctatgctgacaacaactgaggacacacccctttaaagctcaccaaacactgtcctcctgctattgacgtctagaatgcagaggaagctcctggataccttctacaccacacaggcgttaaagattttggagagctaacctcagggcatgttactttggtggagctaccactgtgatctcctcccagagcacagttgtccccctcccccaggaggcatcaggatgtgtcttctctctcccctaggaaaattccatgtcttcatttctccccacaggaaaattcctctggaaaatagcaggtccttccgttttctcttcctctcttgaacgggcttcctcgaagtcatctccttcttactgggtcactaagcctcccagctcggtagacatggaagaaaaggtgtccttcctgcattatagaaaaagcacagatatgccagatgtgtgcttcaggcctggttcttgatgtgttaattgaggctaacaggttttagatgattcgtttcatttctaacagaaccagttgttcaaaactattgtcttgtttccagtgccaaagctgtggatattcaatgatgtttatcactctccccytgccgctgcagtcctaccctgcactgctaatcctccctcagcaaacagatgcccctggaacaatgtakgggtgagcacaaagaaattcaggagaagaaagtacaytcatgtaattcaaaattgttatctctatcataagattagtaaaaagcctttgttcagattttttattgtgagcagtgttgtattttttgttattgtttcaagggataggttgatattttgatatcacttagaaccgagtcggtaaactacatatttatctttgatyaactaagattctgtttttaaagaaaagaggacatctttggctagtaatgattaggtaacagtgaatggcaggtgccatatggatccttggagcacagacggacatcaaccagcaagtatttctcagattctaccctaaaatagtgacagtatgtcaggtgtggactaatatatgtaatagctttcaaaaggaactgaacaactagcaagtaaagagtaatttatattaaaagatcccaataatagatggactatggcaagaacctctgaactagtctctctgcttctwctctacctctttacagtgtattatctacactgcaatcaaaatcttccttccaaatgtaagtaactgttcaatggcttcccatgggactcggaataaaagctcacactctttacaatggccctgcaggttcctcatctcctacctccagcatcttcactgtccctctgctccaaccacactgcctctttcttattcctccagacctcccaacacagccctgcccccaagacccttccaatgactctgatcctcttccctgcgctacccagtgtctcactccatcgattcctccacatcctgccaaatgtcacctaaccagaaaggctttgttgaaccaccccagataaaataaagtcccctgcctttacccatcactctctcttgcccggtttaattctttctagcacttacattgtgataatttcttttctgcctcctgcctcttttcattggaaaatatattacatgagaggaggtttgctttattcattgctgaatgttcagcacctagaataatacctggcacaaaataggtcctcaattattatacccaattcctcccagttctcttggaagtttctccattttaccattgaaaattccacatccttgtgattcactttgtcccagtgaattccaaacagttggccatcctacccttaatagatagttgttgaatgaaggaaaggaatgaagaaaaaagaatgaggacagggaaggagggaggaatctaggacagaaaagaagggagagaggaaaaaaaggatgttaatattttcttgttctatatgtagaaagcaaaagagtatwtttgtaatcttttttcagcaaatgcctggatcaaattcaatatgattttaaagccatgagaccctctcattcttggttttgatgttgcacggtatcataatacatctgattggaatttcaatatcaggtttaatatactatgcaagctggtataggctctgaaattatgcatattcatgagagcaatcacacccttacttttgatataactggcaaagtaaggtaccacaagagaacaataatcaaagaaaaagggaggactaccagttgttatttacttatgacattttactggaaaaactyaagcaacatgaaagactatttctaaatgaagtactaaaactaacaagacaatgttataaagtgtcatattttctttccttttatacaataaaacattgaaaagctccaccactatgcagccacttcaccagatgcaataatatccaaatgtgaaagtaattaataatattgtagttttaattcccttggtatttcagagatatcctttgaacagcctaaatcaaatcatactggtacttatgagaaatagatatctcttgtgagtccttatattgtgcttcccaagaacctacagtgcatttcagttatttaccttgaaaattcttcagcccatccagagtgggtttggaaatttgtaatcattttgtagaatgtgataagggaggacctgtcttcctaaattctcaagcttggaattttcaagtcagtgtcaggaccataggctctctaatgcatatatatttgccctgagcaaataattatttatctctgtgcttcggtagttgcatctgtatgttaaaaataagattattgctatgttgatttcttatgacatgagagaagaggctttaaaaattaaagaaaagaagaaaacactttaaacttaagatgggaatcatatcttattctttcatattcccagcgcctagcagaatgccyggttaactcaccgggggcattagccagttccttgtctactacatcattccatcttgtatcattccacgctttgaagcaggtactattacaccctatttgtraggcttagagaggtctagtggcttgcccaagaacagaccacaagtacacagcagaggcatgattagaacmctgcccttctaactgcagtctggtgctctttcctggacacctgcacatctcttccagtaattgaactgacctgcatgttaagcatttcacattgctctaacacaccaaagcctatctacagaaatgttcagaaagatttgttcccaagccctcttccatgtcatgtatgcactttgttcctggcactctttgcagaccatctctctcccagcatgaaagttgtctataaaccctgtgtagtcgaattgcaatttggaatctctacaggagcccgactacattaaaccaatgcatggattaacacctacttcaacacacacaaccattctccacgtacatgggcagtttttacccaaccaaacaataacagacaggttctactcatacagaggaggcattgaaaggcacagtagaaacacagacacgcagtatagtgcttcgtgtccaggtgcattaatgagctgtggcctcaaatcccaggttcgccaagagtgtttctgctcatgtatcaaagcaaagtcatcctgggtgtgagtggaaatgctagttgcattcatgtcagcactagacatttcctggaacccattaaacaagattcattttccaaatggattttgttaatttatttttttttccttttgtagttagaaacctaggggaaaattgagaagaataaatgtggttaaactgccccaggggatggcttgtctgtagaagcatcccaggcataccgaatggcgtacaaaacagaccttaatgagtactgcttgtcaaaggatctgatatgcattttgcagaataaacataactcytttttcagcagttgatccactattctctagggaaatgaatgaagggccatatactgctgtctttgctgcccaaacatacacttgtttgaagggaaagcaacaaaaacaaaacaaaacaaaaaaccctgctggtttctctattttctaattacgttttctttccaagacatattttgttgtattggtacaaaatacgttcagtaaattcaaggaggagaaaacattccagtctgaaatggatttcagcttggcaaaaatgaattaatagaggcatggcaggtcacttatttaactaagtacaggggctgccctattaaccttgwgtgagctgagagaactaaagaaaattctttgtttgtcctactgcaaaattggccaaggcaaatcaaaacaagaygcctrggcaaatcaaagtgacacgttcaaaataaaatcatgttaatactggttgcaaatgaaactttattagcaagtcaactttagtagaagtgctgtctgaatgtaaaaatctgactgcttgaaaataacacgcccccagtaattaactctcctaataggactacaattaagatctmgtaggacagcatttcgggaatttcttcctgcttattctcaccatatatatttcttatggctgcaggttagtttatacctccaaatatcatatttctcactagaaatagcactgagtaattgggtgctgcagggcttactgttcaatactgagtcattttgattagacccatattttatcacttgtgccattagcatcagacatttttttaagccatgaaactcctatgttcttggatttgatgttcataaaattaaggaaatmagtttctaccatctatttttctcttcaaaaatcaaattacgtgacatctcatccatgtcaaggcagtctaaatcactgatcattttccatctgaggctaggtgtgaagctaatccattttctgtaatgaagcagcgaagctaaagaagggctgagctatactctgaactatggaaataatggatctaatttagatagttaatccagccatttctgaatagtgtgcactcatgtttgttgagctaataatgtccatcttaaatcaagaagacatttaaacctttatggaatatctttataaaatatcaacctttatggaatgttaktaaaaatgtatgtatggtaatggacaattcttcaccagtgctttggatattctgccctcagaccaaagatgcttatttttcttccttccctctcttcttccttttctctccctctcctctttcctttctttctcttagatcttcagtaatttctctgtactccatgcagcatgtgcagttgcttaattcaatccatcttttctttttaaaaatttttccaatctcataccttcctctatttactatgataaaactcttctatacttcataggaaactacttaaaagaagtatgtaccttcaatgtctttctccctaaattttcacttacttctaactcaaacagttgattctttatactaacacatgaataaacttgccaatgacatcttaygttgctaaggcttatgcgtgcttttattgtgtttgtttttactcatttttctagagcatttgacatatctccttgtcaaagtgttctcttctcttgccgtgggggacaccactctggttgttctttcttcatttcctttcttggatctcctttttcacccagaaatatcgttctctccaaggacttttttcttggtactctcctttaatcgctcaatgatttcatacaggcccatgtccttaggtgccacttctttgttcatattcccagcctgctgagactcaaataccagtgctcttctagatgtctctacttcagtacccttttagacaactaaaacctcaaactgtccaaaattagcccctcctttcctctctcgaaattgctctttgacttattttcctaatgttgctaatggatgaggcttctatccaggcctaaaactagaatctcagttatccaagtgtcttttgcatttaattttacaccagatattatctattctatctcctatctgtgtacgtcttcccattcataatgccttttaattgtcatttcttcagtgaattacaaagatatcttctgaaatattatcccttcttctggtatggcttcctgcaatattcaattccaatgtcatgctcttgattaaaatctttcagtggtcgctcactgtttctagaccttagctggaactcttggaccaaaaaatgtgagctacctctgtatccacctactttttttaaaaaggcaacttccgcacttataagggacagtaatccttgtgccagttgaaatattttcacagccatgattttatcacagaytgtaggaaacagattctcttgcttctagaaagcrtgttttgttagggaactgtgttgaattcttcacctcaattaacctttattttaaaccttctgagcatcagaagtatttactatcttatattataaatgcaaatactttttcctggatcaaataattgaagaataactaggattatgaatgggaaagaaaggtttcctatgcctgagtgagttgagttgctgttctttgcttatcatatataaagagtgagtgaatttattatcatcctggtakgtacatgttaactcaaaattattgtggtactcactgtactttgtactattgggttccaatggtttgtaagctagtgatttatgcacataaatccttaattcttaactaagaaaatttagaaattttaaaatttaataccctattaagaaaaaagggtgaattttcctgtgctctcttatagcaatcatcttatcaaaaattattgcccttttgagaaaagtacatcatgataacatcactttgtatcttctagctttctctgatgttaggcattttttcttaaacaagttaaatattcctcatggaaaaataattagccaattccttaaatttgacaaaaacatcattcagaattgttgctatcattccttttttttcctctttttttggatattttatgtccaggcaaatgggggaatgattggctttatattctttacatgaactgtcttttttcctgcctatcctagtaatatcacagcatctaatttattttcttaaccacataacatatcctttcctcttttctaataagagaatatagttaacttaggcaaatgaagcagtgcctgtgacatattaagtgctattaaatgctcaataaatgtttcatgactgaataaactcaaggccaggtaaacataagaatagagaaaaaataagagtgaagctgtgattggtagttttttgtttgtttcatatctataacctcttggtagcttccccaagaatagttaattgtccatgtgaccaggactttatatccttatgtcacctacttctgcttccttcccccaccagtttctgggaagaattttgccagatcaccagatgcacacagttagctactaaagaatctcttgtctgtctctttagcttctccataaatacacacatttcttcatttgtttttaaggcaatgctgtatgtgtaatcatgkgtgaatctttattgaacacttatggaataagccacctgttcttacaaattagctgagttctcaagaaggcccaaattagtgaattagttgatgaaggaaatttgttgcggagacagcaggcagctaagaaatttttcagcttgtcaaaggtattgttagtctcacagcttggcaaggagagaagaagataccattttgaagaattttaggtagtgtcttaataccttacactcactaaggacgaaaatgaaattgcttgtcttatcagttaaagggaagctttgctgatgtcagaccatagcccagaaagttaactaaaagttttgtagaagtagataatcttttcctggtgatcgatgtggtgagattggaagtgagttgccaggggagtcatggggaaataggcttamtcattttatttgtatttgtgctgaaggcagtgctgaacaaacctctgaagtcacttagccatgtcttttccagggggcatgcaaggcgactgctgatttctacagacactttttaagcgattaccagtgctggcaagtggaactacctttccggtcctcttacaagcatccagtcacttgctgaaatgtcataagcgatataaacctgctgacaggccaggatcattgcatctcctgcctcctccttccacgtaacaaatctcattgttgattggcatatggcagcaagcatcccaacacccagagtggtgttcttatttctgagggagcagggtctgtgtgtgaattgcacacacagggagcaatcccctgccctgatacaggcaacctgagtgcttagttccttctctgctcagaacttagtgtgactatgtggcctacctcacattgtttgtgttacacctacacaggaaaaaggaaaaatgtccttttgattccatgcttrtagagatgttcatccaatttgaatgaacatgtagccaaggtagtgtcttccccctttcttctcctttttttttttgtctcataggtgtaataacatttcattttaaaaataaatatgaaaaatggaaaagcataaataaaaaatraacayatttgtgagttttttatgcagatataaatactgttaatattttaatttttatcctctggccttgtacttctaggaagtaatgaatggtctggttctttgggtccttggagccagtgtgggtaggagtggggttggcagggacagtagagaaggatgcaaggaaaatatttgctctggatagataattttgtctttttcatccaatcttatggggaagaaaatgttcaaaattcaataaatattcattgaacacctactatgtgctaaggactatttagatagtagaaacactgcaatraataatgcaaaatgcctttgtgaaagttataatctatggaaaatggaagagagagagtagaaatacccagtatgaaacttgacaattcaatacaaagtagccaaattatttaaataaacactttaagcacctggtatatggcacagttttgagtgatgatgtgttaaattcaaaatcaggaatttttatctaaactgtgtatctacaataatggattatataaaatgagacagtcttataagccttrtttctagatattttatagccttttgacaattatttaagtctgcatgtagaatttatcaccacttaagtagaatctattaggaccgtagaatctcagagatgaatttaaatggtctaccttctctatttctattatctatactacactcctgctcccatggctgaatcctctccctgatacattaagcagtaattatcagcctctttttraaatcttcaggcacaaaaagctctctacttcctgaagcagcccattccaccaaccagtagctccaattttcaaaatgatcttccttatattaatctgaaattcaagggcccatagtttcttccgctgaaagtatgtgcaagtctctgggaactatctcaggcagttgaagcctggggatatttcttttccaagtttcaaagttcaaattgccagaaagagccctgaaagggtctaaggtgttaaaggtgtccgtaaaactgatgaagaaaataatagcttgtatcaaagagcaccagtagcatgtggaagaatgggttgttaggggatatggctttgatctgccactcgcttgtcagcagagttgattcactcacttggctagttgagaaggtggcccttcctccatgtgtggtcttcctcaagccccatgctaaggcaaagaagttgacctaagctctgtcttccataggtcaaaggtacctgaatagttgagttattttagtagaaactctgaatatggaattgcagtttgaagcagccaaaatattcatttttatagctgagaagagactctaacatgcagaacatgttgtcttggagaagccagtgatgaaatgtgttggtttgagccatagcaacagttcacctttatatgcagaggaaatggaaatccattttaatcatcaatgaaaagataatcattctaaagttcctttccaacatctatcacaaacatactaagtttccttctaaaaataaaacaactgagttttccctccatcttgtgattttcaatggaacctgaaagctggtgtcctatcctcttatgcccttggtggccagtcaaaagagaacaggttttattcattaattacatcattgatttattcaccaaacatgcattgagcactcacgctgtatcagacacaatcgttagtactaaatgtaagaaatcctgagatcctcaaataaaatagcagaatrtgggtggatttgagtagactggtttagaagatattgaggaaggtgatttgatggtaactaaatatgagagtagtgagcgcattaagattaactctcaagtttcttatatgaggagttggggagatggtggtaagtccacaaacttgggtaaggcacccaattttacaggagcaacatactgaaggaaatccgtagggaaaaggtgaaayggtgtatttaccaatgatggtatttgggcatcagggtctggaagctcttcttcagatatggaagcccaggcttggtagtgtagtggactttatggtagagaagtagcatcttttctataaagaaccagattttctttttttttaaataagagctcctggttaaaagctgtgtgtcagatcccatatgggggctctaagatctaattttacttaagggccccaaggcacagaggctagccaagattctgagaagataccaaataaaaatcttggaaccaatagaaagcaattttcataattaggaggaacacagcaccccatatatcatcattagtctgagacaaggaacagaaggttggggagggaaaggatggtttctctaaacagggaacaggtggccagtgcagtcagggccagctagggaaaccttaggcaactctgctcgaaaatttctctgttcctcccctagaaactctcagatacagaagaaaacaggatgattagttattggcaattagttattagttattggcaatgggtgtttgcctccatgatagtgtttttgttcttaacagagacacagagaaaggccaaagggtagaatttaatggcacccgtagacactgtggaaaatgaagtgtttttgtatgtcctgataaactgaagttttgatgttacaaaatgtccaaaatgcaatttggctttcatttgaattgcttcctgcaaagttaattgtttgctcccaatccataattgatgatagcttttcccctattgcagttagaccaaggaatcttggcagtctagtgctatagaagccaracacatgcaggtaataacaccccaagaagagctgaaatattagccttyggagacacaggctgtgcaaatttctctggcttacaaaagagacatcagttacaccttagagcctgtcttgtagacttagtttcataaaagttgtataataattttggaaagtacagatgacatgtcagaaaaaatgccagaggaaaagctctrgggagcctgattaatcagtttcacagtaggtataaggaatgagggggttctgatagctaaagtagtgatttgcatgtctaactaattttcttctgccatttcttctccattcccatgatatccagtacagagtgaccatgcagtgttgattgatcgaacagcaaccaccacatacatgtcctgccccaccacaaaaggaaggaaggaataaaagaaagaaagaaagaaacaaacaaacaaacaaacaaaactaagcaagacaaaacaaatacccatgtcagtggttcaaagattaagattgtggctttgtgtaaagttctttccctttgtagacttgctgcataattattcaggtatgatggttacagtttttaaaaaggaagggaaattgtggtatgtggtatgtaaatatttttaaatgttgtctctctgttttgatcagtttttgttttattcaatttgtctttattaaatcttatcaaagcaaaacttgttcttcccatttctctgttttgattacaggactactgaatggagagctttctgatttctccaagggaattgttttgtagaaaaggccatgctagatttcccttgccactgcctctttctgcttggaaggtaacctttaccaagagctatagcctcttaatcttttagtggaaatcgctcttgtgaaaacgagccctgatagtatcttggctcactaattcatgccatgccgctcaaaattaaagcattaaaatttcatagatataataccatttataaatcatgtcataaaaacattcattttcttatagaccttgaaaactgggcatgtattcctcctccagctgttgcttaaagttcattacagcacaccagtatttgtcaaaaacaaagctctggtaaagtggggagatatttaggagcaacaccctcagagcatcaaggcactgtcctcccagcattgtgcacatgttcctcccattagtggtcatggaaactgcaagcccacctctgtgtaatcagagattcccggcagaattgtattaatggagcaagtggttctgggagggtagctttatcattctttatgtccttattctgttcacttggagaaagagactatttaccattttccctaaatttatctcctataaaatttcaatatgtttagtggatgaaggcaacagactaattaagtagacggtaaacatttgccacatttcaaaaaatgacaatgacagacgattctttttgccatttacccttaggcagcagatggggacttgataattgtttaagcagcagaaataacttgccctaatttactatctagttttttgtttgtttgtctttgattatgcctgaataaaaaccttttgtccatttgaagtggtggaaattagaatatccattttgaggtgtttctgggatgtacatgccacatatttggcttgcagatgctaatgggtatctaatcacatttgccaaccataaaatccctattggtaaaacacttacatctgcaataatctgccactttcttgaaacatgctaattttcttaaataatgtagaggcctataaggacttctattttatgtaaacaactagatgtagtaaacaatcagttgcaagaggtcattatatcataatctggactttgttacttttcagaagtttggggtttttgtttgttggcttgtgttgtcttgttttaatttcatcgggctagcatttcatagtagagtattaagatggattctttgacctttgatatgaaaagtagctgaaccatctttttattgcttgatttgttggattggagaatattttatctattcagtattaaagattagccctaggaaactgggagctgctctaaaatatggaatttctaagtcgagtgcattttctccaggctaaaataaacctagacacagatatttgatagtgtagaattcccttaatcttttaggcacagcatctgtatgctcattcacatggactcrttttacatacactacctacccatgccaccaggatcatttatctggtatgtaaaatctgatacgtgtttttgtgctaattgaaatattggtttgtttgttgtcagcctcagatgccttctccaacaaggctaaaaacaatttcaagcagaatataaataagacgcatctgaggatatacctatgcatacacaaatttgtgtgtgggtggacatacatwtattctacacaaatgcactgagggagagagcaagagtgagtttctattttcattctrtcgtgcttacgtatattcatatgatttcacattgggtatagctttggatctgagaaaaccagactattatatgtctggtaacttcactggaaaatctgaaagaatctaaattagccagtcctgctgatcttttggatacatgaattcatatgtccactaatttgttttctttttgctttttattgtggagaggggagaaatccaaacatacacaaatataaacagaataatataaaagaaacctctatgcatcgatcaccagctccagaaaataccaactcattggtctctgcagccccatcttcatcatcagtcacatcttcccaacccttctcccacctgttttttttgaggcaaatccaatagcatattatttcatttcaaaatattttattatgtactttcctaagataaaaacatagtttttatatatgagtagaataccaatcccacactaaaaaaattcaccgtaagtcttaatgtcatcagatctccagtcaatgcaattatctaatgcatcatacattttttaagaaatcataattcaaataaaatacatacattgcttgtccatagattgatttatcttgagactttttaaaacatatgggtactcctctccttttctttttttcttcttgcagttcatttgtcaaactgcaagggaaaaaaatgattgtttgtcctgtagcttctcacagtctagtttttgctgattgcatccccacgatatagcttaatatgttctttggtctcttatttactgtacttagtagttagatctagaagttttattatattagatttttgtggggttttcttttgataagacatttacatatgtggtcttttctacttaataaaaagcacactatatgctttatctctttttgaagtgctagccattaatgttcaatgcctaaatccattagttgattagagrttacaaaatactggtattcttatcttctcataccttcatcatttattagatgtgatatttttataataaaaatttcctcctttttattctttggtgaccagtagtacaactagtgtagccaagggaggwtaaactcttgattcttttatttacagttttcaaaattatcattagttccctacagtatccctcggtactcaataattttttactatcatgaagaacacatggatttaaaatttgttgaagtatttcaatctattgcatttacatcatccctgttgatgctcaaattgtcccatctttggcctgtaagaggctctaacaggttgttctacattcttttgacagattcatgtccactcttcactctgtaggggatatggaatcccagggattttggaaattgctgctaccctctccctttcactaggcctacgctttctgtttcttgctctttccggatgttctgtcacatgactttaacttggagatagctcctgaaggagccagtgtttatatgtaaattattgagaaacacaaaagtgccagaacacattagttttcaacaacctgttttattcttctcacatttttatgttatcttagggaaccagcttcacctggtgtttggaattctaactttttggtagccccttagccccaggtagcaaattgctgtactctttttgtgtcttcatcactgtgtggcttgtggtagtcacttgaatacttgttgaatgtatcagtgactgaaagaacaaataaacaaataagctcatgatctctctttaatttaaggcataaatctattttagatatggtgccatgaaacagaacaatcttagctgataagagagagttgatattgcatgtgcagggtgagagtacatttctgagtcatttgggagaggggcttcaataggaaactgtcccttgaatggaaaagcattccctgtacagtctttcagacactaattttgacaagcaccaaagcaagacacatgctttggagtgttatgggattttatgccaagaggttgaaataatttaatggatctggagagggtggaggtagcatagaattatggttgctttatccatttttttctgatctgtttaggtgatttatctattctgatttccctgaattgtttagtgctgagatttcatggaaataggtgttctaaaaaccactaaatattgttttttaattacctcacggcctcaaaggaacaagtaatcctcatcttctttttattggcactaaaattctctataaccaccagatcccataaagatcattctttttaaagccttgttttttactaaggaatgttgattttctagatacatcactgcaggatggagtcagkcaaagaataattattgtcattcaagtcagtgtttcataatctatctgggtgctaagagccaccccaattgggaagagtgcatgtgttataataaaattatctattcaccagacaaggaaagcaataactttgtagcatgtcatatgtctgtgttcacatatatacacagctggggagcaatggtaaacagtttcctaaacactcactaaattcatgcttatcaagtgtcttattccttaaaccaatagtctacacagacatttttactgtactcactccaaagtaaataatttttgagcatttaacctcagcaaattaggttgaaccatatgaaattgacaatttgtgggtcaaaaatacttgaacattggcaatttcatattttycaaccttctaattttattagttacaaatatgtacatatgtaccatcatcattaattaatataacaagcacaataactctttgggtaaggatcaataatatattgggtgtaaatctgcatttccagtagtctcttgggtaatttctaaatcattgagttagttctgatgagatcagaccatcacagtttttactctgatactgtggctagctagaaacttgccctaggagatatgtcagctctgacagtttcttcttgtgtctaatgtgcttgccttgttactatttttagtcaatctatgttttctttgcagaaatctttttacgccgcttgtccattttgagagggctaattgataagttgaaactaaataatataatacatatataaaccagtttgactagaccatttwattcagaatatgttgcacagtactcaaagagaagatttcacatgttgactctgacgtgcagatgaatgatggtgccgtagacaattaggatattagattttagtagaacttaatttatttctaatttttccagtgacacaatggatataaatgaaagttcaaacctagtttgagttktgccycccacaggcagtctttccatgtggcttggatttataacaacttggtggctgggttctgagacagagcatctgaaaagcaagcattccaagaaatcaggtggacatcggatagactttcatgacccagccttggaaatcacatagtgtcacttcctcatccttaattaattaaagcaattacaatcccatgtagatttaagaggagggtacrtagatatctctatagaaggaatgtcaaagagtttgtggccactgtttataaaccaccacaccactcaatgcataaatcccttaacaaatggtcatccacatttactacctctactgacaaggagttcattatcacagaatgtaaactattccttttttgggacagtattaagtattaaaaatattttctcaagcggaacaaaaatatgctttcttattacccagtttttgttctcccttctgccctccggaacacagcaagtcagctttcctttttgcttggaagtagttttcaagtgaattgtgttttcttttggatgttcacactcctagttgctttgactctttcctatttctctcatcatgtggttatcttctaagcagacaatactttatttctatttctcttaaagtactactaaatttgaacccatgtaccatttaatactgcccctgcagactgggttgttaaaatactatttgcgtatgtaatagtttctcaaaagaattatctatagaacaatttattagtgcaaactgttaatatataatttttcagatactcagagtgccagcatactctgagccaatgagagctgatttgggagactataccggatgctgtcaggcagcaaatgtttgtgccccatatggcaaatgttctcagccagtgaatactctattgtaccatactcagttgaaagtcttcagcaatgtttgttatgtacccctcaggagcctttctttctgccctatatttttgtgttctagtgaactgtttgaaaccataatggccgacaaaatgtatgcaagtgatagtgctgagactgaggcaatgaaacccaggaagaatattccactggctattgacatgcagggcttccagcagtttgagaagcctttgatgaaaaggtcaaagtaacagatggtaaagatcagcaggaaattagggattggtataagtccttttgacattctgaagggcattataaaacatccctgtaggattgcccaacagttgtttgaaaaattcctagaagaagaaactaaggttgaattatgtcatgacttctagtgatttaacaaaaatgaaagagtgcctgccactgtataatgatttaacaaaaatgaaagagtgcctgccgctgtataatgccaggaactcatctttacaggaactatgtgcttaggacgctgtgtgatgcagatatactagctactctttctttttcagaaatgagtgtcccacaccacaatcatatttccatattctaggtaaattttgatcagagaagactgaagtagaattaattttcctacaatatgacatttttcatcaactacttaaggtgactttagctttttaaacagctacataacaatgttgacccatcttaagcttcttcaacaaagatctccatatttttttcaggtaaaagtctacaaagcccaattctgttcctcaccaccactctaatatgtaatctgatcatggtggtaatgaggaccatgactaatgtttattgggcacttgcttagctccaggcacaattaagtgcttttcactatttcaggaaatcctcaccacaaacctatgaggtagttgcttttattatccctatcttttgcatsgggagtattatagaagctggataacttgcccaaggtcttatagttagtaaatggtggagctgggatcagtggagcagttgggatgatgtcagatgttgaacatgtcatttataatgtcaaatatctatcccaggttggattgtatttgtaaactacatgacagcaggatttgatctgaaacagtgcttgcttggttcagaataaacgctgaatgaaygaatatgttgtaagcctgttgatccatgaattcactaataagcatctgtgatgcaaagcccaattcctcctgctgcaaatcatgtctgtcaatcttaatgtgtacagaaaatgttttttaaagccatgatttcataattgtagggttccaggaaaacatcctcttgggagagtcagcagcattaaggcatagcaatatttttgttcaggatgcattaggtatctctgattttccaatatcttaaatgctagyagcagcttcagatatgaaattacttagtaagcaattctaataggagaaacaagatctaaaagagaaacatataaggaatcctacttctggctctcaatggaaactggcatgagtcatgctagctctaaagaaatatggtatccaccactgaaatcatgcaacaaaagaaacttagctgaaatggttgaattgagctttctcaaaggccaattgacctattttgtccgatggtatgtggaaagaaatgatatacgctacttcccagcagaaaatttcagaggccttatgtaatatattgccacatggggctttttctctgtcacgaggccagcaatatcccaaatatgagtgttagcctgggtcccagagtgaagaagacatctacccagcccattatgataaagcagtactagcaagaaataagctaagtccttgaggacttgggattgttaccacagcatgtgtaacctaagctgactaaaaaattataaatattcttggccgggcgcagtggctcacgcctgtattcccagcaattttggaggccgaggcaggcggatcacctgaggtcaggagttcgagaccatcctggccaacatggtgaaaccccatctctactaagaaaacaaaaaatcagccgggcatggtggcacgcacctgtcatcccagctacttggggggctgagacaggagaatctcttgaacttgggcagtggaggttgcagtgagctaagatcatgccactgcactccagtctgggtgacagagtgagactccttctcaaaaaagaaaaaaaaaaaaactataaatattcttaaggaaatcagggctgagggtggagaaacatgttaggcataagaggaagaacaacaccttgcagtcccrggcgcttccagagaggcgagagcctaagygcagacaccacctccaaggcatagttggacacactgggtggaagggcaaacacagagtagatgcacagttcwtgctggaaccagatccacagttgagggcccaggaataatatgaaagaaaacagtatcttcatgtggcagaaagtgaataacatttattttagcattcatttcatctaatcttattgctcttccctatcataaccaacccattccataagcccttccttagaaatacatagctctctaccatctgtcagtaccttaaaatcaatcaaatacccagtggatttttattttacttatttattgcttaaaagaatagctttagattatgcatctcaaagtctgtggcattgagaagtcactggcctggaataccctgccacctgcaaaaatcaactaacctatctcacttcaatccatttcaaatatttagtttctaattagatttcatttgtgaaaagggttctacaaccaaaaatgcttaaaattactgcttctgacgaggccacgggctcatttcaactactttgaaatgattatcatcaaattctgtggactctgttttggtctgtcctaatctcaacccttcttttcagagcatgtggcagaagcagcttcactacagagataaatattcatgtgcattgcattttgctcacaggcactgtataaactatatttagaagtctgaatgttgagatgtactgtgtcaacattgaaatttaattactgtgatggactttaaatccatggaccttcttgcactgcggagtgaatattacctcttgtgtttcttcattctcctttacattcctatagaagagggttgcaatctgcttaactagaacacccacctgcccttctcctccaagtgaatgaaatgaactctcagttttacgactgttttatctttgtrttgtgaaaaagaaatattgtcttgctaaactctttggacacttcccaatatgcactatctctctcctactcctattatcactcattctggtaataaatgataatgttcattgctaggatttgtaaagcactgtcaagttagcccattattttaaactcaggttaaagtaaggattttagatttatgtaagcctggtgcagtttcattaagaaccaaaggcattttaatttttctccctctacccaagggactttacacttcttaatgtgacattaatcagtgttttaatatttcttcaaaatgtatctattctctgcatgctwtttaccgtctttgtcaaagtcagtgaacaggaataaaaagtaactacatgatatagaaactatggtcttcttggcccttgtgtaatagccaagtggatgctgttaaaagtgaatctatccatggtgcctttcctatttctgtacaggrttttgatttcattttaaatgaatgtcataaaccccaggtctgaaaactaatagaatttttgcatttacctactgatccataacctttaagttagactgtgtgtccatttgcagtcagttcgttggatgatgcaatgctttaacactgaatgaaaagatttctgctatattccagacaccagatatgaaggccagtttgggtggattattcttagaatgactttatattagtcctgatgggtagtacagaataagctgtaggagctagctacagtcccttaaatgagaggagacaaggaaagagacgtgtttgataacatgacaccgactcactttgggaggtggaaggctaattaggagtccagggattggcagaacatattgtctgagtcctggtcagtacacagtgagtgtgtacactgttgctgactggctggtccccatggagacattactgctcgatcagttctcctcagcgcctgtgtgtccagagctgtgactgtggctttgagatgcctggctgacgggcaaagttctctagatgctgagagtccggcgaacatgtggaggaggctgcattctgctgcccgtcctggccctgggcagtgtgatgcagcatatgcttgcacacaacgaatcaggtccaaatcccacttctaggcttactggttgagtgaccttgggaaaattatttaatctctaaattggtctcttcatctgtaacctgatgttggtgtgaggattaaatatgataatccaggaaaagcatcccgtcaagttctgggcacgtaatggctcttgataaatggaatttaaaaggagagcctgtccctcaggcagttcaaatctgatctaatgacttccaatggatcaagagacgtggcatgtgggtggaaaagcctgaaggctgggattggtgagtgggacgctcaggttaccaacaggtgtagacaggtcctgctactggctgtggcagcaccagttctccataaacatccatcggttaggatccaccaggccttgaggagagtaaagagggcactaggggacctatccctgggagacctggcataaatccaaaggagaggaaggtgggaaacagggatgatgaacatacagagcacatgtttcttcttttccatttttaccggcagccagtctgctcctgaccagaccagatctcagcctagatcccattcctctttgtactgcatattcccctaaagacaycctaaaagagaatgatagacccagtgaatgcttagtagccacaggtagtttttttgtttgtttgtttaaatagggcctgtccaaagaaatatcacttaaaaaaaataaagcattctacctagttttttttttaatgtagccatatccaaataaagtgtatgatcccttccccacctatctcctccctttcatgttttcttggtttctgcttttctaccacagaaaactccagtgtctttgtgctacgtagaacacaagggatgggtgaatcaaagttgctcagaaatataagctaaggaaaagaagaagtgaattgaacttcaaaactaatagcacaaaagtaatgcacttgatatttgccatggacaggatactgtaaatcagtgcgtgtgctaattggccatttgcctgtgtatccttaaatccatttccctcccttcctctactctgctgtcaatcacaggaaacaccatttgggggctcccttgacaactagcttctagtagttttgacaatcacgggtactagcagaaaactgtaggatgaggaaaggggagaagtcaccgtatttctccctctgccttggggaggcatttccagcaggaagaagctgtgtcttctgtggctccactcccagtagacatccctttccttcatggtcccagcttctgccaggcagccactaggctccacttgttccagcctgagtaactggtttctggaaataccacatcctagaagcagtggcttcctgttcttatatayctttgaattgcctcctctgtccctgattagcttttcaggtcatttatcatctatgtaaccaattccaagtattaaattttctctgtttaaagcacttagagtagtttttatttcctgtgtagatcctgactgatacactggtgatttgaatctattctgctcaatgaattagtagaatgggaaagttaatgtatttaaacagctatgtctctgtgcrgctctgaataaaaacaaaaatgcataaataatgtactaagacatttcatcacagcaaaacactgctttggtttctgatatttcatgccatttgcaaatatctccttatttgttattctggggagttttcattagggctaaactatttcacatgacaagtacttttacagcagtttgcaaaaatcatgcactttcccaggttaaaaagaataaccctgaactaaattttaccttcaccttgtgcttcctgacataagtctcatttctaaccaacagaccttcccagcaccctggtgtaaaggaatctacctggcccacaggacaaacgtgccctgaccagctttccacratccccttctgagctgaaaaaaaatgtattaagtggttaaagaataaaacttggtaattcttataagaattcagacaatgaatggcttataaaatgggccgttaaaataattcatgtctgaaattcagcattaatatgatgcaacatgtcaggtgggggaactgactcctcagagctctactcctaactgcttggctacttgagtaatattaagagaatccatctgaaagaaagggaatagaaatactgacttgttctaagggtagcttaaataagctttgcaaatagcaagatcccactacaagcagatgaactgggcattcagatacctaatgagttagaaagcaattcttccttgatacccagcaccccttcatgcatctagtttttgtccataccaaacttgggaagtagggatcaacaatcgtccttacattctccctgagaggtgggaggagggctccagttctgctctcgtaahccattttttattcagcgtcaccttctctttcaatgggctaagtatcctacaaactggggatgcatcttaattaattctggccaggttcaatggcatttaagagcaggattggcaagtggccttgaaaatgtgctcagtayagccaagttgtacccttgaggacctctatacttaagatgtacctgtgtttctgctccccatcaactgggatccatagatctctctttgtaatcaagacccatactttactgaggttctgagcagctgctcaacgtgaccacatttcatctgccattactttttagtgtcttttaatatgaaggaatgcattcattctgtaagaaaaatgggattagaattttaggaaggctctcaaataatgcaacaataaattcttcaatacccagttgtcagatgtttcagtaaattgcaaatatcagattactttttwaaaatatttcaaacacacacttggaattaaacaagaaccatatattagaaaaggaaataagcttacyttttctattgtaagactccaagcacccacatggatcttcatggtggagattttaacaacactgctaatactgacttacttccaatcagagctgagagagcaaacaaagacaaactctctatggatgtactcatttttttaaacccatatttaaaattaataattttcttaggcattcaatgtgaataataaagctgaactcatttatttaaagttgtaaatttttaaaatagctctaaattagttctctgtgatacaggaaaccagcatgcagaaagccagtaactgcctcactgtttcatccctaactgtgggatcttgggcaagttacttaattgtacttgtgtccattttctctggaaagtgcatatgataacagggctcaccttggttggttattatgaatattaaagtagatgattcatttgattattattcaataaatatgcattgagagtctcctgtgtaacatacatggagcttgccctgttgaacttatggtttggaaaaagaaatagaaattaatcaaagaataatataaataagtgtaattatagctagataaaagctactaaaggaagatatttgatgctctaagaatacatgacaggagactgcacttaatctgtgatgataaaggttaggaaaggttccctaaagaaatacaaaggagatatgaaagattggtaagagttaaccaggctgtgtgcgtatgtgtgtgtgtgtgtgkctctgtgtgtatgtgtgtgtaggggctggagtggacatttcaggcaaagggaatagctggcatatatacccaggtttcctctggaaattcaccaccctgaggcaaccactgttagcctcccttccagttatgtttatcttttattttcagctaaataaattttattttgattcaaaagtctggggaattactttgacattaggtgtgtgtgtggtggagggtcctctgatgatgtgcctgtattttttccagagagcccagggcaagtgtgtatgatgcagatttatcctggacatacatcatgggcacatattatcattcattcagaaaatatttatatatttatcaggcacctgcttcatgccttgcattaccctaaacactgaggataaagatgaataagacacaggctctgtctaggactttaaccctcagttgagtgagggaaagagataagaagacacatatttgtattatgccacatcagagttgtgtatgtgaggtaataaattcttgtagcatggaaaatggcctggctgcctctacctgggagggccatgaagactacacagaggaggtcatatgtgagcagaatttaaaggaagcctaagaaggacgttccagaagaacatgtactagggcacctcatctatgtccctaggacctagaagaagagtgcctggcatgtcatacctcaataataaatatctatctaatttacaattggcacggaaagaagttctgtgagttattctgagtggatcaaacatagcatgcaagtaaagggtcaacctgcagagaagtggccagaaatgtaaagagagataaaattgtgaagatgttcttatgtaaggtgaagaatcccagatttgattccctagtttaagtgatggaaagcaactgaagccttttaatcaaggagaatgacataatcagctttgctttatagaaaactcactgtgtcagcagtttaggggatggaaaagtgggagaaamgacttaagccagagagatcgtcaagaagagattatacttgtccagaacagagatgatgaggtttggagggaaggaagatggaaagaatgcatttcagaaacattttgaagtaaaatccatcaagaatacatgggattaaggaagaacaaagagacggggtgatgaagaaatgtttctggcctacatgactgctgacaccattcaytgagatgggaatacagaaatgagaaaagggttgagaaaatgcaagatcactttggggcatggtatggataaggtgcatgggtgtatgcatgagrgaactgtcctgatggagagaccactgggcgtcttatacagatttgggaatcataaaattgcttcccaggagaaaacagagaagagaaggcacccagaaagcatttggagcccctgaccctggctctatcaccgcccactcctcttcacctcagacttcctggtcactccttcctactcactgagggccctgtggactggctcacatttccccactgcccaaattcctgctcttgctcagccgttctyccttgacaaactagctatcatatcaggtattgaccttttcaggacaagaaaaccagaataaatgccaagagacatcttgccttctctagcatagcatttggggacgcagaggagaggatgtgtgccttacataacttggaatggtggggagtgaaaaatcttacagagaagccaaagactattttatacaaatccacttttaaaaggggaattcttttccacatacaaagaaccagaaatactcrttttgtcctccttttttttttgtttaatgtatatgcactcacagttgctaagaattaatactgaaaacatgattttttctaaataactccttgagaaggcacttaaagcctccatttgttatccaaatgtaacatgaggacaagaacagaagaattatttcataaagaaaataatcaatgaatcatttatcagttttcctaccctttgtatgacaaattgtaattagtatgatgtctttgttggcaagtgcttatcaaacaaaatgcagtacagaagcaaaggaagattctgtaaagaactgtgttgttttgaagacctaattgtgatgttatctctggaattttctgtgattacattgttaatttttaatctggtatccttaatagcaacaaggttattagcacctacctagagttctgaatgcccacattagataacacaatcttggcatggtgaacccttggaaataagcatttgcctaagatagaaaagagattcagaaagctctgatggccttggacagggcakaattttgagaaattgaatgtggcagaataaaaagaggttttatcaagcatctttctaaagtgctttcataaattttctctttggtaaagaatgtaccacacccgatcaagagtgttagaattgcttctcagacactttatctgaaattctttactctactttccccaaagtttgttttcactccaataattaatttttgagtgcctactccttgtgatacttgttggaaaatcaaagataaatgggacccagtctctgctttcaaagcactcacactggcatctagtgggaacacaggcctgtaaacaaatggtttcagtatgatgtaagaagcatactgatgtggcgatcataggaacagggatggcagaggagggagacctactcatwtgaaataagccacctactcattaatagaatctctgaggattactacgattcccacagagcccatcacaagtagcatgagaaagaccccagggtggaagggggcccttgtgctgccccttctccccttatttagtcagcatggagcccctggactggctttgaacatggctctgaacagggcttaggggataactttcagtgactgctgaaatccagtcatatgactatgtgattttagtcatggctcgtggaaataaatatgctttttttaggagtataaacgtaaaaaatactaacaaaaaatgaagctatttctacatatccagaactattttttttagagacatagcagtctcatcagtcaatattacaaatatgacattcttttatttccatctgcaaaattgttcatgaataaacagaaaagaagaatacacctcatctacccaactctttaaaggttatagcctgctcttagaaacatgtttgtcccttatctcaatacctatattgactttcaataccttctaaagaaccaaaggtctctaataccctcttgttcctctgttttcagaggatgtgtgttaacaaatttaactgtgtaataagttattcttaattacattcggatattttctcctcctaaaggaaaactaaataacaatagataaatagatggatggatgaatggatgcatagattagctagctagctagctaggtgatagaatagatagatgtagatagataaatacatagacaatagataaagctgctcctttgggctctttaacctctttgatcatctttcaataaactatgttaccacttaattagcctgaatgagtacctattgcaatgctgattcttgattttatttatgtgaccactcaacagatatgtctagatatataagagaatataatacaccattcctcatctgtctacagcctttccaaggaggtaattgatcatagtatagatagtgttgcactgtatcccacatcctgttttccctattattagcattttacattaatatttttcatttgtcacattgatacattacattattattaaccaaagttcaaatttcattgaaattgtcttagtttttcaaaaaaaggagagctgttttgccaggtatgtcctgcagaccctggccgagcaatggatgaaaggggtactcagacacaggtatacagtgtaagagcagctaggggactgctgaagagtgaacagtctcgataagctggggctccttgcttttgtttagtacagacataatgccgaaagcctgaagccaacacaatctgtgggtaattaacattattgttcctcctttcagggagcagtcttgtgctggcatggtcaaaggtcagttcctggttaacataagtaaacaagcctgtttacrctaaattcccctacacttccttgtacctactccttgccctctgcctcagggtaagagaacagctgccctcagcttattctcccccaaagctatgcagagccttctgacctttcagaaggtttgcaccctttccctgtaatttctcccaccactctgactgatctcctgcaatgtttaactggtgttatattctaagcttaatcgattgcacacttaaaatgttcagaaaacactcaggatagtggacaagaatcatttcaagtccctgaaacctcaaagtctttagcatatactaaccttcaggtctacatactgatgtgtaattttcaatgcactgtcaataactatcaataacatcatacacacgcacacacacacacacggccattttggatttgatttttacattgcagttacatatataaaagtgaagttatagattttaaacatttgcatatttcttaaactttctttttaaggatatatagatttgatctctcttttaccctccccaccaaataatggcccacttgacttagggcaatgggggtgtcctgtagttgtttattatgaagaagttgttctcaggcctggagacatgattagaaccagctggggaaattgcttttgagtagcagtgactgagttttactcaggggatgcagctttaattgatctgtgcagtcccctcatcccatctttttataagctccccaggtgactataatgcgyggccaaggctgggaaccactgcattggaaaatgcagaatttatctctttaattcagacaaacatatgaaatgtggaccttgtgtattaacatgaagcctggaagactgctagaaaactcttcgacctcctgctttagctttgtttcccctttgcactcaagcagaattaattacttcctacctaataacgtagtcatgcctcttttattttacttatcatgtagaattataattattttttcagtgcctgtctctccagttagacagttggtttccgaggccgagatcatgtcttgtttatgtgaaatagcctcagcttttaacacaattctggcacatagtagttgctcaataggtatcctagaaagggaaggtgagcataaatcagaaaaaagatataaagtgtagtttagtattaactgaaaataatttcttcttggataagcactcacttctaactacaggaaatgtaatgtagacaaatttgtattttcttgtattctgatcttcgtcagaaataatggcagctatcaatttttttatttaaagaatttaacccagcatctcatttcgggaaataaagcaacatatattgaggtagggattgctaacaagtgaatggctagttctgttaagccataataaaattgaaataatatcagcctgggacttttctctacatttcctatgtcagaacatttgcagtaactgttgctatcaatggatcatactcttgaccagctgggattgtctgagtttccacacacaaagagatggatgggatgctattagttagtctctttagacctgaattcaattttgattgaacatgtttatacttgtgagcttataattatccttgagttcattttaagagatggttttaaagatttcttttttcccttctcactaactactgctgtgttttcagagagatttactagcataaaagatttctggggacattcataaaagggaagaaaatccatagtttagtctgagtctaaaagcataaaccagaggggatgccaggcatctttctactgagtagcttccccgttgatcaatgttaggaagcttgctaatgacactctcatccagaacttttggagagtagggagaaactaacaaaataacagagagccgaggaattccacttttactaatcattcattttgaataatctcacttatttactcagtaaatatatgttgcttgcttaccatatatttatttcagtaagtatatgtcgcttgctgggtcctggtaatgacagtggtgagtttccttcccttgttagtgggatctacagccacctataacttaagattctcccccacacagcccagacatacacacaacgctaagatctgaatgcctgtgcccccaaaaattcataagttgaaatcctaacccccaaggtgatgtgaaaaatgtaccaaaccctgtccagaattttggaatcgcctcccagatactttatctagagactctttgttctacttccccacaagtttttcattccagtatttaatcattgagtgtttctgcttgtgatacttgttgcaaagtcaatgatagtcaaagaagttcaaaaattggttactttggacttaacaagcaaatgcacttctaggtggcttttgaaaaccaaaagtacacctaagtagagrgcttctgttttttatagtgattatatgaagagtaatgggtgaaaagcatcaaagctggaattggagctctggggtctacaccgtttccaatgaatcattcctaatktgatgctttcatccatgctcttggctctgtctgggatgtctcctctccgccaggccctgatttcagtcatccaggccgagtttaattatgtataactgtcttcgtttatttggggcactaaaacaaaaataacaaaaatactatagactgggtgtcytaaacaccaaaagtttattactcacagttctgcaggccgggaataccaagattaggttatctgcagattctctggtgaggacctgcttcttagttcacagacagcatcttcttgctgtgcccttccatggtataaggggtaagagagctccctgagatctcttttagaagggcactaatcctattcatgagggctccactctcacagcctaatgacctcccaaagggcccagctccaaacaccatcacgacaacatatgaatttgtgggagatataaacattcagcctatagccataaccagatgtttttgcaaccaagatggtgaattcttcctgagcacgtgccagtcagactccaggagagcagggatcccatgcacttatgtacttccatccatctcacagcctccatcgctttcagaaggttgagctgcccccaggtaccaaagcaaggactggaatatagctgagagatagaaatgttttgcaaaatgttgcttacagattcagaacttaaactgatttcgatctcttgggaaagaaatatgaattctaatctgatttcaatctctctggaacaaaaaaccttttgtatctatctttcttcaatgatgggaaaaagtaaaataccttccaagcctccactaatccttctactgatgtcttctatattcgtgattcagatgtgccttgtagacaagcacagatcttcactgctcacttctgccataaatgcttcacaaattaaaaaaaaaaaaatggtaagcctccgttagacagaaagaaaatgattcttttcactgtgtttaagaggactgattagggcatttcttcagtagtaccaatgtctaccatatgcttcttcctaaacttatataaaaataaatttctgacaaaaatatgtaaaatctaaacatgtctaactaattctcactgcatttctatgcttttcatggaaagagaaaataacgatgaaacttaagagtattgaaatatttatttttcaaaagtaatctactttattaatattatttgcttcttttttcatggttgtaggttcattgcattgcttttttcttacagacattttgataattgttgattttcataagtttgatagaagaatgccattaatacttctcatttatttttcattatctgttcacattaaaataaattctctcttgtaattttcttatgyatacaaataattggaatatttatgtaagattttgtgtttttttttagttttagagtatgaggttattataagggaactgttgtagattaaacttttttaattatactttaagttctgggatacatatgcagaacgtgcaggtttgttacctaagtatacatgtggcatggtggttttctgcacccatccacccattatctaggttttaagccccacatgcattaggtatttgtcccaatgctctccctccccttgccccccaccctccgacaggccccagtgtgtgatgttccccgtgtccatgtgttcttattgttcaactcccccttatgagtgagaacatgcggtgtttggttttctgttcctgtgagattaaatatttcatgatgaaaggagcaaagtgctgtgtctacatgtgaaaaatcaagtttaattcaatctagatggatgaaatacctggaatatccaagtaattctagtaaaattcgttgtttgattattttattcctcccactaccgtatcktgtgtgtgtgtgtgtgtgtgtgtgtgtgtgtgtgtgtgtgtaatgttgctcagaaaatatagataaatacttccattctccatcacaatttattgttttgggtgatgcatatcaatgaggttatgattattcacacacaattttcagaatatacaattttatatcctatgtgctgtgtttgttctctgcagctgggaaactgacctggtgagaagaaaaataggtagcccttaaaatctattttagaacaaaagttattttaagatagatgttacggactgaatgtttgtgtacccttaacattcttatattaaaatcttgcctccctactgtggtagtatcaggaagtgaggcctttgggaggtaattaggattggaagagttcatgagcgtggggtcctcacgattgggattagtgcctctagagtcatgagagagcttgcttcccctctctgctctccaccatgtgaggatacaataagagtcacagtctatacacagaagagggctctcaccaggactcaaccatgtaggcaccgtcatctcagacttccagcctccagaactgtggaaaatgagtttctgttgtttctaagtcacccagtttatggtattttattatagcaacccaaattgactaagaaagttagactagtctggaaatgggaccgccttcacctttcccaagtgaaaagtcaaatttcaaccccacccctattattcactccatccagccttcactgagtacttacattgtgctggggactagggacacaagaactgataagacaggaccctgctcattgtcctctgctcattcccctccaaaaaagtctaggatctgaatgcatgccagtctccacctcatccagtgtataaatctattccaaccctgtggttatgtcactgtgctgagagtgcattgtgctatgtcttgaagacgtctgtcttgtacgttttaaaacatgtcaaggttattataaaataaatgcatcaaagcaatacttttgccagctttcaacttatgaatatggattggctttaataactagattaggacactacttcagaagccatttatctaatgtatttttccaaatgttatttcatcaaaaaatttcctggaaatgaacaagatatattgaggccaagatgccacctaaaaaatattcccttttggtggggcatggtcactcacgcctgtaatcccaacagtttgggaggctgaggtgggtggatggctttagcccagagtttgagaccagcctgggcaacatggtgaggtaagactccatctctacaaaaataaataaataaatacaaaaattagccaggcatggtggtgcttgcctgtagtcccagatactcaggaggctaaggtgaaaggatcatttgacctgggaagtggaggtttacagtgagctgagatcatgccactgcactccagtcagggctatagagcaagattctgtcaaaaacaaagaaggaaggaaggaaggaagaaaggaaggaaagtattctatttcaggaaaatagcaaactaaatttcactaatttttgttatttttgctctttattttctagtattttttggaatgtaactggataagttaaatgaaatgagtaatgtaatttgatggaagtatgtagttattttcagatgaataaaggaattaggacttgggtcttggtttcmaaaaagagaaaattaaagggtaaaactacataaatcattagctccggaagtaaaggaatttatttttcaaagttgaaagagaggattaaagaagaggaaattaaattgaaggataaagaaagaaaatttaaacctatagaactcctaccaagtgctggcctgaagctaaattccaagttctatgctgtatttcattaaccctcacaacaacctaatgaggtagggataataattcgcatttacaaggagtaaacaaccagtcagtggccaagccagggttcaaaggtagatttcctgaaggaaaccatttggaatcagcgatctagagactaagaagggggaagaagccttttgcactggaatgagtaaggaatgggaaaggagataaagagactagcacaggcagtgctgaacatgaccagttgagagcaaggaaaggagagatttcaaagcagttaagaggaagtcctgctagaagtagacagagcaaaatccaatactgggtcctggatggcgaggaaggtatccttctaaccaaatgaatgaaaacgtagcaaatgcagacaagttcaaggaaggaggggaagactgggaggaagacatttagagactctgaaatagtctctaattgctttgcaaagtaagggatgagatcaccatgtgagtgagggaggatgttaatgggacttcaagaataaagaaaaagatttgacaaaactgagaggcctaactacagacagcttggttaaggattgcatgtacacataggaatgagtttcagtgtgcaagtctgacaggrtaggttcacctgagttacgaatggggaatgtgtcagtggggaggcagaactggtgatgtggagagaggagaaaagggtcaagaacgtgtgttcatgcgcgcacgtgtgtgtgtgcgtgtgcatgtgcgtgtgcctgtgcatgtagaagaagatcataagtgagtgtgggtgggtgaaaaaagtgtttaagtggatcagtctaaggagggaccaggaaggggaatggggaataggagcaggaaaggcagaaaagtaagcttgagaactcccaaaccgttttgtttgtaatttgttagtacagtatrataatactaaataatagatttgtaattctaagttgtaagacaaagaaaatatgctcgttaaaaaaaaatcttaaatttgatagcaagttagggattgatttctgaaaaacagcccccaaagcacaaacagtaagagaaaagatggatgcatttgattacttttactaatttatttttaattttattaattaataaattaatgtattggttttttaatttaaccaatttgattaattgattaattttaagttaaaatgcaatgtttctgagataaaaagcaaacacacaagccacagtaggaggaaataattataacacatacaaacaagagtagcataaagcacacctaaaaaaaaaattaaagaaaagacaaacgatccattgcaaaaaaatatgcaataacctgaagaggcatttcacagaagaagaaacatgaatagctaataaacatctgaaaagattatcaacctcattagtaatcagagcaatgcaaattcaaagcaaaattaaatatcactttacactcaccagattggcaaaaattttagtctgaaaatataagtactactgaagacgaagagcagcaggagctcttatatgctgtcgataggagtataaattggtcccaatcccttggaaaacaatttggaattaccttgtagttgaacatttgcttacctttctacctaacaattctactcctagatatttccctagagaagcactagtacaggtgtgtgaatgtttacagaggtaatgtttgcaaaaggaaaaggaaaactggaatcatctcaaatatccattgacagaagggtggctaaataaattgttatgaatgcataaatggattttactatggtagtaaaaaaatgaatgaactgcagccataagcattaacagagatggatctcacaaacaaaatattgaatgaaaaagacaaatcacaggaatacatacaaaatgatgccgtttatgtaaaggtgaaaaactcacaaaaccaaatattttgttcatggacacrtacatgcacagtaaaatgacgttgaaaaatattgaataatccaaaaactaaaataacagttactcctgccagggagaaagaggattggaatgtgtctgaatggacaatgctctgtctgttttatttactcatttttaaatttttttagagatgaagtctcamtctgtcacccaggctagagtgcagtggcacaatcacagctcactacagcctggaactcctgagctcaggcagtccttccacctcagtcccctgattagctgggactacaggcacagctaatgctctatttcttaagcttggtsgtttattattctatgggcctatgaacacattacctatagtccttcatatatatgaaatatttcataataaatgcaaatcaaggcaaaaattaaaaggggaatgaaaagccaagtatatagaagaaaatttggtgttggtctaaaacataacacatttagtttaaatatataaatcttgtgaccttcactctgaactacatacagaattggctgggccttgcaaagtcgcagtcctttgaaagaatggttgaatatttgaaaaatgggaaaaaaaataaagttagtgtttcatttttaataggtaagaagtactttattataatgaatctgtcagtttaacctctgtacataaagaacacaagattaccaaaacaatgcagttatctctagaatatgttctgtgaaacaccagacgttaaaggttctgtaatcaaatgtgttcaggaatgcaagatactataccccctcttagaaattcgtaagtaagcacctaatatggctgctagattattttttccatcttgaaaattcaaatattaatgaaaacttaagtattctctatgagagatgtagagaatctataaatgaaatctcttgcaaggtctaagaaaatcctgcctcaaatgacatctctgacaatgttcatctcattctttggctcttttccctctgctcacacctcaaatgttagtgttccttaggctcattcctgttcctcttctcttctcaatctctttgcctcctctgcaatctataatctgatcatttcaagatctctctattcagacctcacttttccagactcatactctaaattcatattggaatttctcaagctatgatcccacagacatttcagatttaacacatccaaaccagactctgttacttcacatcctaaaataacttggtctctggattctccattttcatcatggtgtcaccatcccgtcttgttttcaaattagaaatcactttaattggactcttgcatcttcttgcatttattttgccatttttcaggagtgttccttggcttgaggattagagatctttattttctctaatcctttgtcacatcttagtttccagctttattttgtcttaattgggtcattctgtcaccaatatttcccatatgcagttcataattcacatagtattaacataagcatctaatcatgttatttcttgttaacatgaaataacatgttctgttatttttcctgtatggagagcctccagagactctatacaggtgatagacagcctgttaaggtgatagacagtacaacgtgttaggttatacatggagggmcaacagatttttggtagtttagaaaaggaagtgaccatcagatgttgatagaagatgatatttctgagtattaacgtatgagtaggagtttgcttgttggatgaagagggacagagacagctacggagtcttgacaatttctctttgtctctgcttctgaactagtggtgaattgactacagaaagtcttgattatcataagggccagtactgtcataaccctaaactttgtgtacaatagaaaaagatgattctgcaaaagaaactatcatcagagcaaacagacaacctacaaaatgggagaaattttttgcaatctttctatctgacaaaggtctaatatccagagtctacaaggaacttaaacaaatttacaagaaaaaaaaacaaacaaccccattaaaaagtgagcaaagggctgggcacagtggctcactcctgtaatctcagcactttcagaggccaaggcgggtggatcacctgaagtcaggagttcaagaccagcctggccaacatggcgaaaccccgttactactaaaaatacaaaagttagctgggtgtggtgatggacgcctgtaattccagctacttaggaggctgaggcaggagaatcacttgaacccaagtggcagaggttgcagtgagccgagattgtgccactgcactccatcctgggtaatagagggagactccataaaaaaaaaaaaaaaaaaaaaaaaaaggatgggcaaaggacatgaacagacatttctcaaaaraaracttttatgtggccaaaaaccatgtaaaaaacagttcaacatcactgatcattaagagaaatgcaaattaaaaccacaatgagataccactatctcatgccagtcagagtggcaattattaaaacatcaagaaacaacagatgctagtgaggctgtggagaaataggaacgcttttacactcttgttgggaatgtaacttagttcaaccattgtggaagacagtggggtgattcctcaaagacctagaaccagaaaagccatttgacccagcaatcccattactgggtatatacccaaataaatataaattattctttataaagatagaggcatgcatatgttcattgcagcaccattcacaatagcaaagacatgaagtcaactcaaatgcccatcaatgacagactggataaagaatatatggtacatatacaacatggaatagtatgaagccataacaaggaatgagatcatgtcccttgcagggacatgaatggagctggaagccattatcctcagcaaactaatgcaggaacagaaaagcaaataccacatgttctcacttataagtgggagctgaacaatgaggacatggacacagggagggaaacaacccatactgggtcctgtcagagggtggagggggaggagggagagcatcagcagaaatagctaacacatgctgggcttaatacctaggtgatgggttagtaggtatagtaaacccccatggcacacatttacctatgtaacaaacctgcatgtcctgcacatgtaccccagagcttaaaataaaatraaaagagtgaaaaaaaaaagaaaaaaagaaaaggaggtccttcyaggtgaggtattactaaaaggcaactgaaagaaaaaaatgtttctctatacttaacaacaattctggacaccaaatgtgtgggtttttttttttttttttcatgccgaccgattctccaacaccagctgggtctcctacaacccaccacagttctgacactagctacccagagttagcatagaccacacaggtaaaggcctcagtcccataaractgccctacacttcaaatgccagttgcagacctgggcctctcataatttctgaccaaccaacaataaatcaggggtgcttactacttcctccttgggttggataatttgctagaatggctcacagcacttaggaaagcagtttattcaccattgctggtttactataaaggatacaactcaggaacagccaaatggaagagatccaagggcaaaggatgtgagaacgggagctgtatgccctctccgggtccaccacccttccaaaactttcacatgttcaccaacccagaagttcttggaacaccattgtttagaggttttatggtggttccattatgtaggtagaatttattaaattaatggccattgatggttgagctcaatcttgagcttctctcctatccccttacactggggatgaggctgaaagttccaatactgtaatcatataattggttcccctggcaactagccctatcctgaagctgtctagggagcccatccactaggcattcatattactctggagattccaagggtcttcgaagtgcttgtatcagaaactagggactaaggccaaatattgtaacaaaagatgttcctatcgtccctatcactcaggaaattacaagaattttaggacctctctgccggggatttgggacaaagatcaaatgtttatttcttagtacatcacaatatcatagtatttcttcctctgggttgatggagacagaaccaaagtgcaagtcttatacaaacaggatttcaggccacacacacttccagtctctacccaccccgtagcccagtacctgtgtgtaggggacacgctacacagccataatctgcagctctgattctgactcagcagtcctgtacattatatggccccatgattgccccaaccaaatgtagcatttgcagctcttatcttttgcagctatactatctttggcagccagcctgctgctaggtgacagtttcttttaaactactgagatgagccaatcagtccacacaaacggaagttttcataggcctgtgacagactccaactaaaatgtggttttctacccaaagctttagtgtcctgcytcatatgaagtacaatttcattacaaaatagcaagtgcttcccaagccaatgaggtatctctaagtacatggacctgaggcatgaacatgctgatgtgaatgtaaacaacagtcacacataaaataaattagtcagtgtgcaatgaatttagaaaatacttcaaataaatagaggagactaaatggtatttattcatttaatcaacaaatatttattgagcctctattatatgacaagtattaccctagatactgggaaaacagagattaaccaaataaacaacactcatgaaatttgcagtctaacgggaggagaaagacaacaaatttaaaaatctctactatgttgagtggtgataaatgttgtggataaaagtaaagttggatgagaagactagggaatgccctggtgaggcatgagggcatttgatacttgatataggatcgtcaagagagaaccctctcagaaggagctgttgtcaggggaagatcaaaagccctgagctggaaatgtgtgtgtgtgtgtgtgtgtgtgtgtgtgtgtgtgtgtgtgtgtacctggcccacttctttttccttcagtgtttgtctttttataacctgtttaaaagagcaatttttatattaaaaaattaaccctttgaattccgtttatgttaccaacgttttcccctcacttcgtcagtgtatttctcttttgtgatatttttgcaccagtggaatttttatcagaattgcactcaaatatattaattatttgggaagaatttacatgtctgcagccttcagtcctcccatttagtaaaactggtrgtccagtcttaaaagtaccacaaatttttattaagatgattctttggtttttaaaactatttttgctgttattatgaatgtaggattattttggtccattgtactttctaactgttgtttctggttataagagaaaattattagtttttggagcacagtggctcacacctgtaatcccagcacttgagaaaactatttgtttttaaatgtgtatgtttttgtcttcagccattttctcaaactcccttattcgaatagtttttagtttctttccactatttataaacaattatttcatctaggtataatatttctgtttcttctcatcattaacattttatgtcttaattctactcactaaaatttccaggaccttaatgaaaaaaagataacagtatactcacttttcttgttcttgattttaataacatatatcgctagtatttttacaattacttgtgatgccagcctttagtttaacagaggtgttttttattaggtgttaaagaaatatccctttagtcatagatttaaacattcttatttggagtggatattgcattttgtcaaattctttttggtatctgtcaaagaaatgataagttgtttcttctttaaatggctaataccataaattaatttaatatagggtctattaaratgttttttagagaacactttttccacaggctggtccatgaaaaaaattgggggtggggagattattgtctgatcaaatcatttggaggaaatgctacatagtatattttcttcttaaagattaattagctcattagcatattaaagatactgagaagtccagtagtgaagaattccattaactttgttaaacccttcatttccaaatattacctgtccccyctccttcatatagcattaattagcaccccccttgacttgggttcaatctaacacacttgagaagtgttatattaatagctttccttgtattaaatcatccttgcactcctggaatagaaaygccttggccatagagtgtggctttttaatctagtgctaagagtgctaagttggttaggttttaactgaggatttttgagtctgtaattataagtgggatgtactgtcatttttttgtctctgccttcttttggctgtttctcttattttagtatcagtgtgattctggattggtgatatgtattgggaaatgatccatatttttctgggctctggaacaatttatgctgcatggggaattatcataggattttattttcttaatttgaaatattttctacaaaatagccaaaagagaaatgaacccaaacacagtgctaactggttgtcagtgagcttgtaattaaatcccctgttagctttattttctttactgatgaggcttcaaatgtcttcatttttcctctttgtggrtaaacatgattgctctttgccccaaacggttgacggttcagacagcctaccctgcttagaagcaatcattccttgctcttgtcactccagttcactgcagaacagggaagcatcaaagttaggtcagggaagcaggaaatgatagaatcccaggcaggagaaccaaacttctccatgagtatgttgtccctgaggctgggaacaaagtggggtgacaagtatgaaggcctggagggagggaggcaacagaggcaggtgaattgtgaggtctagaatcccaagaagaggtgaaagagtatcgatcctgttttaaaaacactttctttgaggccgtgttgagagaatgttggacatttacagtctgtaagtggcgacagggagtgctaggtccacttctgaggccagttcctccccaagtcacagaactctttattcagagagatgcaatattattatagtcaaaatacttcacacaattaagggtttaggcatgaaaacacataaaaatggatatataccttctttcctggtatggggattactccacattaaaaagcgaaataccttagccatgcattccagcctcatagcaggcgcccagctacgtgctaggtatttgtgactaagtacctggtgtttgttcaataaagatgtgtgttgtctttccttgtttttatgcaatagatgtgtttctaaaaggtggggcatacattaaaattagagaattaatctttttttccaggtgaggtatatatatatatatwcacacacacatatatccttaggcactaaatgtgtctgctttttaatccatctttagttagtgtttctgagcatgggaactttttaacctctccttatcctggtactcttaaggtataataatggtctcagatacttcaatatattaaattttaaaaattattatattaatattcaaaataatttttttctaaataagttgataagttgccagtgttctctatttgtttcttcatatgctgggtagcttgcacctccatctaaaatacaaattgcacataatacaattctttaaccaaatatcggttgtgtttcttttgagacaaaaaaagaaactgctaagattacatgtctctgagttattctctgtaatgtgatgaatgccaaaaacaagaaacatgtatagtagaggaaaatagtggtgatcaacagcaaagtggttccctccactcttctccatacccctctcctcccttcagagaagcacattcatckaagtgaattgttgggaaaaacttatagtccattcctccatccaaggatccctctacgttgcaggcatatgtttaacatgcttattaaatgctattttttctctagtaatgtacagcaaaaaataataataatcaaaggaaaattttggtggtctgttgcaatatgaaatcaggatttgaatgcctgtaatattataaccaacactgagttctttgaagttccttgattctcacaaagctaaaaatcattccttacccttgattagagaaaaatctgattttcctgttgcattgccttcttgaaagagatgatatgagaaagtgccacgatgaattgttgaggttaaatcagacgatattgattttgtgtctaacccagctgtactttctcagttccaacacctcacagggaaatacatacaggccattccacagtaaagacacctgcgacttgataaaattattgggtaaggacatgggaaaacatatttttctccatagccatgcttgcatgtttttctttttttatttttattttacccctttccctgcctcccctttttgtgattgtatagaatatgccaacattttgaagggacatcttgggaggtgaggccggttccctgggaccagattctctgttatcgtgagccaggtcaccatttcattcccctctgttaacagtgactgtagagtccacagatgttccacagtgggtggaggtaataatctgaggcctgtacccaagccaccttgtggcccaggttttaaagttgtgtgggaagcaaagaaacagatgcaaaagacaacatgcagaaagagtgaacacaactcagtgactaatggggcatgcaggatcaggaagagctaaaagtcaaatgacattcatatcctggagaatgaggtgcccccatcaagttaatccattaattaatcaaacattcaggacctggagccattcactctctaacatattctttggctgtattaatatggccattaattcctgaacaacaagcagaaggaaacagtacttaaaaccatggttgagagcacttagtttttcttctctgacgatgtgcaaatcggcagttgcacttttaaaaaaagcctttcatataaatctgggcaccatcctgaatgcatcagtcctattaacagcatgctagttttggagaattgctacaaacccagcctgaggtgaatggcagctgctcttctctggtcagggctacttaaagaagtggcaagtccaaagccatttagaaactgaaaagtggccttctgataaataaaacgacacttctgaagctgaacatcaaggaaagaactttgtgctgacggagaactacagaagctttcctatgggaggctggcatgcagatgtcaccgtggggctttgttgattatgaaactggaagccatagcagtaagtgggtgcatgggggcaaccaaaagcaggaggatggccttgcctgtgtctgtaagaygacttgagacagtagctgccaacagagtcccttaggtgtgtgctttataactgcaggatggtacaaatgacactcttaattttctgagagtttgctttgcagtgaagatttaagacactgagattaatttagttaaattgatatttcccctcgtgatttcagggattaaacagtraataagcctcttgatgttgatctatctcctggggggtccaataaattacagaaacacttcttgccattttttggagcttcctcttcatttattctccttyctgtggcatactgtgtatggccaggcctttgctacaatttgttatttataaaaagtacagagcacatttcaatcctaccagataaagtcagaattctaactgagctatgggtcaactaactagaaaaaggagtttaagacccaactctggatgtaaatgatgacatggctgtctgtgagggatatggtttggatttgtatccctgcccaaatctcatgtcaaattgtaatccccagtgttggaggaggggcctggtgggaggtgaccggatcatggggacagacatcccccttgctgttctccggacagtgagtgagttctcacaagacctggttgtttaaaagtgtgtagcccctcttccttttctctcttcttcctgctctggccacgtaagacgtgcctccttcctctttgacttccgtcatgattgtgggtttcctgaggcctctccagcaatgcttcctgggtagcccatggaaccatgagccaactaaacctcttttctttgtggattggccagtctcaagtagttctttgtagcaatgtgagaatggactaatacagtaaggcttatggaacttcaagtggtgatttgggttggattcctgacatctccttggtatatccttagacacatcatggagtctctctgttacatcatcgttgagaaaacatcagcaaaatgcttaaaatgttttgggaaaaaatatgttggcagagtcttacttaggaacaggctgcattccaaaattattcaactaatttggacaaattgagtgtctactatgtgccagacatagttgacttcgatagatggggcacctttgccaaaaagtagccctttactggcaagtttccagttagtttgcaagtcagctgtgtataaattgggatacattttcctaaagagacaaattttgaaacagtggttagattctcaggccaattctcagaagctaagttaattcataatgaagtggaactcaacttctaatggaattctcaaacctaactaccatttacacagtgatttttaaccytttgctgcataccacattataacgacctaggaattctttaaaaatttaataaataccaaccaggtgcggtggctcacgcctgtaatcccagcactttgggaggccgaggcgggcagatcacgaggtcaggagatggagaccatcctggctaacacagtgaaaccccgcctctactaacaatacaaaaaattagccgggcgtggtggcgggcgcctgtagtcccagctactcggcaggctgaggcaggagaatggtgtgaacttgggagacggagcttgcagtgagcagagatggcgccactgcgctccagcctgggtgacagagcgagactccatctcaaaaaaaaaaaaaaaaaaaaaaaattaataaataccaatacgcaaactatgcccacaggacaataaaatcagaatctattaccggtagcaatggtggaaaatggaccttaggaaagaatagagaggaatgggaagcaatgcctctagggagatcagggctgtgactggggggtaggggctagggttccagggggtgcagggtgtcgtctggggtattgtggcattggtggctagaataacaagagaagatgcttctggaaatagtagtaagactgtgggcttgtaccctataggagatttttgtcttttgacagtaaatcatttttcaggagtacgaagatgatgcagggggctagaatattcagctccagaagcacaaggattggtgcttcaatgataaggagggagctgataagaacctaagtggtcaacatcactcatcagtttccttttgtccagttcatgaggaatgaaagaagctaccttcaatccaccttcttattttggggtgaagctttcacaaaatgccatgcctcatgtttctcctctgaatatgtagttctttttatcatcttggcctgattacaggcccttaagactcagcagagctaaggggaagggaagggaattgagggaaccaccaagagagctccaaaaacaagagttggcaggtaattctgttcatcyacgcctgctctgtaacagctttcagagttcagctcttactttcagtcacttccttgcaacccttgcagtcagaatttcagggttcagaaacataggcctaaagtgttatcaccaagtggtgaaagcaagtttgctgggtggaggatctcctcggctattttgccaagttcttctcatttttatagctgggcatgaagatttccttttttgacattctgtgactgttacaatgtaggaaaatctgtggagatacaacattttcatatttcaagtagctgctctcaaataagggacattttctaagttctactgtttatttttccctggaattttctaggatatattgctttagctctgttttctagttttctctttatgacattttggcttctcccggtcaacaaaaatactgcactggaagaattccagagacatgtgaaagttatctgtcctgcttgagggaaagaaattactactgttttcttccctctgagagagatggcccttaaaagtgttggaatgtatctcttttcttgacattttctgatgttcctgattctgttttcctggtgagggcaaaataaattattgtgaaaaaaaggaggtgaggccctggttctacaggtttctagaggttctggtatggggagggtgtgcacagaagaacttcttccaggtactgatttactgtaagcaacaaacaaacagatcttttttctcatagattgccagccgaactgtgtagcaacactatggaaaagaccccaaccacttccacaaaagaaattcttcccttcactaagygaggagtttaactcagttagaaaatctggatggacctcaaaggaagaattttctcctttcaaactcaacccatttcaataatagagagaaaaacagatttttttagaactgaaattccttagcaaaatttaattggaatagcattctaccttaatgggcaatcagcttatttagtaggtgagactccattaattttgactgttcaaggagatttcataaccaagtcacttaacttcaagtattctgatggagcagatagctccccatttaggaattttcttgtgctggagtaggaaaatgagagcagcgcctgccttgatatgttgatgatacccttttatttggcaaaggtattattcataaggtagtcaattaatgtcagcctattggaaaaatgacaggctttaaagcttcctctttagattagagactctaaaattctaaatgcctgcagatccatatgtcagttgttgcttctgacctttcctaattgaattagcctccttctagtgagcctgatttaaaaaaaaaattaatagatggggttgctgggggtatcacttagattttcctattgaaaataaatattcccctccaagtagtttatttccggaagtattaagccaaagtcagaaaagtggcaatagcttcaaatagacaggaagtggctgtaaaattagcctttcttaacgagaaggtcagagctgctttatatttttttaaatttcacttttatgtgtggctcattgcttaggctctggctgaggctcatttaacaatgatcccagcagtactggagccctaagcaacaagacttggagacctatcctccttccctggggtgaaatcacctcaaatcattcttaaatacttgttaaaattttcagttgcttaaaagttattttaaatgtaaattttcattttgaaagcaaacagggactcagaaatgatttttgtcagaataagtttgggtctgattctctcctataaccatttctaaaggaaaagcttggtttaattcaatctccagttaagtcaaaaacctaaagaaaagtgagtcatttcatttctcctctaaaaactaaagtgtcaggaaaagttcttttatctgtttcaatatattccaacctgttacaatctttttttttttaagtcataggaaagtatacgaagaaggaatggctgataggtgaactaaaagagaaagccaaaatctttaattacctttatcaggttagcagggaaacaggcacctatgccttaggtagaaaaaggtgattagcattcagaatactgaagcccacatcaattcagaaagggcatgattttaagataagttgaagggtaagttaggaagaagcaactttttaaagcttaagtataaaactaggatgagatcaaagatggattgttaataagagtcaaggrttagttggaagtaaagtccctaatcatacccagagtatttaatagactcaattgtgttaaagaagatcttagaggtcatccaatccaacttcgatctttgattgcaaggaacagatgtctcctccagctgacactagccaaagatgggaatttatttaaaagttatataaactaakcactgaaagaaagccaggcctaaagaatgaaggagattccagaatttgatctttatttcaggacctatctctttatttctttgaaaattaatgcatatatcctcagcagcagcataaagctattgtttgtacatgactatggctgaagttctaaaatgtgttttgaatcgtgaaattacaagcacagatctacaaaatggtgatagtgtctctatactaaaaatacaactgcacattttcaatttctctaaaatgaactatgttactatgtaattgcaattacagaactgctgttaatgatgaaagaccctacgcctacctagaccaatcctcttattctaccattagagaaamtgtagcctgggaagaagtgatatgttcataatttcccagaggtttaatagtagagccagtagaagaatggagatcctttgatggctgctgtatcagacatgatgctttgtgccacactgggagcagtggccaagaaagaacttagttaagaacctgagttctctagtgtcagactgtcctcgggcaagtactttatacctttctgagccttcatctgtgtaatatggatattagtactccccacaggatggggttgttgtgaggattaaatgagacaacaaatgcacagttattaacacaatgtctagtacatataaatgctctaaaaacaatacaattatcaatcgaaaaatattagctttttgctgcatarcaaacaatcctgaaactgaatgatttgcaaaaatatttttatttcctacttataaatctgtgatcagctataactctgctaagcttagctggccgtggctccagttttgggctcatgttgatcccataagtttcctcatcccagatccaggctgaaggaacaacccctaccttggatgcgttgttctcacgataaagaggaatataagaaatgggaaccatgtgatgcttcttaaaacctctactggacaccatcacaatgttgactcttcgcatattatacctatcacagcaagtcatttggccaagcccaaattcaatgaggcagaaaagttaattgcatccacaggcaagctatgttctaggatggaatgaacaatataatctagcacagaaaggttgcgagaaaatctgtggtcactgacacaagaagcttgaataatctgaaactataaactgcataggccatctgtagtagctcaagtcttcaaaattatggactgttaagaaaaaaatcagagatctarggaaggcaacaaagttattttgggtacagacaggataagagggtatataataccattccttctcccagaagcttcaataggtagaggatatactgatttagaggtcatttatttcagtgtttccaaacctgaaaggtatttcaaagggttcatattcttaaagcagcagtggtatgtgtttgcatttccactaattttttaaaagctcaatacatttaacgtttatgtaaaaactgtttccattataaatggaacacatcgagaacccccaggtgtatatggaggaagcctacttggtggtaartggagattagatgactttgctcgtgatttgtaacttagtttataacacagatgagcactactaggtgcatcctttatcatcatacatttttaattgttttattcttagtcatatgttgtttacatttcattctcaactctgaattaatgaggaatttaatgaaggagaaaaacataattctgtcaattttcttctggatacttttccccagatccataaatttctttcatctgagaaaataactatatgaaacatcaagatatctctaatatttcaaaacataatgtaaaaaagaaaaataaattggtgctatttatgcatcctgtctgtaaccaacaatctattgcagaaataaacactgatgatgctttgaggtctgtaccaggttaggggatagatcagaatgactgtgttcctattatttttacacctcagtacaacatcacaggccattccttctgcctgaaaagccctccttcttctccctcctctgcctaatgttccactcagccttaatccacagctcagctcttacctcctgttggagaagaaattatcctcttcaattccctcagctatatttgttgctctttccccagtattcccatagcacatgcaggggaattacctcctgaatagccttggttttgaaaatagtcactgagtctgtctttctgagttaaccctgagttgagattggggcaatttggttttccagtgcccagcaacatgcctcgcacctagaaagtactcaacacatctttcttgagtggatgagagtaaacggaattgcagcttgatatataagattgaaaactggagaggacattgaagagagcatttcaggaagaagaaaagcacacagaagtaaggagtaagaagacagaggctgagatgcgcaagtttaaggagcaataaatgagcccatgtgactagaccaaagagtttaagaaaagaagtcctggaaaaagcagtggggagtttaggtgtgttgaggagggtctcaggggacacacattgtcttggtctgccctggccatcrtatgtcaaaatatcacatagcttaaacagcagaagtttattttctcacagtttcgggagcttgaagtctaagatcagggtaccagcattacaggtttctggtgaaggctctcttcctgtcttgtagatggctgccctctggctgtgttttcacatggtgggaagagggagcactctggtgtctcttgcttttcttataaggaaactaatcttatccccgtaatctcatcatatgacaactcaccctgctaatctcatgtaaagctaattatctcccaaaggccccatcaccaaatacaaaataccaccagactggggactacggcctcaacatatgaatttgggggaacaaaattcagcccatagcatccacccatattgagtggttaaggaaccggccactgataaatgaagtggaccctaaagattgctatcatccttctgccattattggggttccattgttcagttaagaaagtgaatgaaatctrgaaaatcagcatttccaattaaaaaggcgttaaagcctaaggacatgaagaaaataaccttttaatttctgagatgaatgaacaaagaaatttttctaagtggtatcttctatttctatagcagccataaatcataccattgggagctgtaccattttacttttaaatgtacgtttttgaaaagaacacagtcgtttcttattattctccttttgtacaatttcattgcattcataaccagtcaaagggtcctgwtgattctccggcagaaaaactatttgttatattcacagtccaagtgcctactgattagcacaggtattttgcattagctgattgggatagaagtacagtcttcctctaagctttactgctttctccattttccattttttgttatttttcaggcctggattcctttyacttggttcattctcttaagaattaccagccacagaatgatgtttttatttatttgaaaagtttatgtccatttgcaaatgattcaagacaagactgagaattccactgcctgatttgcagaaagttgttgctgcctgaaaatgtgctgggcatgtcctgttgatagatagtacaaataaacagtgttaatacaatgggcaaacttcagagcatttccatagctcccgactattgaatgatatacaaaaatatatgacttggggacagctgaaattgtttccacactttgagctctgcttccattagactggttcacaatattagattgaatcccaaggtgctactgataatcatcagctgcttttcttgccaagaatctttgtttaaatgtattctttcattatccatgtgcttttgaaaaaaatgagggaaagaatgcttttaattgaataatctgtattctgtcaggtatttcttctccgtaggaaggtatctgaaaacttactttactttgctgtttttatttatcctgccagtgtagtatattgatgagagaactgaggtccaatagtgttaaaacaagacatgaaatattgattaattcttcttttaaattctctttttacccctgagtataacagatttcagaagctgctgccaataccatgctctccaataaacctccattattggaaggggggtcttgatacccttcaggctttgataaatgattattatgcttttgaaatgttagctttgagtgcctgaggcttgactttcatcagttcaagaaagaaacagtagaactgaagctgcaaagtttgagccaaaggcccccaaaggaaccatttcatgaaaggagttaaccatagatactgtggcttctgaactcgttgtccttgtcccacctgatactttttctgcattcctaattgtacattcccccmttgcaggctaagacttgccctttgggtctaggcctactgagtttgctgatttctaaggttaaaaagtaagataatgggtttagatggacttgtaaagaagggagaaggaagtacgatgcttggttggatgaagaaaatcaggggactgtgaatgagcagagtaggaactggagattataggaatctggctgtttagggtcaaggacgccctcagagcaatcaccctaaggcaagaataggccctggggagtcaagaaatccactgccctcttaggacccagatgagcttggaacagaggggaatctgataaaatgtataagagaactgcacaggacagccactgcacaacaaagagttatcctgtccaaaatgttaatagtgctgagattgataaactctaatctagagaaagtgctacaattttttgccatcaaagtatgaatttcttgagttcagaacccaactcattgagctattggtattcaataattagcagagcatcctgtgaatagataataaatccaacataatccagttctcttttgaaaagtagccatttccatttcctcagttcctcccctgaaattatctgaaagggaaatgtcactcagttagaaggctccagcttgccagataatgggaggaaagtgcttcacgatatctttccagaaatgagaagaggacagagtgtgctcagaaacagaggtacaggcaaatgaaggttgctgacagccaaaaacactgagactggtaaacatcatgatagctgaacagacgaggaatccctgtatccatgtgatggcctttcgacatgaaggaataggggtaaacatcaagggtaaagtagcttatattttattgaaataaactagatgaaaggtcgtatcttaaaygatatgtcttcaagcatgtgctacatcaaggtcttgacggcatcattttcccaagagatatgccagtaaatttaagtagtttccaagttgtaagtatcttgattaccaaggagcagcaggrtgcagagcctgaccggtaaaatcaaaggattgatggcttcctcttcacaygcctgcctttattttcccctgcatggcccattattctgctgcattaatttaagctttcctattgcacagaattaggggcttaaattctcttatcatccctgtgggaatcttgattgtttatttgtggatgagaataattgtttttattgatccccaaatgtggaaggtaaaaaaaaatgctatggttgatggccagctgatacatagttagtgctgcgtgcatgagtgacaaattatgagacagtatttggccccagaggatatcctttaagaatttttaaggcatttgatagttatcactttaaggcatttgatagttatcactaagtctttccaagctggaaatcataaacaatttcacatacatcaggtaaagtctttttgttgtagttttcattgaaacttaaaggtctagttgtgtgtaatttataatttctcatttccagtatgctcacacagcaactcggtagagtttggaaatggtacggctacaagacattctggagccagtgctatcaggccagtgagttcctctagggacccagattactaggcatttatttggaagaattcctggattcatccagaagttgtcattattccactgcaagcatcattgtatggacattagctccaaatagttagagaaaagaactactttgctagccctagcttgtactgtgggtaggaaaccccctgccatttaacatcccaaatatatcagaggcatcagggaaaggaactgcaactgtcaattaagtgctgtttgtaggacagggcacttgggcagtatgagcctcccccatctgaatcaaatgcaacacatcttgtttaaagagctattgagctaattagcatggcatgtctacacagaaataaaacaaatcaggttaggtcctaaaggaatcaagtatcagaaatgtggtaaagtttccttattaggtggtaagatggcaagatccttgaccagatgccaaaccctgaaattcttgatcttcttttcctgtgctaaagagaacatagatatatagagaagccactaatgaccattgtatcttctttattctttgagggctgtgttctggaagcttactgttgaaccttcagaaacgactgtgtgggctagaccagaatgagtcaggagagcttgcttgtttcacagaataagtgtccatatgtcacaaagaggatcttcctctttttcctggggatatcatattatctttgtctttgataattagcacctctgtgaagggaccacatcaaagggaggatgatttttcctaattatgatttttttttctcactcaaattcacctttacccttagcactatggttcagttatggccttggccttcgtcagccattgcaacaccttccatgagtggcagtgtaaaggagggaatcatggagttctccccacaaaagttttgtgactattgtcactaccattgcaaggtaaaaactttatacccagcttatatttttatatataccccatacatttagtgtcatgcccatcacacaagggagcatgaaatgtgatctgacstattcacatgtttgctcattacaacatccaatatgcatagagcatggtaccgcacagtggttaaaacttaattacagactgttgagggtgatgatcacagaatcatagttcaaccatctcattttagacacaaggaaaataagacccagagaggctaaataagtggccaaagcctcatgttcgagtagcagcagagctgcaatatgaaaccagatatcctcactccaattctaactgcactctgtgttgactctgaaacacatggctgtgctttgttgcactgtattgtgatcaattgttttaacatgtgtgcctccctcactagaccatgyactcttaagaaaatattcatcaccagcttcctagcacagtcagtggcacataataggatcccartaaatgttggttgaaaaagtgaataaatgagtaaatacatgagacctgattttttcctcatcatatagaaacaaacaaatgccgtaacttttagtgatctctatgagtgcttggtcagcctgataatgaagaatagacaagatagggagtgaaaggtagaaaaaaatagtatgagaaagaagagaaaaaaaaagaatatacaattccataggaataataaccagacaaattcagtacatagacaaaatatttagattcaatttgggagcattttgtcaagactcttgcctcttctgatctcttctcattttcaaataagggctttttaagcagatggtgctttaagcaattcccatcattgctgctcctcctcaaaccccagaatgcaggaytgactgcaggttaagttgtctaaaaggcaaagttgttcgttactgtagctcacttccctgagatacgtcttcccattcattttgcatctattgctgccccatgttgctgctactgtcacagaggaaagtgcatgtaactcactgtgatctagtttctgggatattttccatacaccagaagatgcgaaggaatggctacttaggtagtaacatttcagactcagtgacaagtatgcagagaggatgtatatgggctgagtctgtgtatccttgtaaatcacccaaagtcaatgcaagtaaaggctaaaaaatccaattatcaacccccactgtgagtttgtgtttttcctgaaatgctggcacattgtaagtaatttgacactaagtagtgcctgttaaaaagaagcagcagcagcagcagcaaaggattcaaggctcctaattatagcacactgatggcttggtactgggatgtgcatcaacaatattgagcatcagtagggagcaagtactggctggagggctgtatccagagagcggttatcagtatctaagtgtcagtttgaactggctgtgctcctgtaggccaagaagtctatatggaagatagaccatttaatctttttcagaggtgttgctacacagctatcaaacaaattggggtgctccaaatgcccccgtggagagttttaaggagatggacagtcatctcttttgaatggattgagtcacactggctaaagacaaatatggagatccagcttttcatttaacattcctttgaaccatttggaacttggcagatgcccaatcagcacttcatccaagtacatcaccaccttccccytcagttcctgcatttcccagctcttctttgaacataccaaccatacttccatatttgtgattttgtccttgcccttccctcttcctgaaataccttttcctcatgtggtccaagtggcttcttcctccttgaccctcccctctgtctttttcagatctttgttcccatgatcaaagaaggctttcctagccaaactttataatatagctacctccaaatccaacccactggccttcacaaagacagaaggtttggttgttttgatcgttgttgtatccccagcctccataacagtgattaccatgtagcttgttcaatggaaatacaatgaagaagttggtaacataggtcttaaaaaggaaaagtcttgtcttataatgcctggaaagcagttaagaaatcttttcagatgctttcatttcaagttattcacatacactgcatgtaagttacacttagaaacccaagcagccttcaagaaagtagtaatatgtccagttaagcaagatagcactattatcattcagttcccatctgggctccaagcaactttaagagaatctttcctctgatagacaggactaatttgtgtcttatggaaaattaaataaattatttttcacctgaagggataagattatttgacttcagatatttgctatatggcttctcttccacacaacatagctttgaggcttaaggtagtaagagcaagagcattcctataaattattcagagataattcaaaacaagtgtgcatctttgacatattgtcaagtttctcaaykctttttcctgataacaagtgctatgtttttgatgaaatgttgctcgtttctcacacaccttattgttctgtgtgtgtgttctgtgttttgttctgtttgttattgtttgttttcatttccctcagagtccagtctggctcatatctcagcacagggtggtttaccttcmttctggccatggacgcctgttatggcattcacgtctacgggatgataaatgacacctactgcaagtaagatcacaagaaattatttttatgcagctccaattcggagatcttgtcaaaatatcacaattcattttaataccataaatctgagaaacagataaagcaacaattatttcccagtgttctttgctgacatgacattttattgtcagtgcgtcaagttgtgacttctaggggtgagaaaaagaaaaatatttaccagtctaatgtcaaatgtcaggaggaacacttttcccttaatcagtggcatagcagggacttttggcttgaaaatacagaagaagtttartggttgtgtaatttgcaaaagcaagtttgtcatttctgctgctctgatggcttgatggatagctatctactcaatggttagttagatttgatcatgaaggacaaaatgtcctgcagcctcagagaaactgacagcttaacaagaattcctggaaattatacttcactagtaagtgagtaatctgccagatccttatttaaaatgagtgtgtttacccacagtatatccttgctggtgggatagtttctaattagataatgaaacaaaccctccatgcttcatcaggataatggaatctrtttccctaccaacaattggcacaatataattcacagactgttttaatcataatgtcaaaatggtaactctcagccacagtcttcatgaacaaatatttcttccctaactataagcataatggagctcagatgagccaatatcttactgtgaaaaatcacagtttcttcaagttctgcaagaggctatctaaagtttcttcaattatacaccatttccttttcaaaagatagccatatgtttgaatgtaattggcatgatatataaattttatttgatctattaaaccactaaaaacttggtacatcttcctaaaagctttcatacatataatagcttttaactgagttcatggacaagaatcatgtatgggtttgtgagtaaatgcatttactgggcacataatggattcttgtaaatgagtgcttcattcttcatctcaatctttctctccttttctttttttttcttttctaggacagaagggtatagaaaagtcccctaccattattatgaacaaggaagagatgagtgtgatgaatattttcttcatgaacatgccccatatgggggtcataggtttatcactgaaaagaaagtgtttgctaaatgggccaagaagcacaggataatatttacacatccaaactggacattgtcttgataatggttttcctgatcttgccgcatcacttaatgtgatccccatactgcaactgtgatgctgatgatgctaatggagatgatggtaatgataaagacaacaacaatgattatcaagttcctgtacactctcagatgtggatggtgactctgctagtaatttaaacttggcatttcatggaggatggttgtgctcatgatgttctttctggaggttcaacactacgtaccgcactttataatttaactggaattgagatgaaggccagtgacatgacaactgtgacctaagaaatgggaagattatctttcaagatagctgcctagaattgttcracagtgagtaacttccagaagccaaaagagtttggcttcatgaggcaaggtgattgactcaatggcttgttgaatctcagcagttccgccatcttgaagaatgattgattgtcaaacactgacccaagaactgctatcagggtgcaagtatcttactasttagcctaaggatgggaaaatatctcttcctaatataccatctttctacagtatttcctacagctaaagcctcaggccattgcctaattaacaatgaagatttcatggacatcctacacttcaggattacttgactatctcaaacacataaatcaaaatgggccaagtagcaaatcttgatgaatttccactcttaccatccattcttactaccaacagtataactgaacatgtgattagaatgatctatattaatgtttagttatttttggttgagtgctaaatatttcagaaggctacttaacatgtaagataccaacttcaacactgtaataacatatactgtgaaaacattcctaaaaagtaaccraagggtttgctaactctgcttcaacatccaacaacacaaaactatatgatttttaaaatcatgaaatagagacagcaaagcatatttttacatcaatttgtatcctatcatacttcataatatatatttgtatattcaaatttctattttataggcccaaggtgtgtttctccaaacattacattctcattgccaagtgccagctgttacacatggagaggaaatgattccttatattaaacctraccagagctttttgccttctagggatttatttttcccatagtgtatcagttgttatgccacaataacaacaataataatgttcttaatgtccaaagtgctttgtcatttagagtcctttaacatctgttataccatgtgatgcccttgaacaccccattgggctattgtctgtgtattctgctctctttagcagatgatctgtaatttggtcattgttctgttatattccagattgctctacttgctaatatttgtatagaatagaatttatgtaaactagtaaccagttgatctctgtgccaaatacattatatcaggattacacaaaaagtatcacaaaggatggtcttggccatatgctagggcccctgtgaaaataagtagttttgagaagtttttctatatacgtatatatacacgtgtggttctatttaggtggggaaaaaatgaaaaagcagggacaacaggaggaaatgaaggcagagaaatatagtttcctttcctaggattgagacaattctatttttcatatactcgttgctcattaaatagtaaagggttgatttgctgcaagagtagctgagaattcaaaaacatccttgcasaatgattcaaaagacaaaagccaggctcaacttatagaatgttttggaaactggaagtaatgatacatttcacttcagaagcacttgtaggtctttactagtgctaagtattatggtgagctatcattaaagtgtgccatcttggataaaggccttttgcctactctcttctgcaattttgacacctcaatattcacacccataaacattactaagccccagttctatcgttggaaggagttgttattcttttgttgttcccttatgcaatttttaattctatgaatgttaagtttttttgagctaatgatagatagaaatgcccactcaaagaaaaataaacagagacaaatgttaaaattgccatacagactgtttttccccctgttgtttcactttaaaataaaaagaaatccttgattaatcagaatggcttgggacatgaacttaatttatttagttttctaataaatgaagggccaactcttatttgttctagcccctactgatgagaaacatttgaaaacttgcttgctctcctgcctcgttgtagctttctctgatgaagacttctgcagtatattgtatccctcactctatagcagaaggtgtgtgtggaatatgtagactccagtgttttcttaggaggggtgggaaagggctttctttcctctcctctcctctcgtctcctctttctttcctttctttttgcaactaaactgctactctacactttttattgttgttttctttgtctttttctttctacaaacaggaaacaaaaaaaaaaaaacaagtttttctcaatttggagactcaattgaataatttccagtataatcagcattttgatagaatctcacaacttatttttctctgcttttatttcctgtttttctttgttccatctttctaattctagtgaaaatgcaaagtctaatttctcccatgttgagaataaatttttcatctatgatttgctgatagagaagagcttggtaagggagcaattcaaggaaactattttgccatgcacatttctgatcaattcccacagattctggtcaaatgaaagatattctatccaacatttaaacattgaaaaatttaactgaacttacttatcactgatgtgtatttatcccagaaattaattaatatctgtgaaaaagaaaaatatttcaatactatccgtgcttcttggaaaatgaactataaaaaagggtcacaatttttctgaaattggcatgaaaacattcaagataaaaataatagactaaacattattttctgttatgcataattctatgaaaaagcaaggtaatttaaaaagagttttaaaatgtgtgtttgaatcttttccaatttaaccaagtgagaagtagcaatgatttacattgttatgatgataatgtgaataagaaaccttttagagtatatgattttacattgctatcaaacctatcaaagaaaaggcaattggaatttggaggaatgtttgtatatatgcacatagagtctatttgtgtgtgtgtgaacgcacatatatatacatctatatacttataactatatataaaggcatatatataatcctatattcttcactggtgcatgtgaatcacagaaagccctattttagacttcatctgaaattcgttgggttacattttgaatcctgatgaaaaaagcaaaaatccaaattaaatggactgattgctaagagtacgtaaaatcatattcaaaagctggccagaagaataaagctagagaagctgctaaatctagaaaacacaatcagatgccacagttgtcacaaatcagrcttgtaagtatagcaatctgtattgtaggttctgccgattgcaggcttagctaaagtcacattgaaaaacattgcatcaagcttcattcacactgaagtaaatgaacattggtcctcctattcaaataagccagtctttagcataagcaaaatccagatttgcatgatttttattatatagctacagaactgtgaccactgtgaaaaaggaaaattatacaaggagattgctcttggaggatttggtatgaatcagctgaggtaggaacaagagtctgaattggggacctgctgaccttccaagaagtagaaggccatcagaagaaaatcactgttacttagagaagagacaacactaaagtacttcacctggtagtgttaattggatgttaattatgagctcggtttaatttcaataagcaagaaaatataatcagatgactgatttaaaaaaaaacaacaacaatgtgcccatctagcctttaatgtgacatgtcaaatgcaaataataaattatgttattcagtgtcagttgtttgcatgtcttagcacaacaaaggatttacagtctgagggccaagagagaaaaaatgcttttttcttaaaacagcatatttaaaagacaagacctcatcatttcagtagtgtacatagattagtgactgaaggagccagtgctagcctttttaagtagktcaggcttttagagctgaaagagattttaaagaccagccaattcaactcctacaccttggagctgaggaaacagacagaggtgaagtgacttgcctgtagttataaactggactaatggcagtactgagactcaaattcttgtctcatgttttcttctctagtgctttttccactacactttttagacagaagagtagctggaaaaagaatgcctaactgatttactaaagagtctattcatggaatccaagggctccaaattgtgctaattctgctcaggatgaaacaaatccccacgctgaagtggagaaatattttcataattgaaggaacatatcccattgattgtctacactttcttctctctgtttgttgctattggtaaggctaggctatgttctgttatcacaaaattctaggacttgtttaaagaacttaaaggtcagtttcttagtttctctttgtgattgaggatgagcaagccattgatacaccaagagctgctgagtgttggaggttgcctggtgaaactggcaggccctgttgttgacatttccccagagctaaaatgtcctcatactcaaaccaactgtgctgcccaagttagtgaaattatccatcagcactaacaccaccctttgggttcatgctcatccctgcactccatgtgacctttgagcccagatacccttctagaaggtgaatgaaagccccacatgtcccgcaagacttagtctgcataaaagatttaaaaggatttttttttctctacagtccatttatatgatactgttagaagtgaagaattttgaaactacatacactggcctctgaaaatggttcttgtggctcagaaatagtatattgttctgttgcttgtttttgctgaactgtagagaaaacaccagagtaaaattccatgtaaattgctaaggcatcgaatcagaactgtccttgggcattgtaacagtgcagaaaatctcatttagtttttttctttttttttttcagttaactacttgtttgtttcttttcagaataggcacttttttttgagtagaaaacctcttctttctccacagatacatctctttttgttcacgccttgaagacttcagaaaaatagaagctcacttccttccataaaggtgaagaacatcttgatgaataaacagtcaactaccaagttcacatatttgcctatgaagtgagagctatttctaagaaacttcaaaaagatcaaaacgaggcaattttatagctttttgttacctaatctacaaagtactaatttccttgtgtttagctttgttgtcactgttactgagtaaatacccatttctgttacatatggtacattttttgcttcacttattttcctgagttcccatgattttttttctgtagtttctcattcattttaaaacccataatcttcatctatttttagaagaaagtgtaaatgcacagttgtacgtttgttgagagtttttatggcattatagtgctttatttataagcattgtgtcttagaataaagcttacaaaatggcaaagagctattggcatatttcagtttgttttacaacaggacaagtaaggatatgttaataaagccagagggaaaaggcggtatgggatttttaatatacttgatatccaagtcggaaacatatccagaatactactataaacaataacaagagaaaatgttggtctgcctctggaatttgttttgtccatattaactatctgatgctgacatatatttctttttttgctgtgtcagacatattaacaaagttgggttagcacataagctgcatagaacaaagaagtcttccttctttcctcccttccttccttattccttactttcctctctcctcttattttctttctgcaaaactcaacactcttgcagttgaatgtcaaatttggataatttttcttttaacaaatcagcttatagttatctatccaactctataagagatccatatttggaaatgatctcaaaatgagagtcatctttggaaataataacttctacttatatgccaggcttattaaagggctgtgtatctcattcagttcccccaatactttatgaggtacataatgttactatcaccatctcatatataaggaaattgaagcactagagagattaaatagcttacccatggtcacacagcttttgacgaaatgagattgaaaccaaggcagtttggcccagagtccatacctatctggggaaggctaataaatgtaaccaataaccccccaaatttcagtagcttaagagaataagatttgtttctccctcaaacataaattctacatagatgctcctctccaaccagcttgtttccaagggtgactcagatacaaagacaccttccatcatgtggctttgccctccttgaggtcctttgagtcctctctattcggcctgctaaaagggaaagagcaaaaaggatcttgtgctggaaggttttatgggcaagcctggaagtgatgtatatcactccacccacattctattggccagcctcactcgcgtgccttggtatgggcaatgctgtctaaatgtgtaggaaaagaatttgatgaacatgtagctctttctgccctgatattcttagtcatgatgacataatagctgaaaaagaaaacactgagttttgtgcaactctatgggtgagttgtttgttttgataatccttgttcaagcactagaaactttcagaaaaaaatttttgtgtatggatatcagtacccacatcagaaccagaataaactaaggaacaatatattgctctaggtcatattataccaagagagaatatggtttcttttgcccaaggaagcaagagagaaactggcacacaagaaacacttctaagtgactgaactctacccacaatagaagtaacgtgacttttaatgtcttaatgatctgtggttaaagtaggatagatgtgccctcacctctgatcaaccgcttgtttttgtgcctatttccctttcaagatgtcacagagattagccttttttttcagctctcctttggtattcaggtctatgcagtactgtgatatttttactgcataaaatataattgctatttcttgaatcttaaatttaggaatttctctcatccatcttttttatttaacattggcatatgaacttaataaaagtactaatatgccttaaaaagactagacacaccacaacatcacagggcatatttctataaagagaggaccttatatgcattctctccctcactcttctttacttcccgagactttctactctttgacttcattttctttaagctatctaggaatccttttcccttaacactaatagaattttgcatcctagaagtttttttttcacctaatacgaaactatttgctatcttggagaaagtacttcgcatgttagcatataaattttcttagtttgtccattgagaaagattagctgggactctaaaagcaatataattagagaagagaatctgccaatgtttaccttctttcagaataatgtgaaatttcttttaaggacaagaaactttagtgtctagttggtaaatgacataggtttgaatctctttctaagagttgtaattgatgataagaatattctgtggttctttacagggataaattgtttagtttaatcagagtggtggctctcactatccataagtccatgggcaaaagtgttgactaatacgatcatacagtgtacaccagccaccttacaccatgcattgttgagagttcttgctctatatttgataacacttttcaaatatgccattttccgtgattataaaattgcttaaatatctatataatctttcaaaataattttcctaca

SEQ ID NO: 93526 - DNA, 14325 bp, Homo sapiens
cagatacttaatgcatgcggggctgaaaacctagatgatgggttgatgggtgcagcaaaccaccatggcacatgtatacctatgcaacaaacctgcatgttctgcacagaactgaactgaaagtataattaaaaaaaaaaaaaaaagctgggtgcggtggcccacacctgtaatcccagcactttgggaggccgagacgggcggatcacaaggtcagcagatcgagaccatcctggctaacacagtgaaactcagtctctactaaaaatacaaaaaattagccgggtgtggtggcgggcacctgtagtcccagctactagggaggctgaggcaggagaatggcatgaacctgggaggcagagcttgcagtgagctgagaatgcgccactgcactccagcctgggggacagagtgagactctgcctcaaaaaaaaaaaaaaaaagaaagaaaaaggagcgttgcttgtttcaggccacaggaaggggagagatagtgaaagtttttcagagaaggtggccagggaaggagaagaaaggactgtaggcagagagcatagcctgtacaaagccatagaggcaagagaaaccaggagctgtagagaagttggcaaggctgttgaacactatggtgaacactatggcggcttccatgaaatatctgagcttttgctccccactagggtgttccctcaggtcaatgtcacgaagatgggcagttggggccactttaactgttcctactcctgctccttccttctggctccggaagaccccatattccccatcatcgggagcctcttcctgcgagagctgatcaaagagtttggcacagaccacatctatggggccgacactttcaatgagatgcagccaccttcctcagagccctcctaccttgccgcagccaccactgccgtctatgaggccatgactgcaggtacagtgcctgggtggggtgggagagccccccagaccctcaaaaagaagggagtagcagatgtcagtaggggtaggcagagggactggaataatgcctcgccataacacacagtactttatagtttaccaagcacgtgtacacatgcgttgtctcagtgaatcccactgtggttgagaggtgagctctggaagccaacaacctgggtcacacctcgcgctcctatttcctggccgtgtgacttatgactcatgacctccttcccagtgtctcgtttgcttttcctgtaaactgggactacctcataggtagaataacgcctggcccagagcaaaggccactaagagctagctatgaacaaggattttgtttcatctctgcgtggttgctgaagtaggcactgcaggcaggaggtgagtggatgtgcctaaaggcactaagtgcgcatcctgctacaaaactgtgaagccagggctccttcctgccacttaaaggaggagtggagcagagggcgcccaagtcaggaatgacttagtggagaggcgtctgtgttggccaggaagggaacagatcagctcagcctttcttgagcagtactgctccaagtgtgacccaaaaccagcagcagcagcagcagcagcccgagctgtgagatggcaaattctcaggccctacccaagacctgaaggagaagctacattttttttttttttgagacagatttcactctgttgctgaggctggagcacagtggcacaatctcatctcactgcaaccttcgtctcctaggttcaagcgattctcctgcctcagcctcccgagtagctgggactataggcacccgccaccacgcccggcaatttttgtttgttttgagatagagtctcgctctgtcacccaggctggagtgcagtggcacgatctcagttcactgcaacctctgcttcctgagttcaagcgattctcctgcctcagcctcctgagtagctgggattacaggcgccccccaaccacactcggctaatttttgtatttttagtagagacggggtttcgctatgtaggtcaagctggtttcaaactcctgacctcaaatgattcgcccacttcagcctcccaaagtgctgggattacaggtgtgagccaccttgcctggccaatttttgtatttttagtagaaacaggtttcaccatggtggccagactggtctcaaactcctgacctcaggtgaactgcccacctcagcctcccaaagtactggtattacaggcgtgatccactgcgactggccttgattttgtttttgagacagaatcttactctgtcgcccagactggagtgcagtggcacaatctcagctcactgcaacttctgcctcatgggttcaagtgattcttgtgcctctacctcccgagtagccgggattacaggcacctgccattacgctaggctaatttttgtatttttagtatagacagggtttccccacattggccaggctggtctggaactcctgggctcaagtgatccacctgcttcagcccctcagagtactgggattataggtgtgggccaccacgcccattcagaaacctccatgttttaaggagccctctgggtaactctcatgttcacccaagctgctgaaccctgtcctggagttttcagagggacgcgtatgtgccacagagcgtcccgctggtgggggtcatgggaagccatgacctgggatagacagtcgtctgtagagtggggtgaacattccctgggccctctgtttcatcactcctcttctctgttccccctacctcctgtccacagtggatactgaggctgtgtggctgctccaaggctggctcttccagcaccagccgcagttctgggggcccgcccagatcagggctgtgctgggagctgtgccccgtggccgcctcctggttctggacctgtttgctgagagccagcctgtgtatacccgcactgcctccttccagggccagcccttcatctggtgcatgctgcacaactttgggggaaaccatggtctttttggagccctagaggctgtgaacggaggcccagaagctgcccgcctcttccccaactccaccatggtaggcacgggcatggcccccgagggcatcagccagaacgaagtggtctattccctcatggctgagctgggctggcgaaaggacccagtgccagatttggcagcctgggtgaccagctttgccgcccggcggtatggggtctcccacccggacgcaggggcagcgtggaggctactgctccggagtgtgtacaactgctccggggaggcctgcaggggccacaatcgtagcccgctggtcaggcggccgtccctacagatgaataccagcatctggtacaaccgatctgatgtgtttgaggcctggcggctgctgctcacatctgctccctccctggccaccagccccgccttccgctacgacctgctggacctcactcggcaggcagtgcaggagctggtcagcttgtactatgaggaggcaagaagcgcctacctgagcaaggagctggcctccctgttgagggctggaggcgtcctggcctatgagctgctgccggcactggacgaggtgctggctagtgacagccgcttcttgctgggcagctggctagagcaggcccgagcagcggcagtcagtgaggccgaggccgatttctacgagcagaacagccgctaccagctgaccttgtgggggccagaaggcaacatcctggactatgccaacaagcagctggcggggttggtggccaactactacacccctcgctggcggcttttcctggaggcgctggttgacagtgtggcccagggcatccctttccaacagcaccagtttgacaaaaatgtcttccaactggagcaggccttcgttctcagcaagcagaggtaccccagccagccgcgaggagacactgtggacctggccaagaagatcttcctcaaatattaccccggctgggtggccggctcttggtgatagattcgccaccactgggccttgttttccgctaattccagggcagattccagggcccagagctggacagacatcacaggataacccaggcctgggaggaggccccacggcctgctggtggggtctgacctggggggattggagggaaatgacctgccctccaccaccacccaaagtgtgggattaaagtactgttttctttccacttaaactgatgagtcccctgggtctgtcaaaatgagaaggtcactgctgccacgcttgggaggactcagggctatagcatggccctggggtgggacctgttctcccatcccttgcctcacgtccctgtttttgtttgtttgtttgtttgtgacggagccttggtctgttgcccaggcttgagtacaatggcacagtctcggctcactgcaacctccgcctcctgggttcaagcaattcttgtgcctcagcctccccggtagctgggactataggcatgcaccaccacaccaggctaatttttttttttccaagatggagtcttgctctgtcgcccaggttggagtttagtggcaccatattggtttactgcaacctctgcctcccgggttcaagcaattctcctgcctcagtctaccagggagttaggactacgggcctgtgccatcacgcccggctaatttttgtatttttcatagagataaggtttcaccatgttggccaggctggtctttaactcctgaactcaagtgatccacctgcctcggccttccaaagtgctgggattacaggagtgagccaccgtgcccggccatgtctctctttttaacactaatgttaccctgacctttgaacgtagaatgcccttctgttgcaggaaaacctcttttcaaaccatgtttgtcctttgctggcatgccacagcaacagtcaccaacacagaagacttctgtgaccaaatatttggaggattttccccacacacaccaagcagcagacatcagctgggtgtcctccaattcagttccaatgtaatcaaccagagacagcatcagatcccacagggttagggtgcagatccatgagaccaccccctccttcccaacggttacaagtcctgatccctggaacttctgactaactggcttcaagttggagttcccatgacccccttcccctctttggagtcaactcatttgcgacagtgacccacgaaacacagggaaacccttattatgtttattgctttattacagaggaaaaaaatttttttctttcttttttgagacagggtctcactctgtcatccagaatgactgcagtggcaggatctggctccgtcacccaggctggagtgcagtggcatgatctcggctcactacagcctccatcccccccaaaccccacgcctcagcgccccaccccgcaagtggctgggactctaagcatacaccaccacacccagctaatttttttgtagtttttgcaaagacggggtctcattctgttgccctggctggtcttgaactcctgagctccagcaatccccttgtcttggcctcccaaagtgctgggattacaggcatcagccaccgtgcccaacctcaaaggatattttaaaggatagaaataaacagccatatgaagagatacagacagggcggtctggaagggcccagagcaggagcttctatctccatagagttggggttacatcaccctccaggcacatggatgagttcttcaccttctgtcagcctccacacgttcagctctcagaagcttcccgaaccctgtcctttgggccttttatggagaactccattggctgtccatgactgaagcatggacaactgtgataatgtgattgggcaaaaagggtctgatctaagcccagcaaggccagtccagattctttgggcctttgtgcagcattcctttctccagggtatggggcaaggacccactctggaatgaggatcctacaacccacaatcagattagagtcctgccttgggcagctgaaaagaggacaggagaaggtcaaagagaggaaaggctgttttttgaggcctgaggcgccccaacatgacaacgaaagactgtaaccatggtcatgtgagttatgagctaggaaccctggacgaaaccaacacatatacaatcatctcccacctcccaacacctttactttcacagcctctgcagcaaactgcggtcactataatcgctcctgtggcacagaggcatacccaggggaatctgcccagggggccactctgtgcccacrtgggaacccacrtctgcttgtaaagcctcccctccctctgaccagaaacgaggacagtttgttgttccaagcagtgggctcatgtctgttttggctcagaacagggtggggagagcgggccagggacccgcaggagggcttatccttgagattgcgtgggagacacaacaaggggtgggggcccgcaggcggggcggggcgaagcaggtgatatccagcccagagccccagcctctccccacagtctcaccatggcctgcaccgtggtgctcatcaccggctgttcctcaggtattggcctgcacttggcaatacatctggctttggacccatcccagagcttcaaaggtatagataggtagggacagggagggagagaagggaaaagcccttggaggccagaagagaagtcagatcttcctcctctcccaaaacctccagtgtatgccacgttgagggacctgaaaacacagggccggctgtgggaggcggcccgggccctggcatgccctcagggatccctggagaggttgcagctggatgtaaggaactcaagctccctggccgctgcccgggaacgcgtgaccgagggccgtgtggatgtgctgggtgagcctcctggaagcatatgggctcctaggagccttctccgccctgcgttgaaaccaacatgtccccaggcccctggagcatgaggggacaggccgtgctgagggtgatgctgaggcgggctggttgggcctctgtccccgcagtgtgtracacaggcctgggcctgctggggccgctgggggaggacgcygtggcctctgtactggatgtgaatgtagtaggtactgtgcgggtgctgcaggacttcctgccagacatgaagcggccgggttygggacgcgtgttggtgactkggagcatgggaggattgatgggtgagtggcagggaccgggccccggagctccagattctttgtgtgcagagctgagccttgaaggcaggctccttagggggtggggtgcaatcagcttggaggggcactgcctgccgggggatgaccccctggccgctgcgcctcaggaacctcatcttcccacccaagggctgcctttcaatgacgtttattgcgccagcaagttcgcgctcgaaggcttatgcgagagtctggcggttctgctgctgccctttggggtccagtgagtcaacacccccgtctcctcaaccctcttaactctgacctagagatgccgagcaccctgtcctgcggaagccgctctggtctctgcccggcttacatttgctgcgtgccaggcacttaggctggagcattggcacgcattgtgccacttgctgacctggctgctgaagtgttggtattgttatggggaagctccagccargagaggttaggtgactggcccaaggtcatgcagcggccggggatcccgccaggttcgaattctgacaccagggctacctggcagcctcagatgggtttgggagggctgtcgagcaataacccgctattcaaatgttctggttatccccagcgctctttccaccttcgggacgcagcggtgctgttctgggtcgtggccagggccggggtcggggccggtgctggggcaggagatgggacttggcgcctgggtcgcctccgtccctgcccacttgcggctctcgggccagcagcgtgagcctgatcgagtgcggccctgtggacaccgccttcatgcagaaggtgttgggcggtcccgaccaggtgatggaccgcacgaacacccggaccttccgcctcttgcactaatacctccaccacagcaaggagatctaccgcgaggaggcgcagcmccctgaggaggtggtgaaggtgagcggggggcgggactccgggagcgggggcggtgcgtcgtcctgcgcgcagccsgggccagagctcctctcccgccgccgcaggtcttcctcaccgctatgcgcgccccgaagccgaccctgcgctacttcacaaccaggcgcttcctgcaccagctgctgatgcgcctggacgacccctttggcttcgactacgccgccgccatgcaccgggacgtgttcgccgacgatcccgcagaggccgaggctggggccggggctggggccgaggccgggggcggggccggtgggatgggagaccctgagctcagcgatcctctggccgccccgcaagaaaggctccgtcagccactgtctcccgcgccctcctttgtctcctgggcctgtgcggtccctggggatgggacggcggtgacggctgtggatggctaattaagacagatcacgttagcccgttatatctgcgcggctaggcgcgatggctgtcgcctataatcccagagctttggaaggccgaggcaggaggatcgctccaggccaggagttccagaccagcctgagcaacatagtgagacaccccatctctaaaataaaaaaattagcacagtggcaccattccttgagctcaggagttggaggctgcagtgggcatgatcgagctactgctctccagcttgggcgatagagtgagacactgtcaattaattaatctaatcaaccaaccaacccaacaacccagaaaccaaggtccagaaagaagccagcccaggatcatgcctcaagtccacagtaaagcccagacacagtcactggatacccaaggggcatctgcaggacgagttaggtgggacttgggttggggtagagtcaggttgtgacctgcactccattagccatgagacctcaggcaagttccttgctttctctgagtgctttcctttcctttcccttttcttttcttttttgtttttcttttgttttgagatggagtttcactcttgttgcccagcctggagtgcaatagcgcggtctcagttcaccacaacctctgcctcccgggttcaagtgtagctaggattgcaggcatgtgccaccacgcccagctaattttgtgtttttagtagagacgaggtttctccatgttggtcagactggtcttggactcccgacctcaggtgatccgcccgccctggcctctcagagtgctgggattacaggcatgacccaccccatccggccctctgagtctttcttatctgtaaaatgggtataataatacctatctaatcggttttagtaatggtggagataatgcctgaaagtgctagtatagaggtttaatagccagcaaggactgttattagaatgaatagtaatatgactactgtcacattttgcaaatgtgtaaagaagaaagagggctaagtgaatcaaagggagacagccccactcaccctgttctgccccagaggactgagcgatccccaccatctggcaagctgcctcaccaggaggtccagctggggctacaggactggctactttgctacaatggcccgtctttcctgagcccagtggagggtcccaggggggcagaagtcattgataggggccagtagggttgtagagccactgtctgaacttctgtggaggtctggtgcaggggaggtgtgaacagataggaggctaggtgaggatgcagcagaggaagggggcaggagtgccccaggagggggcggtaccgaggcagggattcagctgggtctgagagggaggcaaggctgagggggatggccctttggagtgggcagggacatgaccacagaaagcctgggaagtggaaacagacaggagcctgctggagctcttggagctttgtgtggggcactaggggaaggaggcaggcactccaccctgacctgcccctacctctggatgagggtcttctctgcctgttggatgatgtgctgcccctgctcttggaggaagaggcctcccagccaccccctcctgccagtcgccctgacctgctgacccagacagatctgctatccctacagcatccaggaaggccacagggagggggcccaggtggcatgggtttctgaggcctgggatctgctctcagtcccgctctcgccaaccccctttgcccctctgtgacagtgtgtgtacatatgcgtgcatgtgtgtacctgtgtggtgtggctcacaaggtcacccctgggggtgggataataagaggtaaagtgtgaccccctctcttccgtacattcattttttcaagcttgtgaatattcacattgttaatataatcttctgcagtcccatgacttcgaatagcacttagatgccgatgacccccccaccaaagaaaccccactgtctcccacagactccaggtctgtatctccaactgcctactcaatacaacacgtccacctgatgcaatgaacttaatgtgtctaaaccccaattccacatttccagtcctcctaccggctcctcccccagtcttctctactttactatatgacaactccatttttcccaatactggttttaaaaaccctggagtagtccttgactccagtctctctcacctttcaaccaattcagcagcaaatactgacagctctacctttgctcatcaaagcatatccccaaatcaccctattccagactgcacactgtcatctctcccttcaattacagcagtagcctcctaactagttttcttgattccactcttgcccatcagcagtgaaattaccccagagcagttaaaatgatcttttaggatgggcacagtggctcacgcctgtaataccagcactttgggaggtggaggctggctgatccccttaggttgggagttcaagaccatcctcaccaacagggagaaaccccatctctactaaaaatacaaaaattagccggatgtggtgggacgtgtctgtaatcccaactacttgggaggctgagacaggagaactgcttgaacccgggaggtggaggttgcagtgagccagaatcgtgccacagcactccagcctgggcaagaagcgcgaaactccgtctcaaaataaaataatcttctaaaaatgacagggccaggtggggtggcacttttttataatccgagcactttgggaggctgaggtgggcagatcgcttgacatcaggggtttgagaccagcctggccaacatggtgaaactccgtctctactaaaaatactaaaaattagctgggcgtggtggcgggtgcctgtaatcccagctactcgggaggctgatgcaggagaatcgcctgaaccaggcagatgcaggatgcagtgagccaagattaagacactgcactccaacctaagcaatactttgtctcaaaaataaaaaaaagcctgggaaacaaagtgagaccccgtctctacaaaaaagtcaaaaaattagctgggtatggtggcagtgatggcacacacctgtagtcccggctacttgggaagctttttaatattttttgcagagaccgggtctcactctgttacctggcctggtcttgaactcctgggctccaacaatcccctttcctgggcctcccaaagtgctgggattagaggcatgagccaccgtgcccagcctcaaagcatattttaaaggatagaaataaacagccatatgaagagatacagacagggcggtctggaagggtccagagcaggagcttctatctccatagagttggggttacgtcaccctctgggcacattctgtcagcctccacacgttcagctctcagaagctcccgaaccctgtcctttgggccttttatggagaactccattggctgtccatgactgaagcatggacaactgtgataatgtgattgggcaaaaagggtctgatctaagcccagcaaggccagtccagattctttgggcctttgtgcagcattcctttctccagggtatggggcaaggacccactctggaatgaggatcctacaacccacaatcagattagagtcctgccttgggcagctgaaaagaggacaggagaaggtcagagagacgaaaggctgttttttgaggcctgaggcaccccaacatgacaacgtaagactgtaaccatggtcatgtgagttatgagctaggaaccctggacgaaaccaacacatatacaatcatctcccacctcccaacgcctttactttcacagcctctgcagcaaactgcggtcactataatcgctcctgtggcacagaggcatacccaggggaatctgcccagggggccactctgtgcccacgtgggaacccacacctgcttgtaaagcctcccctccctctgaccagcaaccaggacagtttgttgttccaagcagtgggctcatgtctgttttggctcagaacagggtggggagagcgggccagggacccgcaggaaggcttatccttgagattgcgtgggagacacaacaaggggtgggggcccgcaggcggggcggggcgaagcaggtgatatcaagcccagagccccagcctctccccacagtctcaccatggcccgcaccgtggtgctcatcaccggctgttcctcgggcatcggcctgcacttggccgtacgtctggcttcagatccatcccagagcttcaaaggtatagataggcagggacagggagggagagaagggaggagcccttggaggctagaagggaagtcagatcttcctcctctcccaaaacctccagtgtatgccacgttgagggacctgaaaacacagggccggctgtgggaggcggcccgggccctggcatgccctccgggatccctggagacgttgcagctggacgtaagggactcaaaatccgtggccgctgcccgggaacgcgtgactgagggccgcgtggacgtgctgggtgagcctcctggaagcatatgggctcctaggagccttctccgccctgcgttgaaaccaacatgttcccaggcccagggagcacgaggggacaggccgtgctgagggtgatgctgaggcgggctggtcgggcctcttgtctccgcagtgtgtaacgcaggcctgggcctgctggggccgctggaggcgctgggggaggacgccgtggcctctgtgctggacgtgaatgtagtagggactgtgcggatgctgcaggccttcctgccagacatgaagaggcgcggttcgggacgcgtgttggtgaccgggagcgtgggaggattgatgggtgagtggtagggagtggcctcggcagctccagattctttgtgtgcggagctgagccttgaaggcaggttccgcggggagggtggaggggggtgccgtcagcttggaggggcaccgtctgcccggggatgaccccctggccgctgcgcctcaggaacctcgtctccccacctaagggctgcctttcaatgacgtttattgcgccagcaagttcgcgctcgaaggcttatgcgagagtctggcggttctgctgctgccctttggggtccagtgagtcaacacccccgttccccgaaccctcttaactctgacctagagacgccgagcaccctgtcctgcgggagccgctctggggcgatctccctggccctctctgcccggctcacattagctgtgtgccaggcacttgggctgggcgcatggcacgcattgtgccacctgctgacctagctgctgaagtgttggtattgttatggggaagctccagcccagagaggttaggtgactggcccaaggtcacacagcggccagggaccccgctagattcgaatcctgacaccagggctcccttgtagcctcagatggatttgggagggctgctccggcaggaacccgcgtttcaaatgttctggttatccccagcgccctttccgcctcacttcccagcgcagcggtgctgctcgcggtcgggggccgggacgtggttggggctgggactggggttggggctgggactggggcctggctggcgtccgccccctcccactcgttgctctccggccagcagcttgagcctgatcgagtgcggcccagtgcacaccgccttcatggagaaggtgttgggcagcccagaggaggtgctggaccgcacggacatccacaccttccaccgcttctaccaatacctcgcccacagcaagcaagtctttcgcgaggcggcgcagaaccctgaggaggtggcggaggtgagcgccg

SEQ ID NO: 93527 - DNA, 12324 bp, Homo sapiens
cccctcaaacactggaggcagggcactgcaaagagacagcagttaatgacatgggagcagggaacctcaaacctcacaaccaaggagcatgagacacttgaggggaaacagcaccataaacaggggcagcaaggcccacaaggaacctacaggaggaaggaacctacaggaggaagcatcataaacagagcagacagaataggacaattacaagaagtatcactaaccatagttttcaaccaattttttaaattaatttatttattttttattatactttaagttctagggtacatgtgcacaacatgcaggtttgttacatatgtatacatgtgccatgttggtgtgctgcacccattaactcatcatttatattaggtatatctcctaatgctatccctccccctcctcccaccccacaacaggccccggtgtgtgatgttccccaccctgtgtccaagtgttctcattgattttgaaccagtttttgaaaaccagaaagatgaaattctcttgtccttcttttgtctcatttgagcacaggattatactgggctcctaatgagctggagctggttagcatcacctgcctgtccccccaccccttttttttctgtgccctggaacagtttgcataagctatgagttatttgttccttggaggttttagaaaatacaccccaaaccaccatatgggccttgaacctttggcagacagaatacctcttcaaatgttatttcatttttttctatggttgttggtttgcataagctttctactccactttggaccaactttggaacttttataatcctgtgagttgcctatgtcatctaagcttgcaaattcaatgaagtaaagaaatattaatttctaattttaaaaaactcttttgtatctgtagttaagcctcctttcattgcttctgtttttcattactatcttctttctggtttttgtcttaattatacttctaaatatttgtctatgatgttggtcttctcaaatgttggtcttatgatgttggtcttttgaattatttttatttttttgagacggagtctcacttcgtcactcagcctggaatgctgtagcataatttcggctcactgcaacctccacctcccgggttcaagcaattcccctgcttcagcctcctgagtagctgggactacaggtgcccgccaccatgcccggctaatttttgtatttttagtagagacagggtttcatcatgttggccaggctggtcttgaactcctgacctcatgtgatctgcccgccttggcctcccaaagtgttgggattacaggcattagccaccgcgcccagcgctttcgacttttattagtcaaatctactgttttattttattttctattattaatttttgttcattcctttatgattactttagtccactttctttaagtttattttcttgctttttttttctttttttttccctgagagaaattttaaaatttttaaaattttcttcaaggctctaatttttctctcagcacagtctttgagttgtaggtctttttgctgtctagtcctaaagaattttgactttgacattctttttagatgtatttttaaaaatacctttaacataaatatgtatagttgctagaaattcgtattttgtttgcttgttaagtccttttaatgattaccatatcactaaactgtggtagtgaattcagactgtagacaaaatttttaattttttgttgagcgttccttcgtggattagggaaatgtcaaattgtttgaaaagtgcttttgtgaaaataattttataatatctctattacagagatatatttcatatatcatacaatttatcaatttaaatggttttgagtataattggtatgtgcacctgtctacctagtcaattttagaacatttctatcaagccaaaaagaagcaccatactctttcactattatcctctgtttcttccccaccttttccctcaccgagaaatgactaatttactttctgtctctatagatttgcttattctggacattttatataaataagatcatataacgtgatattttatgtctggcttttatgactaagtgtaagtgttcaaagtgttcatccatgttgtagcatgtagcaatcaacatcaaatagaagtggtaagatacgacattccttccttgttcctgattttagggagacagcatccagtctttcaccataaagtatgatgttaattacgaactttttgtagatgccctttgtcagatggaggaagttccatagctagtttgtttagtgctttttatcataagaggctgtcagattttatcacatgatttctctgcatcaattgagataatcaatggttttctcctttcttctactaatttggcatattaatttaatggatgttccagtgtttaaaaaaacactgtgtgcctgcgaaaattcccccttggtgatgatatataatcctttttatacaactctggattcagtttttcaatattttgttgaggatttttatgtctatattcataagaaatagtggtctatcaatttctcatgatgtctttggttttggtatcacggaagcaattgcctcatagaatgagttgggaagtgttttccctttttctaaatgttttggaagagtttgttaataattggaattaattcttctttaaatgtttggttaaattcactagtgaatccatctggtcctgtggttatctttgtagagagttctttattactaattcaacctcttttctattggtctgttcagattgtctatttgttatcagtttttgtagtttatgagtttataatgaatttgtccatttcatctaaattatccatttattgacacacaaattatatttctttataatcttttctatttctgtgatgtccttttttatttctgagtctagtattttttgtcttccttcttttttttcttggcaattctagttaaagctttgacaactttgttcatactaacttcattccagtgagatataaaaatgtcactgctatagctctattcacttcctcactttctggggcattatttttatacataaactaatgttaaacatgtaacactacattttaataattattatttttataattttatgtattttaaaggagctgttatgggttgaattatgttcccccaaaagatatgtactaagcctcagaacctcagaatatgaccttatttggaaatgggcttattgtaaacatagttagttaagatgagataattttggagtagggtaggcccttaacccaatatgagtcgtgtctttacaagaagaggagtgagaaagacataaaaaggagaatgccatgtgaagacacagagacacacaaggagaagaaaagcacagggaaggcagactggagtgatgcatctacctggtaaggaatgtcaaagattgctgaacaccagaagctaagagagaagcatggaacagattgtcccccagaaacctgcaggaggactcaaccttgctaccaccttgatttcagacttgtagcctccagagctgtgagaggattagcttacattgtttcaagccacttagttttgtgataatttgttgtggcaaccccagaaaactaatacagaagttaaggaaggaaagaaaaaaagtaagtatatatgtgtagcttttgttatttcagtcttcttatttattatgtctggctctctttatttgcctggatttgagttgctagctggagtcattttctcagccaaatacactttttctctcatccacttgtgctgttattggcatatatttctatatattatagacccctcataacacatcatatacatatacacacatgtatataatttctaacttatgtatataatttatatcatatatacacacatatatagttttatacaattactttgtaaaacagttaagggaataaaagagaagaaatatgcatttatactgtatgttataattacatgattatgtttcctggtggtctgtgctttatcatggggattgaagttactgtctgggataatttgttttcagcctgaagaatttctttagtgttttctgtaaggcagctctgccaataacaaatactctccttttttgcttatctatgagatatttgcctgcattttcaaaaaaaaaaagctctatttgcctgcatttttgaaaaatagctttgctgaatatagggttttttgttgacagttttttttttttttttttttttgcttactttgagcactttgactatattatcctaatgccttctggctctcattgtttgtactgaagtcagtggataatcttataagagtttccttgtgagtttccttgaaggttcccactcagaagctggacgtcctgcttgagatattcttgaaagaatatctcaaatggaaaacttaatattttacagtgcttaaattgttatctatagagcagttaaggggaacgataatcttataacaggatctgcatgattcttggacagtgattgtttttttttttttctggctgctttcaagatgttctcactgtctttggctttcagcatttttatggtgatgtatctatttgtgaatatctttgcatttatcctatttgaggtccatcgagcttcctagttgtgtagattaatgatttttcatcaaatttggggagttttcagtcattatttcttcaactctttgttctgcttcttttgctctctcctctcctggtaccttcattatatgtatgttaatatgcttaatggtatattaaaggtataaactttctgttaggtactcttctttttttttctctctgctcttcagattgtataatctgtattgggatatctttaaatttgctaattcttctgccagttcaagtcaactgttgagactcaagtgaattttttacttcagttattgtactttttaatgctctacttatccatttggttctatatgcagacagtccctgatttacaatggtttgatttacattttttgactttgtgattagtttatcaggatattaaatgcatttttttatagagacgggttctcattatgttgccaggctggtctcgaatgcctgggctcaagtgatcctcccacctcagcctcccaaagtgcttggattatagatatgagccaccaaacccagcaaaaatacatttttgactcttcatatttttgacttacaatggacttatccattataagccaaggagcatctgtgtgtgtgtgtatgtgtgcgtgtatatatacacatatgtgtgtaatttctatctctttattgacattctacactttatgcaacattgtcatcatacttcctttacttctttagtcatggttccctttacctctttaaacaggtttgtaacagctacttttaatatttgtctgttaaatccaacatctagtcactttcatagccagttttcattgcttgctctggtggatgggtcatatttccctgttctttgtatgctttatatatttttattgttagaaactggtcattttatagtgacaccatacctatgaactttatagagttaatcaaggagcaagagaggggcagatgggaaactaaccaaacctgcagcacactcagcattgatcattagatcagctactctcagacctgcttcctcaaagtttttagctacctactgtccaagaatcatgcagatcctgttataagattatcattcctcatggcgtgaaccccggggggcggagcctgcagtgagccgagatcgcgccactgcactccagcctgggcaacagcgagactccgtctcaaaaaaaaaaaaaagattatcattccttttaactgctctatagataacaacttaagcactgtgaaacattaggtttcccatttgagatattctttcaagaatatctcaagaagcaggacatccagcttctgagcaggaaccttcataatgccagcaacaaaagagaaaattaaatatgagtgatgttgagaaaggcaataagatttttgttcagaagtktgcccagtgccataccgtggaaaagggaggcaagcgcaagactgagacaaatctccatggcctctttgggcagaatacaggtcaggctgttggattctcttacatggaccccaataagaacaaaggcatcacttggggagagggtatactgatggagtatttggagaatcccaagaagtgcatccttggaacaaaaatgatctttgccagcattaagaagaaggcagaaaaggcaggcttgatagctagtaatgagtaataattggccactgttttattacaaaacaaaaatgtgtaatgattttgttttatgtaccataatttaatagatctcatacaccagaattcagatcgtgaatgactgacagaatatttttgttgggcggtcctgatttagccaagactggcttgtggttaaagactggcttgtggttaaatgaacatgttcagttttttttttttattttaatggtaactctgattcagtaaaagctatcactgtttaccccttctaaagatatgattgggcttcattagtaatgtttaacttttcataaagatggtgaatgccatcttaaaatctattggagattggttttatatttaggtttatataaccggttatgtgaatatatttaaatactgaggaaattccttcactgtctcacaaccaagtaagatgcacctgtgttttgtttccatttgcctcttaaaggcaagagctgaagataaggtaggaatgtctactttatatttttggccttaactgtgccgatctgattacaactccctgtatctaaaatggttcctttgacctattgaaaggcattgtagtgtggtttgtgtgtaatatcgaataaagatcatttaatacttcttacatttataaaatgtgatgatctataaggtcagatgctttaaaaatagtagcaagttaagcatcactttaaaattctttactatctaagttagactaagttataatttaggattgtttagtcattcagaaacataaaactgtagaactgttctgtatttgtgattaggaatggtgcttttgccaacttaaaggattaaagtagaggagatatacgcaaatttaaaaattatgtgtaatcaatcataagacttaagataattacaatcacagatcatgaaaaaaaaaaaagagagattcttttaggtcctgcatactaatgaaacagctgatgcaagctggtcttcaggaccccaacaagaagctgattcaccaaagaatgcagtttccagatcctggtgatttcatcccctttaccctgaccaatcaatgacctcaattttccagcccctgcccttcataatccccttaaaaatcccagaccagaactcctcagggagatggatttgagggtcttctcccatctcctcacttggctgtgcttctatttttaatgtctttctctgctgcaaaccctgctgtctcaatgcacagtgggcatatgaacctattgctcctgtaacagtagaatacattgtagtaactctggctactggtccctcccccacctttggggtttgttattgttatttgcttatttgttagtgactggctggattattaagtcttttttcatcctaccttcccccatctccccttcagtgtcaagcctctcatgtctgatgttgctctgcagagggtatagcctcctgtatgcccacagtgactttgggataacagtaattttggcagtgctcttttttcttgactatacccaggtgttaagcttcagtaattgccagttgatttctttattgttttcaacaaagcctggggcatatattgcttcacaggctaatccaatcaacctgggggtcttttggaaggatagttccctctgcatatgtttgagattttttttttctgactccagaaagtttcttctaagctgtctctttgtgtttttttgtttgttttttgttttttctggaaaatagctagcttgcagtttagcctatatctccaatgaatctattaatctcctcccaactgcctgtcactacaccttgcactgtttgagcttctccacattcttgcaactgcagccagttgcttttttattggatttggaactctgttgtacagcttgcttatctccctgggcaaaatctatgagccactgttcttgtcctgggggtagggacaatggcaagcttctgagtgacatccctgctttaagagctgagcactcactggatggagggaagcagcaccgggtctcctcagcttgccacacaagccagggcaaaggcaattgttaccccaggattctcagtatccttctgcacagggagagccttcatcccatgagtgtgagctggccaaaggaagggagccaacctctctctgttgcactaacctggagcttggccacagcaacaaatatctgggggaaggatgagaaatctcatgccctgcccctcctggaaagatagccctctgactagcagtttgcatgggagagaggaaaaaagagtccctgagttcttggctgtactagtctggagttgagtttccatctagctgagctgggagcaggaagacagtgcaggtcttgttttaaataccacagactcttgcagttcttactgagttttagtaaattttttaaaatttgaactgtaaaaaaatttttaaaaatttattgtgtatctctagaaatattttcataaaactttaaatgattgtgtattttgtgcatgtgtgttattgttttgttttctaatttaaatacacaaacgtaaaaatcaagtgtgtttctttaggtttacttgatagagatttctgtatattgtatatttcagaggattatataactgtacatgaaaacatagaacttcacaggttttgttacttgaagtagaagaaacgttcacaggaagtttaaaacaaacaaacaaaacaaatcctgtgaccttcagagccctaaacaattattgaaaggcaaactagggaacaatggctggtatcgcttaactaggcccacattttagcaacattcaggcccctcccataatcctaatcttgtggtctttcataggtcttacaaaagtgacttcagtcctgagcaaggagggggatagcaaggaagggactgttaccatctttgttttaaagctaacaaaggcagttagcttgtgaggtttagaaacaagatgttatcagttaggttagatttctaatttttgcaaaggcagtttcagttcagtgttctaagattcacccattttttttgaattaatgtgtcctgaattgttgcaaccctttggttaatttgcagagctctaaaaacattgattctgacaattctttttgccagttttttttaattgcttttatgaaggagataattttcaaaggtccttactgtgatattttctgtgatatcacccttttattgtttaatgactgcagaattgtagtaatagaccttatttcattcctgatattgatgatttgtatcttctatatttttattgttatcagtcttgctaaagttttattaatattaatttttttcaaagctttttgtttcattgattttctctattagtgtcttattttcaattttatttttctctcatctttatttttgtcttttttctttggaatatttttgctcttcttctacttgatcagatattaatatagcctactttttaaaaaactttttttttttgagatggagtctgactctgtcacccaggctggagtacactggcgcaacctcagctccctgcaacctccgcctccctgcaacctctgccttccaggttcaagagactctcctgcctcagcctcccaaatagctggggttacaggtgtccaccatgatgcctggctaatttttgtgtttttagtagagacagggtttcaccatgttggtcaggctggtctcaatctcctgagctcaggcgatccacttgtctcagcctcccaaagtgctgggattacaggtgtgagccaccatgcctggccttagatgttggctgggcgtggtggtgggcgcctgaagtcccagctacttggaaggctgaggcaggagaatggcatgaacccgagaggcggagcttgcagtgagcagagatcactacagccagggtgacagagcgagactccgtctcaaaaaataaataaataaataaataaataaataaataaataaataaatgcactttaataattttaacttaatgtcaggaatgaaatagatatcacaataaatttaaatttttaacaattttagctattagacttttaattttaaaattcatgtttgcatggtatatctttctgtatcattttttttatgtatttatttttttgagatggaatctcgctctgttgcccaggctggagtgcagtggcatggtctcagctcactgcaacttccacctccgggtttgaggtgattcttctgcctcagccaacctgcctaatgtcactgaattttaaacagcagataattagttttttttaatacatatttggttagtttctgtgttgtaggaagtcagggaccccgaatggagggaccggtttaccaggacccatgtctgccagtaaccataaagttgactgtttggtctcttttgcaacccaagaagctcaggagttccataatctcactcatgtcaatgctgctggattaaaagataaatttgctcttacctggaaacaggctaagtttattgttcacagctgccttcagtgtcaagtctttgtacttctaaaccaggaacctggcgttaatcccagaggcctaattcctaatgctttatggcaaatggatgtgactcatgtgagctcctttggcagactgtcatatgtgcatgtttctgtagacaccttctcaggttttaactgggctacttgccaaacaggggaaggcacggcccatgttacaaaacatctgtattcttgctttgcagttatggggctttcatatcaaattaagacagacaacgcccctggatgtgttagtaaggcttttgatttatttatgcaacagtggggaatttcccatattactggaatcccttacaatcctcagggacaggctgtggtggaacgggccaatcacactttaaaagcccaattgtccaaatagtctgaccaacaaaaacataatttaactaccccccactcccaattacatttggcattgtttactttaaattttttaaatgtccctaagaataataatctaactgcagccaaacgccattatacaggcaaaaaattctccctaaacgaaggcaagccagtgttatggaaaaactcccaaagtaatacttgggaacctggcacaattataatgtggggaagaggatatgcttgtatttcaccaggagatcatcaatcccctgtctgggtacccaccaggagactcaagcttcgggtgaatactgacaatgaaaaccacagggaaaagacgtctgtgtcagagaccgccctcagacgtggtgagatctgtgccgactcctcagaagcaggcacaccaaatcacaatgggtctgattcaaccctccctaatggcaatggagacccatctaactaatcccacttctcctgattacctttctttttctccttacaaacctaaaaatctcactatttctattagcctgaaaataacatccctctgttctcttcctccttcagcactgaatctcgcttacagtaggttttatttaatgattctcctccttatactttctgtctcaccagtttcctctcacactgatttacctgctacacataattattcttatgtgccttttcctccacttattcgacctcttacctggatagatgctcctgcagaaatctacactaataatagtgtgtggatgcctggagctatagatgaccattgccctgctcaaccaggagaagaaggcactgcatttaatgttaccatgggttataaatatcctcctctgtgcctcggacatgcacctgattgtatccatctagaaactcaaatctgggctgcttatcttccagagagatcagctacagaggaaccgggacatttggtctctggcctctccctttctcctttaaaacaaatgaaagggggagtaattggagataccccatactttcaatataaacctgcaggaaaaccatgccctaaaaattttgagggcccatctaaaagtttaatttgggaagactgtgttatctcacatgcagtaatattaaaaaatgactcata

SEQ ID NO: 93528 - DNA, 101366 bp, Homo sapiens
  misc_feature (1)...(101366): n = A,T,C or G
ggctctaagttgcgatttatggcaataacctctgtgaaaaagcgcatgcatatttcactgttattcctaatccagactgcttcctttgtattctgggcctagaaaaagactgttagggctgtggtacctctttcagaattctataggaaacaaaaatgtaaaggaacaccactgcttagacagaatacaaatcaagcctgtgtgaagatgggcacaatttctgtgctattcaactcaactaacaggtggcagatctgggttcctggcctcatggaacacaggctgtttctattaccggtcttgatccagtatattgcaactaaaagctgaaatagtcacctctttcctcctgtgactgaacctactataaaatcacctgttatcattgactgagctgctttttctctcaacaccttacacctctctttaagccgcattgtttttccaggtgtatgctattaatattcccctaagtacagagatggaaactgagattagagaagttaaatcctcagctcacaggtaataggtggcaaaactcactttactacaaggaaccatgtataacgggtttgagattcagacactttcatcccatttccagtatctttacattaacaccacctctggatactattaattttccttttatggtacaaacatgttcctggctctctcctctaccctgcatttctcagtggattttactgggggcgtgtaaatattcagaaaaaatctgagtgactctgactacatcagaagaataatcatttatacaatctaattttcctctcaattagttggtcaaaataaatacatatactgtgtgacataatttggctgtgtccccacccaaatcttatctcaaattgtcttgaactcctgggctcaaacgatcctcccatcttggcctcccaaagtgctgggattacagcatgagccaccatgcttggcctcttcagagaccttttaatcaactgaaacttttaattttctttacttttaaaattcatttctatatattttttaaaaacttagagacagtagagacagggtctcactgttgcctgagtggaagtggtgcaattatggctcactaaagccctgaactcctgggctcaagcgatcctcccacctctgcctcctgaggaactgggacaacaggtgtgcaccaccattgctggctaattaaaaaaaaaattgtagagacagcgtatttctatgttgctcaggctggtcttgaactcctggcctcaagcaatcctccagcctcagcttcccaaagcactgggattacaggtgtgagacactgtgcccagccagaagcttttaattttaacaaagtcaagtacatttgttttgtctttctttttattttctgtttaagaaacatttgcctacttgaggttcatagaataattcatcctatggtttctttcagatgatttattgtttcagttgtcacatttacatatttgtgccatctcaaatgaatttttgtatatggtacaaaccagtggggtggggcggtggggggattgtactcatttattttccagtgctattcgttttgctctggcactgtttgttgagcaaatcaccctttcccacacagattgcagtggctcctttcttgcaagtgaagaaatcatatgtttgagtctctttttggactttgttttgttgctctgtttgtttatacttgtgtgtatacctcattttcttaattactgtggctttgtggtaagccttcacttctggtggcataattcttccacatttattcgtttcaaaaattgtcttgactatcctacatcctttgcatttccattccaattttagaaccaagttgtcaattaccacacacacacacacacacacacacacacaagtctgaagagattttaaattggattactaatggctaatccccaaacttaatacagctcttcgtttatttaggtctttactttctcttggcgatgatatgtacttttcagtttagatgtcttgtacaactttgttagaattattacaaggtaatcaatttctttctttgaaggtattataaatggtatttaattaattttcaaattgtttgttactaatatatacaaacacaattggttttcctatattgacctggtatccagcaatctgaataaattcacttattaactcttatactttgtatattcttttggatatttttccacattatctacacatagagtttagttcttgttttcaattgttattcccctcccttcccctcccctcccctccccttccctttccttcccttccctctttctttctctatttcttgcgttgcactggttaagacttctagtactgtactgataaatattagtagtgattgttgacaatctcattttggttgtaacttaagtgggaaaatattcactatttcatcattacacatgatgttgcttaaagatgttctcatctatttttaacttgttgagaattttttaaatcatgtattggtgtagaattgtataagtctttttctctatctattgagatggccttctgagtttccttctgaatattgaagtgcatggaatggcaaagtacattgactgatttttaaatccttgcatttctaggacaaacattatttggtagtgatgtactaaacttttaatatatcattgatttagttagataatctattttagaattattttatctatgttcatgacagggcttagcctgcaattttccttgcttgcaacatatttatcagagtttggtgtctgagtatgctggcttcataaaacaaattgggagaattttcatctcttctacttataaagaggtttgtaaaagaatagtatcatttctatcttaaatatttcaaaggaatcacaagttctctgggcttgacgatttctttgcagggagcttttaaattgcatattaattttctgtaataaacacaaaatattcgtatttattgatgagtttatcaatgttattaatcttttcagggtaccaatttgactttgctgtttctctctattgtgttgtatttctactttctgtcttatttctgcactcatctttataatcttttccttacttttttggggtttaatttgcttttgtttctataacttcttgagttggaggcttagtttattgatttcaaaactttttctctttactaagatttgcagctaaagctgtaaatgtctatgtaaggattatcttcattgcattccatgaatgtttatttctcaattttcattttcattcagttcgaatgatttcctaatatttattgtaattttttatttgacttacctgtgttatttcaaaatatgttgtttactttccaaatatttgggaatttttaagttattctgtttttaatttctagtttaattgtaatgtcatcatactttatgtctcagaatgtgctcagtttaggtaagtattctatgtgtacttgaaaactatttgaattctgcagttgttggctgtaattttctgtatttgtcaattagatcaatgtagctagtggaggtgttcagacttcctgcattcctactgagtgttttgtctgcttattctgctggttattgagaggggggatgtgctaaaatctccaatgatgagagtagatttaaattctatcaatttttctttataatttttaaaactatgttttttagatgtgcaaaaatttgggattgttatgtcctcctgttgaattgatcttttagcttatgaaatatccttccttttctctcatagtatttttttcttaactatccttaaagaaatataatttgtgtgatagtaatacagcgatatcagctttcttccactgtttgcccagtatactttccccttcttttcctttttaacctatccacttctttatgtttaaagtgtgtctcttgtaaatagtatacgataggtcttttattatctagtctaataatctttgcttttaatcatagcattaaggccgcatgcatttaatgcaattactaatatagttgggttaaatttcataatgttgcttcttgtttcccatttattctacttgttctttgttcttttctccatttaacattgtatcacagtatgctccaggtttctacatcacagtatgctccattcacaacttactgaaccattagctgtcatttggtttttccagtgtttttgctattacagataatgctgcactgaacgttgtatatgcaaaactttctcatttagatattatttcattagggcatattttcaaatgaagaattactgattcaaagagtagaaatatctttacaattcttgatacaatttgccaccttacttttcctaaaaaattattccagttcacaaggctattagcactatatagctgtagtgctttcattgcagtcttactagcattgtgagtttgttttttaatttaaaaacattgtatagaagagaactgaaggggtaccagaattatgattttcattgccattactgtatacaaataaacagaaaaagagaaagttatttatgaatgagctcatttcatgtacaagctagactaaaattccaaattgtcctgcttctatttttgcacacattttgactttggcagtaagcttctgtaaataactcggtaaaagaatgtatatttatgacataatatataaagtggcatatacattttacttggtcctaataaaactataattcacaaataaaactaaagcaggtttatagaatcagagggaacagaaagagaaagaggagaaccaatagaaaacatgcttaaaagcagggtgaatgcatatttctaacttaaaccttatttgaataatctcaaaatagagtggctgcctcattgaacttaatgaacttttttctcaggtggatgatagtgttgagggtcagtggaaaaaatcttaagccaagagatgttttatagcatgatctaaactggcataaaatgcaggatgttcccgcatcaaaagtgctctagacacttagtaaaaactaagtttctaaacattatagtcctgtgatctggacctgaaaattcagagttcagtcatatttttaaaaagcacaaaaacaacaatagcagaacctaaaataatagtatagtagagatattattcataatcagcatccctcaggggcttcaaaatgcactgaaaatttagcttttcaaatttaaaaaacaatgctatgaaacatcactgtacaagttgggaactaggaattggccttcaataagcaaatctattgtttggcaatttttccttctagaatcaaatctcaaatctttattcagtttatgacaaatattgactaacctactagtgagagtccaaatattttagcatattactatcagggtaaataaatataagctgctttttgaaagtctttcatatccacgagtaattccttaatttacatcaacatactgttttagaaaatagtacatttattcatactttccgtcgtcctcaatcatgttattataagacaaagctgaatggataaagctagatgtatgagtgtagatcacatctgtcatgattttatcatcttcctacaataaattcatattgtaggaattttaaaatattaggtattttaaacataacaatgtttaaaataactaatgcctaaagaaaataaatctgcctcaaaacatgaagtattttataaaaatctgaggtgactcttatgaatatatagaagcaaataaatctgccctttccatactctttctgtttaatgttttagttccatataccagggtagtaaaataagtccttcttttttgatttgatcagtggacagctgcaagcagtcaacttgatttaaccacctataaccagatttgtctcccagccaacattctttcatctcaagtttggtttattgaaagaaaataatatgtttatgtgaagaaaagaaaaatagagcgatcttttaaatttattctccaggaggtgtttggttaccgggaccacaatgtacggaaagccttctgccttgtcgcatccgtgctgacctgtgggggccttctgctggtgttctactggagaccccagtggagagtgtgggccaactgcatcccatgccccttgcaagaagcagacactgttttgctgaggacaacagtgcgtgcctttctgttttctattttgaawgycatgatcgtgtcttctgtattgcctctgtggcayaactctgtggctggtattatatttcagaaggtagatttcctctatttaaagagtttccatagatcaaaacaggagaaaayayggcaaaattacctctgcaatccatttgctatctctcattttgacccaggaaggaagagcatttcttctgcttcagcttggggaaatttcgaccccatcaggytaacagggagtgctcttagccattacatgagcagtggctgtcagtgttacagcgtttagagaccataacatgggaatggtcattcagtttttcaaaaatatgtattttggaggatattacacattttaarcacctagatgtcactttaatatagctagaaactattttctggatagaaagctttcctgaaaagtattatctttctttttattttctagcacagtggttatcaaatttcagtgcatatcagaatcatctggagggctcattgaaacaaggaygctggccccacccagagtttttaattcagtaggtctgaagtggggctgagaatttgcatttctactaagttctgagataaagctgatgcgcttgtttgggtcaaagttttgtaccacttggtaggtatttggttgattgagcaccttactgaataacayttgagaatttcatgaactggattgtcttttccaggacgaatttcaaagatatatgaggaagaaggtattctgcctctacttatmcacactgaagtttcctgtaagcaagaagtgggaagaatccctggtggctgaccgccactctgtcataaaccaagccttaataaagccagaattaaaagtaagttacttgaagggtatggtgttatgcatgtttacagagaaagcataaaataactgtttattaaatgaaagttccgaatatcacacttttggaatgggaatgacagctatgtatcaaagaaagtgagactggctgggcatggtcgttcacgtctgtaatcccggcacttttgggaggccaatgtgggcggatcccttgagcccaggagtttgagaccagcctgggaaacatggcaaaacctcatctctattaaaaaaataaaaacaaaaaatkagctgagtgtggtggtgcttgcctgtagtcccagctactcaggaggttgaggcaggaggatcgattgaacctgggaggtcaaggctacagtgagtggtcatcacgccactgcactccagcctgggtgacagagtgagaccctgtctcaaagaaagaaagaaagaaagaaagaaagaaagaaagaaagaaagaaagaaggaaagcaagtgagacccacaaggggatctgcatcctgcattggacaccactccctctcccagtgagctttatgctgtgaatgacacctgctctatcacatttgcaatcgtagctgcggtgcatgsaagtgcagaaaatcaggtatgtttggaacgacctggagaagcggtttcagaaagttgggtaagtacaatrttttgtcaccccttggtcaggatataggggaaaaacactgatttgttgagtgctatgaactgaagtgtggttcctatcctgaatacatcctaggttgctagaagacagcaattcctgctctgacatccatcagacatttggattgggtctgaccagtgaagagcaagaggtcaggtaggacttattatatgccttaagagtaaactctgccagcagaaaatgaagtatcaaatcagttatcatcagtgcattgttggcataatgcttcatcagcttgttatagtccaagttcatttactggcagcggagatatcctaaattgttcttttcttaggcaaacttatttttacaaagaccaaaagaacaatgcaatcatataaaatttgatcttttatctcaggcttgtagagcaatcatctttgtgttgtttttttatttttcctttcttaaaaaaatcttgagtcattccctaaatgtcagcttagtaatcttccaaatcctgggagagacagaatgacaatactttgattgcattttattctgaagaaacagccctggagatgaggattttgcttgctcggttagttgtgttattcaccactatatctgcagtacctagaacagtgcctgattctttggtaggagctcaatacataattctagagtaaatgagtaagttaatatattcattgatttgttaaataacaaataggtactttgcaaggaactaaggatctaaagacaaaggtttagtcattgtcccagagacacggactagtcagaaagagaggcataaatggtggcacaatcatgagattggtmcctatagatgcacataaattaggaaatgcttatgctattattaactcacagagatacagagtccctgctttcttcagctattatttgaaatgatgaaycctggcaaatctgaaaggaaatcattacaagtcttccccagaatcttataatcacctttatttctcacccatttttagagagagtgtctgcttaacctttacagtcggccagaaacacctattctcaagctaagaagtaatcagatactttaaaatataggttttaagctccaccctcataattctgataattctgtaggagcaaggggtacttagaagatacccatttttagcaagcaacccccataattctcacacacaccaagtctaagagttactgatctgttgtttataagtttttcctctrtcagacactgtgaaaaatgaaccagacatctggactaggacaatattgcaaaatgccttagaaatggtattattatgtaagatttcagatgtaatgctcaaaacattgwcacaaaaaagtttttagagttattaaaatatattggtttaatagcactaaatacaaggcatgtaaaggatttatctaggacatttaagaattctagttgatagatgtagacacactctgcctaggtaaccacttccacaggaaagatttcctgtcagtgcagctacctcatgtttttttcttatttatcaagcaccaaacttcagtaaacattgtacataatcaaatttaaatctgatccatgactgggcgcagtggctcacacctgtaatcccagcactttgggaggccaaggcgggtggwtcacctgaggtcaagagttcaagaccagcctggccaacatggtgaaactccgtctttactaaaaatacaaaagttagccaggcgtggtggcctgtacctgtagtcccagctactcaggaggctgaggcaggagaattgcttggacccgggaggcggaggttgcagagagctgagatcatgccactgtactttagcctgggcaacagagtgagactccgtcacaaaaaaaaatctgatccacacaatatagaacttgacaatctaataagcaagacaaagagtatcattttccaaatatgaagaatggagcagataatctacttataaacatggtcatatttatgttatttggggagtgaaaagagaataagtagaatatggaagattttttcatttcattttttagggtaagaccaaggcctttaaaaaactaagtgtgatggatggttgagtaatatcttaccaatttcctagtgaatttgagcttgctttcattaaaaagcaagtgcataagatgagaaatgaacggggatacacaagaatctctgatgatgaaaagctatagagtttacatgcaaactttttctatgggctccctagcagctgggtagagagagaaaatgcagatttacatagttctcacttttcagtagcgaaagcatatccaaacatcaggagaaataactttaccccggagagaaattgtgagaagggatcagaaagagagcaagtaaattgtcccaggagttccatgttccttagcttcacccgtcatgaactgaactcaaacttccatattagtgcctgtcctaggcaggtcaaaagacattcaaggtaattcttttatatcacaaaagtgagcccataagggaaaaataaaaataaaaaacctacctgattcctcaactagtcaagtagtcttcctattaagattatttatcagttgagcatctcttcaccttatttttcactcagcccacccaccctgcttctgtcccttttgtttaggctgcagaaaataaaaggartaaatgacttcctggcagcagaaatggaaggaccctctcccagcccccctgcaccaccaccaccaccaccacacacacacacacatgmacacacacacacttgaggttaagtccagaccaatcaccttgctggtgacctagctctcaggaagaaaaaaagctytgatagacagggtttgctggtttctatggtwggaatattccatccatggccarcttaagccaccaaggtgacatcactgaatgcaaagctgggaagagaggctccccgttgatttagtgattctgcaaggccaaatttaattctcaatgtttaccacagcattgagagaaaaggcatgcttgtcagcaccagaggaaaggaatccgagtgacagacagcaagagaaggtaggtttgccattaatgcatagctccaagctgacagaaactgttccatgagaacacagaacatcagaaaagagagaaagaagaagcaaaaagaaggtgagagagagagagagaaggacagagagaggctgctgtgagaccctactctcttactcctcagtcttggggaaaggaaaatttagaaaccatgcttatataccgtgacctctatcccctttgaaaccacctctagaaaagagccctgtagtagatactcagccatcagatcagcatttacagaaggatcaaggaagggctggttggaggagaggaaaggggctttgctcattcttctggaagccaataacrtagtctcaactattagaattcaattagaagttaacragttacttaaaaatgtaacatatatatatatatcctttctttaaaatttaatgcataagctatttaataaaaattaaatgaactgagatcattttcttttttaataaagtggaattatcagatccacggttctatggatcttggcccatttaaagtataaaaccacttaactctactgccttatttagagcaaagccctacagagggaccaggaaagctaagtccagaatctccctggcaggatcctgcactcggtttctttgtaccccatctccattcctgatgtcctcctggtccattcccttctgcatccctatgcctgggaatgctcaaggcctttccccagaaaagctgactggaagcgcctcacttagctcacatggagggcttgaartcctctaagagcccaacttctcgagttttcctgaggctatctgaaaacatgcaatttaggcaatgaaagaaatgggcaggtcacasatgaggacaaatgtaaaaaactaaaataactttcatgtcatttgtagaatggagatacattctctgtgtaagtgtttcattaaagtacacaagcaggttcaagctgtaatgaaatagagatgttttccttccataaagcaatttctcaaaatataccaatcttgtttttattattgtttttaatggaagggctcgaaggccagcactcttgttgtgctatacaaccacatccaaatcccagaagttggatgccatgtcctgtgcatctgtgaatatcttaggtcttcctccctttataaaacaagagtgttagggaagtcaggaacttgctaacagaatcacatgggaactttctcaacctctacatgtctgcttcctaaaaattcctaagttcctggaagtgggttatgccagaatctcctggcttgacattgtatgtatggaaaactatagacgtccctgcctgccagagactctgttggaaacttatcagaatggaagcagtgagcaaaaaataggtgtagtttgaaaaactccaccataattctaacatgcccttccttcctccttgaggactccttcagtctttaccacctggagcctaaaatggctaccacacgacacattattaacaattattggtaagttaattgaatgaatgaatgaatgaataacaaatgaaaagggacatggacctcctccaagagaaagtcctcctagtcatctgcattttgttttctcagaaataaataaattctaacagatttactgatatctcagggttggaggaaacctcaatgattccccaagtttagcccatggtccctgcagaaatcccctccacaggtttcctgctgagaaattgttcaacttctggagagggaccatctacctccaaagcaactcttcttctaatgcatagttggaactattaggcaggtctgcttaattttatttagcctacgttgttctgtgaagctgctggaacaatctggggcctgttttccctgccagctggtcagaatgtcagctcccttgtttcttagacctttcctcatgtgaaccagcttcaaatcttatatttcttcccattgctcagccattagtcaacacccctgaatattctgcttggcttgtgctgaaactgagatgggtacatgatctctaaacacacaatattttttggcaagaagcagtagaagagacacagcagcaaggggcatgccaggctgtgatttcaatacagttcagatgaaccgtaaagaggatgatctacaggcaaatattgatcaactggatccccgtcctcatgggatctcttctctcttaatggtaatattgccaaacttggagagccaaagagcatgagactctaggcttgctttctaaactgctttccataccccatgtactgccttgaacctcattaattcattctactatttagggaatatcctctaggtcagacactgcgcccctagtgctagatttttagacaggatttaaaaatctctgtttctgggctgggcatggtggctcatgcctgtaatcccagcattttgggaagccgagtcaggtggatcacgaggtcaggggtttgagaccagcctggccaacatggtgaaaccccgtgtctactaaaaatacaaaaattagccaggtgtggtagtgtgggcctgtaatcccagctactcaggaggctgaggcaggagaatcgcttgaaactgggaggcggaagttgaagtgagcctagactgtgccaatgcactccagcctgggcgacagagcaagacactccgtctcaaaaaagaaaaagaaaaaaaaatctgtttctgcctttaaagggactctaggaaactagagggaaaagacatttaagtatacattatactttaatgatgtaagtgctgttgctaagaaaagaaaggttgttggaagggagaaaaatagagttaattgtgccagagggagtaagacttcaaagatagctgccatttattgagaactaaatgctttatgtatttttctcatatgctactggtagcattttttttttaaattagagtctccctttgttgcccaggctggtctcaaactcctgaggtcaagcagtcctcctgcctcagcctcccaagtagctgggactacaggtgtgtgccacacacccagcttgatagcaattttattaggtatgttttataaaaccccttttacagatgagaagagtgaggctgacccctcattcagccatcaattcgttcattcagcatataataggctctgttttaggcattcggaatgtatcgatgtcctctggaagcttacattatagtggaagatacagtcttttttttttttgcaaacttattaaaatgtgaaacataacgtgtamtttcaggtaattatatgcactataatgaaaaatatggcaggataaggagatgaagagaatctgaattaagagtcagggtagctatttcaaggagcattgttagggaaagcccagtaaggaggtgctacttgaacagagaaagaatgaaattcattcacaaagggaacgcccttgtttcattgagggactgagcgggtagacatacgaagttgtggaggaaattagttccagttggagggaacagcaagcacaaggtcttagctgtgttcaaatccaggcctctctgctcccacatttctcaaccattaagcttgattgtcggatctggctctccgaggctgagtaggcatttacaaactgaagaatgtgggaagggcattcaaagcggagagagggagagagaatggaggaccgagtttggggtcctaagttctgacactttgcttaacaacagattattgccccagattgtgtaaaagagtcctgagtactgaaatggtttgagttatgggctctttccagcgggaggtttasggacttaagaagtcaaagagcgtgatgggctgtttgccctctctgattcccaacatccttgaacctcagtgttttcatggcatggagtcagaagacctcggtttgagtcctctctgttctttgcaaactacaattatacttggaaagaaatatggctaagaagtcagataaacttgggctcagctctctgttatacctcagtgagaccaaagatctctcatgcagattctccccattggtcctttctgaggcagatttgtgaagtggagtcatagacaatgctacaaagcctgcctctttctagctttgcgatcctggaaaagtttcttggtttatcggagcttgagtttctattacaataagtgctaataatatgaaatctcatgggaataatgtgatgattgaaggagttaatgcatataaaaaggctaagtgcagtttctgacactgtcaactctgtttaaaagttacattgtaggccgggcgtgctggctcacgcttgtaatctcagcactttgggaggctgargcgggtggatcacctgaggtcaggggttcgagacgagcctgaccaagatggagaaaccccgtctgtactaaaaatacaaaattagcctggcatgatggtgcatgcctgtaatcccagctactcgggaggcagaggcaggagaatcgcttgaacctgggaggcggaggttgcggtgaaccgagatcgtgccattgcattccagcctgggcaacaagagtgaaactccatctcaaaaaaaaagttacattgttgtgattcatactagatgtgtgcaattttggctacatgccgcactgaataatttcttccattggcaaaatagaggtattagccctttcctttggactattgtgaggatcaaatgaatctttgtaaaaactttgttaatggtaaaatagtatagaaatatgcattcttgttgtaatgcacatatgtattacaccttgtgtataatrtacacgtttaccaagtgttagccatgaaggccatatcttccagttcatttgctygttcattcagttcatatactaatatgtattcattcggttcgtatactaagggccctgtcctaggtgctggaggtaccaaagtaagatagatatgacttctarcatcaagggcaatctagaatgcctgacaagtctaggaacatctgcatagctgtgtctttttcgttgcttttagtatataataaaattattttaaaagtaamtcaaaatgaaagtgtctttccaactttttttttgagttgtactacatttaagatatatttgtatcgaggactacagctctgtccatcatacactgactttcatttcaaaaatagtagtttagaattacgtttcaaaagaacttgcacattattttttaatcaaagtcacaaaatctccaaagagtagaaaaatgacttctgtttagtttggcctgtagtcacttatcatgtgcttgtagctatgacactaatggatgatcaatttcccgcagaagattagtgtgtgggcccaacgccattgaggttgaaatccaacccatatggaagctgcttgttaaacaggtaactgttttcttttcttttttttttgaaaaaatagatttctgccccttacttcttacttcctagaaggaacacataaatactttgatgtgaatgatatcttgtttcatgcgacttctttttgttactgcttattttaaactcaggtttactttaaaattcctttccagtgtgagacagattcctgcytcataatctcctgkttgttttgttttgttctctttagtttggatggtggttttggtggtggtggtggtggtggggtggttagtccactgggttgctataacaaaatgtcatgcattgggtggtttaaacaacaaacacttattttcccacagttttagaggctgggaagtccaagatcaaggtgcttgcatattcagttcccggtgaggacccatttctgggcgtgcagactactgtgttctttatgtcttcacatggtggagagagaggtctggtctcttcctcttcctacaaggacactaatcccatcgtgggatctctaccttcatgacctcatctaaacctaattgcctcccaagggacccatctccaaataccatcacaytgggggttagggcttcaacctatgaatttagaggrgacacaaatgttcagtccacagcatggggcaatgttattatttctataattattgaggatttgaaatgtattcttttggtctttttcaaatggctttattattttcattttcttgagagtaacttctccctttgttagtgttttatttttgtttttgtttttaaaaataywttccttgtgtgcttggattttttttttttaaygcttaccttaagtgggacactttccccatcaatttttctytttctctctgtgctttctgtgcttctttgatggctttgtttgcctccagttggcccctatgtggtccctgaaggtttgggtgcttgtccttcagggatttgtcacatgcatgcccttagccagcttgaggcttagcccagttcacagttgtcccatggacactcctctcccattccacccttgggtggaaagccttcattggttatgactttgctcaacctctattctggaacaggaagcccatggccacccttgttttccaccatatgcctcatttctatcctcagccacctaagggacacgttctgtctctattcctccgagaaargrgctcctagattttgctgtctagtccttgtctggaacccatgaatctgatgatgtgagcccycactcaatggtgcatgtttccagtctatttctaacccataaagatggtcattttgttttggaacatggacatatctttttaatattaaaaaattatttaccattattctgtgtctgaagcagaaaacaggttgctttttttaactttattttttagactagttttcggttcayagcaaaattgggtggaacatacaaagatttcccatatacgtcctgcctccacatatgcatagcttccctaactatcaaaaagtaggcagctttttaaacgtcaagtacgttttcaaattgccaaatattctccaggggtcaatgtgttctaatttgaaaggagtgctagtattttctggcacctatttactagccctttagtagaaagaaaaaaaaaaccaagtacaactatttctytacatttggtttcaaaagaatattaaataagagaactgaattaattagaatagtgttgtttcttctgcaaaaagtatttaaccagtattctactggatttgtttaacttcaagatcatattatcatttgcacataatctacaatcagagcattttataataagcaaacaaaaaagctataatttgcaagtaaagcagttgggattgaaataataagaaacattaaggaacaaaatcttttttaatggacaaaatatatccaacacttaagatacaacgtactaacttatttaccacatgtcagttcacttttaagactaaattagaattgtatttagtacataagggaattatagaaaacagaggtaagagagaatagcactggttttaaccaatatttcatccaattcataatgattagaaagaacactttctcagaaaaataatccttgctttgctctgatgggctctttagttcactttctgcatgtatatcctrtgacttttctctggcttctcaggtttgccctctctgctctcattattagcatgagttagcaggacccaaatgggaaaaattgagggaacaaaaaaagttgaaggtattctcatgcgaccagaaatgtacatgtatgagtgaccagctttcaggttggtaataccttctgctttctgctcmtgatttgctctgcagccttggggaagacatttctctccagtcttyctccttgttcaagagaagaacttggctgactcttatgtgaccttgctaggacctgtgacatgaaagatatgctatttttaaatgacctgaataaaaaagtagaatctttcattttcattgcgcaacttgactaaatctgcagcatgtgattatatgaaaaataaaactgcaattaaactgttccaaatggaagtacgtttttaaaagagactgaatcatgtacctcccccattatgagtcagtctgtttaagaaggtgaattgttaaattttgttattggtaaaatatttttgaaattcaaaatgaataagaatgatcaacttgtgggcatggctctgaatgcataaaataattttgcttccaccatatcacattctatgtgtttgacattttctcaacccaaatcaatagagatstaagtgaattcttaaatattagaggtttgtgtatgttgtaaaaaaatgagaaaaaaattgataatgaaatgacatcttcttgattgctactaaggttcatgcaagtgacccaaatgccatttttgtgcctgcaggttttaaatccattctatgtgttccaagccttcaccctaactttgtggctgtctcaaggttacatagaatactctgtggccatcatcattttgactgttatctccattgtcttaagtgtgtatgatttgcgacaggtaagacctgaaatcacagccagattctatttagcttctagctaaagaagtaaagyccatggtatttccactgagagccaggagttgctttgtcaaccataagtcataaaacaaaaagygagggcttaccaaatatgggatgacagaaggactttggactaccagggagagttaaatgtctttgcaaactctgattatcatctgaagccttcatcgaatgctttgtttagaagcactctgaggctctatttgagtatggtgggaaagaatgctgtgatggattaatgatgccagccatagttttaggagaatgaaggggtagcatctcaactgtgtgcattaatcaagatattatgccccttagaacatttccatctattttccctgacttaaatattgtrtttrttctataggtttcctatttaattgtctttgaaaaattttagtctccctcttagaagtcctttataatgtctatgtgttcatttgatattcgggtatatctttacggaaatcccaaagaaatacagaaattcctgtgtgggagttaggggatgggttgtrgaaaaaattaggtttgattctatactcaataaggcagtgtttcagcaagagaattccttgacatttttgagcttctggcttattaaatcaaaatatccagggttagaatcttcatttttaaaagttttataactaatgattgttatgcattctgaaagcttaagaatgattattataagggaacccactgaaggataaattcaaacacgaaggtcccagatatatgtatttatttattaatgccatcatatttttcattcattttactctattaagtgcatatatatataccagcttatatggagatttatgtctttattaatttttaaaattaaaataagatcttactatgcacattaatctggractttcatttttcactttatatataayggcaattcaccaagtaaataaataattataattcatgtttttaaaataatactataatattccatgatatatcataatttattcaactattcygttacttgttgaaagtaatttcccctcaatcttttgccaccacaaataatgttgaattaaaagttactactacagtatgrgygtgttcttacatattagtgtttgcattttttagcatagcaaccaaaagccaggttactgcatcaaggcatatgtatgttttgaattttaatagatgctgctatattattttccacaaatgaaagaatttttttaaatcagaaacacacaagagtrtttatttcccctggattcatcagtttctggagttatattgatatttacgatttttaaaatctaacgtctttaaaaaaaccggrtctcattgatgttttaaggtacattttcctgattgctggtgagactagacactttttgttgtctaatagtgttttgcattttcattttatattaagggcctctttatattcatcatatatgtgaaaaagttttactttttagtctatttctctagactttgactttagctgtggatgaacatttatatkgagtcaaatatatttctgctttcctttatggtttattgttttgcttataagaactccccttccaaagttaggtaatacctgttttctaatacttgtaatttgcctatttaaaaatccttactggaatttaaacattcaggttccatatcttaacagaatccctacattcctttgttcaaaacagtggctaatatgggaactttagacttggtggcagtattgcaaaagatttctttaaaaaacagaaaaggaattagaggacaaacactaatctcattagcagccagtatttactaataaaagggtacctaacccaacctgtaaagcaccttgtaacactccacaaaatgagccagtttcctgaaactgtgtatttgcaatttaaatcacaagtcctcattcatcarcatctgtttaggactttayggtttacaataggcgcccacattcacaatgtatgtgtttgtatgggacatggcaaattatgaaataaaacatacatgatttttatagcctcctaaccacctgagagggagggacaggggcaatccaggaggtgaagggacttattcacactcacccagtaacagtggccttagccccaggttttctgattccaagtcaagtactacatacacactgtcccattgagcgcaatctcaaagtgactcatgaatttccttgcagcagtaagatttggggaagggctttggcaggactgaaagaaggagcatctactgctatctccaaatcattctgttgagctacattgaagttcattatttcactgaattaaagacttaggtaaacaaacacaggctttggaaaattgtaagagagtaagtgtttgcaggagtagaataagatgtttttctgcatctactggggccccaaatcatgctacacaaagaaagcttacctttcctaagccaagaaaccctcccgcttccgtccctttctaacaagtttggtgcaggcatgagtgcaaaccttggtactcaactgtatttgcattgaactgtatgtgcatactgtattgctgagctccacgggtggctgctagaaatagcattgggagtatctggcccacagtgctttgccttcagtcatgacagagccaagctcaagaggcacctgagttaataccctcattactcatctctagaggaaatccagccacracaaacacaagggcacgtagcaacagatgctgaataataacgatatgcaaattcatcttggaaactgatcctggtcctgctgaacagggacagaagaaactaaaggtggcctaatgaaaatcaggcaacgagctttgcagtcatggcaagcactgcagggtttgccttctcctagctagttggttgccatagaaacccgtgtttgcagattttctgagcgcattaactcaaagaggaggctaacattatcccactccagtgttgttgggagaagtagaataatttggttctaataaatacatatttgacaagggcctactatgtgataggctctagaggaatccacagatacataatgtacatggtgcctttcttctctctactgcctgactcacgagggaggcctgacaagacagcagatagctataatggaatgtgatcagtacactcacacaggtggagagagcagaacaatgaattcttcctgagaattgtagggatttgcagagtggaggtgacatttgagtaggcctttatgagaaggattagaaagagtttgctagtagaaaaccggagtggacgtcctagggactagcttgagcagaggcctggaagcatgacaggttacacagaatgctaagtctaataaaccaatccagctctacagcataatgagttttgagaattacagtcaagtatgattaactcatacttcaccacttccaaatgtgttgattatcatcctcttatgctaagctgaatttggcattatctaaacgagtttctaagcaaaaaaaaaagaaatctaaggaaggatttttatcttcttaaagaaaaaaaatgctatttttaagcactagtagaacatattcctcaacagaaaaggttttagagtcagatgaacctaggtttgatttacctagtaagtaaatgatggtgaaaagattactttaacatttttcaaccccttttttttggkttttacatgtatgttagagataacattttcatcatagaattattttgagaattaaatactgttgttcaagtgcctacaacaatgcctggcacataataactgcttcatgttttaaactatttataaataataaagatttgagccattttatataccatgtgtatttcttctatgatgccttgcaggttttaaatacatctctgacatgcaaaataaatcaatgtcatatcattttagagcttgaaggtataacttgaaagtgatccaattcagtgttgtctgtttacagagaaaacgactaaattctaaggcgcaatttcttacatactcacattacctgactgattagggggtatgcctgacctacgactcagaaatcctgactgactccagggttctttgcccacagaaacacagctgactttcccactattacgcatcatttaaatgcatgccccaacagttaagcctcaggaagtcaccttagagcaatgaatatgcactaaacagtactatcgcttcttccactcaattgatccaaattaccaaagtttaactttccatgcaaaactgaagtatatcataaatttttccatataaatattaacgctgggttcattatgttttcttaaggggaaagttgcctaattatgtgtaatgcttgtcttagcctggtgacatttgtaacattaaatatcaccaacagaacagatcaaaacaatttaacagctaaaagaaaaaaagttttacatwtgaattaggttaaggtgaattaagtattgctgacagtattcaaacccacttccagttagaggcatccaagtcaccgacatccaaacaggaagaggcagtaccttccagggctggcccagcatggaactttctctcgctgatgttgccccaacagtcagtctggggaactgtayggatgaaatcatctctcacctctgcctttctgtcccctgtgttatcctataagatgctttctccacttctccaggctccttccattttctccacttttcacagagtcctaactcaataaacgatctcaagcaagtctttccagttaacgtgctctcacaactgttttcccaacaactttcttatgaatcactaacactcatgagctcttagcatagtattgagtactacacagagggctctataagaataaaataccttaaaacttaaccctattgtattctgttataatctcccctttctgatgagcaaaaaggagttaaacaggctaaataactcataagcagtagcacaagattcacgacttaacagcataactcccatctgcagacttaaccaatatgaaaatccacagttcataaaggagaggatggctgtcccacatgcaatcagaacacaacccaaacattcacagacacttacaagcagaaagccacttacagagaacatttagctttgttgttttacagacaaggagacagaggcatagagagggaagtaacctgctcacagtctcattcttcctcattctgattgtgcatcttcaagaaatgtagctttggtttgttaaagtgaactaaatatggcctgagaaggactctgtacttctatatttgagtccttgtggaccaaccttaacctaacytaatagacaagattgaaaacctaacttatgcgtctgttacaatacctgagtcttggccaatcttcagcgactcatacagcagccatacttccaccactcatacactgctgagtgctcaaacwgttactataaggcaaacaccaacctgtaaccaatccagctgtttctgtacctcacttccgagttctgtagtcatttcccttctttgttccataaatttattctgaccatcaggcatccctggagtctctctgaatctgctgtgattctggtggctgcctgatatgcgaatcactttttttytcttcctcarttaaactcccattaaatttaatttgtctaaagtttcttttaacaggttccttggcttaggtccttgaggcagtgactgtgcattattttttcttgggagtgagatagcattaaactaataagcatatttgctgctgcacatagggggtcaggtgaggtaggggttggagcaaggaagctgaagcatcaaaagaagttgagtcctttgcccagagtcactttagctgtgacagctggcctggtatttactgtaatgagatcatgtggttttcagaacatgaactatctaatgtttaaatgttaacttttacttggtagcaatcagttaagctgcataacctcgtggaggaccacaacaaagtccagrttacaatcattgtaaaagacaaaggtaagtgatgtgttargccatcttcagcatcttaatatttcaggggggaattggtctcatttgtccttaattattagtcaaggagaaataatcttttcagattgaacccagaactgggacgagggtgaggcaaagaagccctctaagatagaaaatttaaagaggcaagatcatgccagtgctgaccccacagctgcagggccctgagaacaagggcctcattgaattttgtacactggacagcttgcttgccttaccctcacccaagccctcattccgtcattcttacccaatgtctgggttccttcaaattccctctccccttcacatgtcactcattygaataacattgggtaaaccttcttaargttcctttatttcccagtctaactatcccaaacagaccctgcatcacacaatttgaactgccatctggaacctgggcctgaatggggcttttagatagctgtctggacacttggcatctgttctgagctagtcagaggtggagtggctgtggctttttgcaaggagcgaggagctgcaccctgggacagcagaagttatttgggcaatttaagtaaggcctcaatccaagaagacaaagtgtaccaaccacaggaatcagaaacccggacgagagcaaacagcaggaagctgcacttctgctttgcccagtgcccttgtgtatctgctgtgggcaaagcacaccaggtactaggatcaagatgggatcctgttgcttagctaatccttttctgagtcccaggaaccaatttcctaatcctgattctttcggaattttcaattgactaaaaaggggcttcaacagttgaacaggtagggtagctcttggccaacaggttgataaggattcttagttgccttcattcttaagtaaaaacaggaaaaggtcagctattcatggaaactttgctttggtgtaggtttggaggagctggaatcccgtctcttggttcccggagacattcttattcttccaggaaaattttcattgccatgtgatgctgttttgattgatggaagctgcgtggtgaatgaaggcatgcttacaggtaggcagttgtcatggagcttcctcttccctgtctgacatctaatcagatcaacatatcctcacctaccttataccagacccttgctaagatattcagagataggtgagggagacacagccagcctttgcatttatatggagacacaatatacacaaacaggaaatgtttaacaatataagaattaagtcacaataaatgtgaaatgaaaacaaatgtttaatatgacatgtgattaattgaccaattagtggggtgaatagggtgctttgggttcagaggaggatgagagcactacacagtttgaagcacaatctcttcataaacatgagaatggtttatacacatgtacaaaagagatgcaaccttaaaaaccatgactcccacaattggaaggccatagaggttttatccaaccctgcactctgtagatagaaaactactgaggccaaggtttcacaggaaaggagtttgagttgaacctccgggcaaagacgatcgcacagttctgttctttagatttatattcctgttgatctcactgagcagaaactaatcttctagttatagttcaggcagtcctagttctcatttgtactttgttaagtctacttgaatttgtttaattagtaagatactacttataaaatattctttaggcaaaaaattaaaatacacagcacattgtaatgagagaagagactatacagcaacacagaaatagaaactttgtcttttatgcttacagactgtttagtttttctgtttccaaatggtataaagacagggaaaatgttttaacatgacctaaatgtagggagagttcattatctatccctaaattgttcaacacaagcagattttacattaaaatgggtctgcttaattcaaaattgagacaagaaaatgtagttaacataaatatgttcagtataattacaaaatactcctttaatgtgttgaaatgtgtcctataatgatagtgatgaggatttgcatactgatcatatcttttacccagaatgttgccatagtatctgacctgtaaacctcaagcccaaggaaaactgtccttctcattcaaacacagcagctgcctcacacctcccagcagcctgacagtgaagaatgacttctctcattggtaacagagagtgtggcagtgagcagacatggggaggaaacacagaaagtctcrctgcccttgggctgccctctctcctttcactgtagcgggtgtatagaacttsccttgattcccaggaaaactcagagagttccagaggaatagaaatgacaaacaacgctgcctttcaacaaatgtgcaaaatggctccaaataaccttaaatgacaagtggcttctagttttcctttttggaaaaacgaactcatcagcactaatatctgtgtaacttaagtaccgatagaggccagtttcagagacagacacatgaagtaaaaatacattatttcttttttgttaacttcttcagaaagatctaaatcccagtctggtctaaatactttattgcwcagcctacatagatcctcccactcatgtacatatttgtggaaaggatcttgattaaacagaggattaaggtaagattcctgaaactgcaaatgtattcctagggaatttgtccacaaatatgatttaggtatttcttccctatgtacgaaatggtcctttgcatagatagaagtctttatttatgtaagaataaaaatatcaaatattcctagcatctctatagcaacttacattttataaataacttttatatctcacttcatcatggtataaaacaaattagactaggagctgttagaataccgatttacaaatgaggagagtgaggtaaaaagaccagagctgctcggctagcaagtgaaaggatcagaattggaggtggcattcgctcccaaatataaaggaccataggcgtgagaaagataattctaagctggaaaaagctgctgacttcatcttcctgcctcatcacctttttctccctacttggtattcccatcaatagtatccactttttggtaagctcttctcctcctgctctccttagccttatgctattgtcataaattcagctgtgcaagaagtttacctttattttataactacacttaatttttatgtcggttccaaattttgccatccttaaaagtgtccagtgtgaatatctaatatgagtcagacagttgtccccatcagttaggtggtcttcctcacccttgtctgactgtcctaagatgtgcaagacatcagggagaggggtctgatggagggcagctcttcttcctgctgctcccactccactctgagctgtctgaggcctatttacctggacagggcrgcagatcctggtgctgttcgcgctgtttccacaaccttgttgcatgttcccgtgttctactgtggtgcacacctcttctctcagggacacaccacatctaagtcccgttggattctcttccaactcccagtacgaggactttgatttagctagaaatgcagtagaggaaaggcatggtgagcagaaaaactttgttcttactctcagatagtctctcaatccatgatcaaactcatgaaggacttcaaaaactcaaaagccagtgatcaactcccccgtccttctcttctgctgtctttcctgaaacaataatcaacttcaagatctagcttctctcaaatgggaggagtctggagacaaaagggaatatcatttgggagggggggggaatatgttaatttagaaattatctcttggcactatagctttttttcttagttctcatatgtattaggcattgtgctaacattttacatatactatttcattcaacctgcaactctattagagtgggcaaatctgaggcccagaaagggtaactaatttgcctaaggtcacacagcttagaagtggcacagctgagatttggatttgtttgtgaattcactcattctacagatatttattagcccctactatggagcaggaactctgcaggtgacatagcagtgaaaaaggcagataagatttctgcccttgtggagctgatattctagtgacagagacagaaaacatgaaagtatacaaatgacacaaattttcaacagttataagttatatgaagaaaacagaagacttctattgtcttaataaataaatttaatgccttaaatacaggcattttgtccccagaacctaggcttgtaatcagtgtttcctcattctcttagggataattatggcgaagaggggtggcatgcactctgccgcaatccccttccctcttcttctcttcattaagctgctgatgtatttgagatgtgtgtggggcgagagtgcagtgacctgagttggacatgcagggattttcctaagtgatgatctcacatcgatatcctgtcagacgagmttatcatcagttgataggtcagatctttttctctcttcctttgatcctttcgtcctctctttttatcatcctccttctccctttccttttacttatttgttcatccatttactcaataaaagctcagaaatgcctaccatgtgccaggtactgtgttgcgtattggtgtcaccaagttaaaagagaaatggtctctggtctcaaaacatttacagtctaatggttctagaactataaattaaaaggacttggaatttcaaacactgtcaccatgaagaggcatcttgatccttgtggacaagggagagaacctccacgtgacagcacagggagccaaatgtacagttgattatgagcaatgatggttctttcctctaaaactctcttcagctgccttggaccccacatcttttgtagatgaatcatcctttcttgggctccccagaaaggccaaaacatgaggcttcttattaatatgcaaatagcataaaagagacttgaaaaccatctctctgtaaaatcatctgactattatctctggaacaaattatctgcaaatgacttccattactgattgatcaatacatgactgcctccagtttcattggttttgtgtgcagaaaacagtttactgatgttagcctaagtatatattgtggattaatattctgwgattcaaaagcaaaaaaaaaggaaatgatctctaagtattcgcctcttacaaaggctgatttcaaaacaatgtagtaccataatttggagatttgtcaaaacattctaacccttctaygaagccatagaatgcaattgatacatctacacaatggatgaatatcataattgttttaaagaaaatggcatagggaacaacacttgcctaaaagaatttcttgaaaaatattcaagattgctaataacaattttatagcttcttacaccttagcatgtaaaaatacatcacagcagaaaatgagttttgaaaaaccaatcatagagaaacttgggcatttttatttaattcatctgcgcatttgaaaaaactatgtgttttcaatataccagaatctctgggacacatttaaagcagtgtgtagagggaaatttatagcactaaatgcccacaaaagaaagcaggaaagatctaaagttgacaccctaacatcacaattaaaagaactacagaagcaagagcaaacgcattcaaaagctagcagaaggcaagaaataactaagatcagagcagaactgaaggaaatagagacacaaaaaacccttaaaaaaatcaatgaatccgggagctgattttttgaaaagatcaacaaaattgatagactgctagcaagactaataaagaagaaaagagagaagaataaaatagatgcaataaaaaatgataaaggggatatcaccaccaatcccacagaaatacaaactaccatcagagaatactataaacacctctatgcaaataaactagaaaatctagaagaaattgataaattcctcgacatatacaccctcccaagactaaaccaggaagaagttgaatccctgaatagacaaataacaggctctgaaattaaggcaataattaatagcctaccaaccaaaaaaagtccaggaccagacagattcactgccgaattctaccagaggtacaaggagaagctggtaccagtccttctgaaacaattccaatcactagaaaaagagggaatcctccctaactcattttatgaggccagcatcatcctgataccaaagcctggcagagacacaacaaaaaaaagagaattttagaccaatatccctgatgaacatcgatgcaaaaatcctcaataaaatactggcaaaccgaatccagcagcacatcaaaaagcttatccaccatgatgaagtcggctttatccctgggatgcaaggctggttcaacatatgaaaatcaataaatgtaatccagcatataaacagaaccaaagacaaaacccacatgattatctcaagagatgcagaaaagtccttccataaaattcaacagcccttcatgctaaaaactttcaataaattaggtattgatgggacgtacctcaaaataataagagctatctatgacaaacccacagccaatatcatactgaatgggcaaaaactggaagcatttcctttgaaaactggcacaagacagggatgccctctctcaccactcctattcaacatagtgttggaagttctggccagggcaatcaggcaggagaaagaaataaagggtattcaattagaaaaagaggaagtaaaattgtccctttttgcagatgacatgattgtatatttagaaaaccccatcgtctcagcacaaaatctccttaagctgataagcaacttcagcaaagtctcaggatacaaaatcaatgtgcacaaatcacaagcattcttctacacccataacagacaaacagagagccaaattatgagtgaactcccattcacaattgcttcaaagagaatmaaatacctaggaatccaacttacaagggatgtgaaggacctcttcaaggagaactacaaaccactgctcaatgaaataaaagaggacacaaacaaatggaagaacattccacactcatggataggaagaatccacattgtgaaaatggccatactgcccaaggtaatttatagatacaatgccatccccatcaagctaccaatgactttctacacagaattggaaaaaactactttaaagttcatatgcaaccaaaaaaagagcccacattgccaagacaatcctaagccaaaataatgaagctggaggcatcatgctacctgacttcaaactatactacaaggctacagtaaycaaaacagtgtggtactggtaccaaaacagagacatagaccaatggaaaagaacagagccctcagaaagaataccacacatctacaaccatctgacaaacctgacaaaaacaagaaatggggaaaagattccctatttaataaatggtgctgggaaaactggctagccatatgtagaaagctgaaattggatcccttccttacaccttatacaaaaattaattcaagatggattaaagacttaaatgttagacctaaaaccataaaaaccctagaagaaaacctaggcaataccattcaggacataggcatgggcaacgacttcatgtctaaaacaccaaaagcaatggcaacaaaagccaaaattgacaaatgagatctaattaaactaaagagcttctgcacagcaaaagaaactaccgtcagagtgaacagacaacctagagaatgggagaaaatttttgcaacctactcatctgacaaagggctaatatccagaatctacaaagaacgccaacaaatttacaagaaaaaaacaaacaaccccatcaaaaagtgggcgaaggatatgaacagacacttctcaaaagaagacatttatgcagccaaaagacacatgaaaaaatgctcatcatcactggccatcagagaaatgcaaatcaaaaccacaatgagacaccatctcacaccagttagaatggcaatcattaaaaagtcaggaaacaacaggtgctggagaggatgtggagaaataggaacacttttacactgttggtgggactgtaaactagttcaaccattgtggaagacaatgtggcgattcctcaaggatctagaactagaaataccatttgacccagccatcccattactgggtatatacccaaaggattataaatcatgctgctataaagacacatgcacacgtatgtttattgtggcactattcacaatagcaaagacttggaaccaacccaagtgcccatcaatgatagaatggattaagaaaatgtggcacatatacaccatggaatactatgcagccataaaaacggatgagttcatgtcctttgtagagacatggatgaagctggaaaccatcattctcagcaactatctcaaggacaaaaaatcaaacaccacatgttctcactcataggtgggaattgaacagtgagaacacttggacacaggaaggggaacatcacacaccggggcctgtcgtgaggtggggggagtggggagggatagcattaggagatacacctaatgtaaattatgatttaatgggtgcagcacaccagcatggcacatgtatacatatgtaacaaacctgcatgttgtgcacatgtaccctagaatataaagtagaataaaataaaaagaaaaaactatgtgttttgaacctattacatatcactaggaaaatgaagagtatacaaatttatatatgtcaaagttcttgttcccagttatgacctagaaagagagatgagacctaaatttgtataactatgattgatataatactatttccaaattagaaatatgacaagttatcttgctaattgaacatttagtaaaagactgatggaattttaaattcattctaatactctttaaatcttggagccaaaaattattattaacatctttattttgtctctgaaatgtatcctttttgaactctgagctgatttctttgtaccttaaatattctgtcttatagccaccagggaaaggaaaaaaattgctacctgcaaagaatgggggccaataaaaggaaatgcaagtggcctagttgagctggagcttttgtaggggaatgtcaggcaatgatgtttgaatcatggtaggctttgacaatctagcaggagagtttggtctttattcagtagtggcaatggaaaaggctaacgattttgagcaaaagaatgagatgataaaaatgggacttggatgggatccatctgaaaatgatgtggaataactactattttctcaccttgctccatgagcttatgagggcaagatttctgtctctcttgttcatcatattcctagcacctagcacagttcctggaacagaataagcacctamaatagctgaatgaatgggtgaatgaataaacaaatgaataaatgagtgaatgcaaagcaaatagtaattactattcacgtgctggaaagctccttcattgcctaaaatagtgctgggcttaatgaatrcttgggagaatgattcagtgataaytcatctataataggctgcttttaaaattatgacaacaaaccatgcaggccaggtatagsatagataggcagatctaatctaaatatttgcaatagaatcaagtctaccattgcttgtaccaccagcatctctatgaacagtcatctgactcatgsgatgggcattaagaccrgattagttgtggtttgtataatttcttgaaactggcatgcaccagttctgaccaactacctgagcttacatagattcaacaaaatacaatcctctttaggagaaagtatacctgttacaaagacaccattgccccagatggagaacactatgccttggaaatgtcacagtttggaggattayaggraacacgtccttttctgtggaacagaagttatccaggtcaagccctctgggcaggggcctgtacgagcagtcgttttgcaaacaggttagtggattccacttttgtaagtttaattcatgcttgaacatggggagagttggattagggaaatttagtttaggattatggagtctgccacattctggtagtaacaacatgcttttttccaaacagayacttattattctaaagtgtcactayttttaattaaatggtttattggtaaaacccttctatgtgatgaagggtatgtgtaggtgaagtaaaatttgtcaaaggtaaaactatgctcttctttttgcttgtgaccatacgctgcttctatctcccttgacacctcctctgagtgattaccaaaaaacaatttcagccaccacgactatgaggattttttcctttcaaagagttgcttgctaggctgtatgtcaaattcagtaataaagaactccacctgggtgccctatagaccagttaaagccaacgaatctgaaactattcatcctcctgtattgactttctctgttaatatcatcaccatcatgctggtctcttaataacatctccaactcctcttgtttcccataccaaatgtggcaccaaatctggatgattccgcaaacacttcctgagtcccagtcttttacatgacgtgacacaatgaaggcctcctatgacctggtcctagctctctgttctaacctctgacctctgtttctgccacccgacttattcacagatgcaaaatacactttacactgtgatacctgcatgctttagtttggtttatgatttagttgttctagctgattttttaaaattaaaaatatctaatttttttaaatgttcaaactagttagcaggcactagacactagagcattgctcagcctgtggcctacatggaagctcakggttaaaaatcatgaaaaccacctgaaaacttataaaatgattaggtagaaggttagaggacactctactcttttcctcaaagacagtaaagccatttttaggagaccaagtgtccatcaagcagccttacttgatctatgattatctttatgtaggttacaatacagccaaaggggacttagtgagatccatcctgtacccccggcctctgaacttcaaactatacagcgatgccttcaagttcatcgtgttcctggcctgccttggtgtcatgggttttttctatgccctaggggtatatatgtaccatggagtaagtactgggggtaaggcttttcaatagtatagattctgcaaagagcttracctaactcagaggattggtttaggttacatcttgatcccatcattctgtgaatcattactgtccaaaagagcttcttagacagcrgaaatgttctcatgcctagtttgcccccagtgtttaggtaatatctaaaacactatgcaatcagtgggtttcccatgtgttctggttagggtctgaaatgaagttaatttccacttttacagagctggtactgcatgagatacctacttccctttaagctacagggtgtcaggtttcatttggatgctccttgtcatagcctggtggctagggagggaagggttgtcactaaagacctctgaggtcctttctggtcctgagagtctgattttgctgtgaaccagaaaataagaaagtctgggatcataacagtgtgagctggtggggaggaagagaaaattgtgaataaaacatccaaacaggtgaaaaactgtgagtggcttaattacaatgtccaaattggtggcatcaatgagcgtgtgtgtgtgtgtgtgtgtgtttgtgtgtgtgtgtttgtgtgtgtgtgtgtgtgagagagagagaggtgggcagtgaatattggtgggaaaagacatagtaacaagaatttcaaggcaatgttcacgccaaaacttaactgctgagtagttatttcaatctgaaatagctcccagggagcatttctgggtcaagagaggcccacgatggggcctgtgaagagctaggcagaatgtcaaggtcactggggctggaatttgagggagtatgccaatttaatctggggagctggagcattgggcagaaaagcaggaaaaaagctcatggaagccctggcagtatttgagaatgaggtttcctgggaagaacttaacatccaatacacactgaggcaacaagactaataatcccagaccccaacttcttgtgggtcagaacctgtggctctgttggctgcctctatctgcactggttcagcgctagacaaggctgagtccttagggtcaaaactcttccgtgtctgtggttgggaaaagaagggagtaatgaattttgtgwtaaattgatattgggcaaaagatgtcccagcagacattgctactgaacttgaatcccatgtttccaatacttaaaaaagtatttatggctaaaatgatggttaatttaacaaaaacataggtgaggttctagagggtagaatcattaatatctagagcatgtgaggaaaacaaaacaatcaatcagtcaaccctgtgatttgacctcatccctgaccttaattgtgtgagcctcctctggagacctgctgtattagtctgttctcatgctgctaataaagacatacctgagactgggcaatttataaaggaaagaggtttaagrgactcacagttccacatggctggggaggcctcacagtcatggttggaaggcaaagcagaagcaaaacatgtcttacatggtggcaggcaagagagtttgtgcaggggaaatcccatttataaaccatcagatctcatgagacttattcacaatcatgacaacattatgggggaaactgcccccatgattcgattacctcccactgggtccctcttactacaggtgggaattaggggagctacaattcaagacgagatttgggtcgggacacagccaaaccgtatcacctgccagggatcctgagttcacaaaattgacttgataataaaacatattggtcatgggtttgtaccctgcagtaagacagaatagggttcagatttctgtcatttacctagtatgtggccttgggaaaattatttaattgttaaaacctcagtttccttacctgttaaatggagaaaataatagtatttacgtcataaggttgttatagagagcaactaaataatatacgtagcctaatacagttcctgctccagagttagtatccagtgagagcaagctaattttatattggcttctctgtagttaataatatatgctgagatcttggaaggatgttggtcctagtttttaattatattgccatccattcaatctatgtcctgagcacctcctctgtgctaaatcccatgctaggctctgtatctagagatcaataaggtagattcaaagatgaataagccatagctgctacacccaaggagtttgtaggctagtgggggagagagattcataagccaacagtcaagcttgggcagagggaatgctaagtagagggaaacagaaccaggaaaggggttggtggactgggagtagggatcaaaggtctcctttgctctgcagtaggagacaatgtgctcattcctttggcactaggaagggtggcagtctgctgtgctgggctatcctgtatgaaaatgtctgtcctctcccaggttcctccaaaagatactgtgaccatggccctgatcctcctcaccgtgactgtccctccagtgctgccagctgccctgaccataggcaacgtgtatgctcagaagagactgaagaaaaagaaaatcttctgtatctccccacagagaatcaacatgtgtgggcaaataaacctcgtgtgctttgacaaagtatgatccagacttctcaggtttaatgttaatgatttcaaggcatggtggagctgggaagaacctcagaaaatgtctagtccagtgttcccattttacagataggaacgttgaggccagagaaggtcacagagtgagctagtgcaagatcacattctaggagcctgctctgctgactcttaaggttagcagcttagccagcacatcatgaattttttatctgtgaaacttaataatttgtgtgcctggtttgtggtttttttaaaaccatctcttactatgtaacttcttagactgactgacttggcagaaaatgtgaggaacatttctgtttcctgaaatgttttgtccagaagataagtgaatctgtttcctctctcctcctctgcttctttgaaggaaaggaaggaaggaaacaatgaccctgtcctgcccctttgctcctccagggcttgtgactccaggctaggttgtctctgtgcttagggacctggaaaggtggcagaggaggagcatatgccacatggggaacactgcgtttaccaagcaggtcctgacacccccccatgacgtgagtctcctatggggaacctggaggacttcagcattagctgcctgctatttggatcctgccctcagcttggacaggccagtttaactgctgtaaagcagtgggcctggctgggtcccttttgtcttcaattcatgtgcatttgaataatttattagggcctttgccattttgtggcagagagccactgctgtgtacaatgctggtagagagtcccataatgagtcattcctagcccttgagaagcttctagtctagctgagaaagcaggaaaatgggagtgtagatggcgatcatgctgtgagatgtgtgtttaatagaggcctgaggaaagcgcggggcacagttacctgccacggttggaggccacctttgaggtgcagccttggttgttagaaagaataagccccaggctcagagctgagcagctgacaagcacaggggtacaaggggcccactgcatgtggggaacagaggaccatggggtgtggctagaatatgggctggtaggtagagaatgaagctgggttgagggcaattgttaagggcctcatatgccacgctaaggagtgggtccttgtcttgaagcagaataggagcctttactttttaagaagnctggtgacatttctttaggtgttttctatcccaccaggggcaactggggagatgggatggaagggagacaagactgaagaaagaggccatctggggacaacagaagasatcattgcttgtcccagacaaaaaggacaagnatggagagtagaaggcaaatgggagtgactccaatgagtagactcgaccaggcttggtccccaggtgaaaggggtatatctcttaggttatgtcagttctctttctgtttgtattttgtttggcaaagaaagttctcgatcaccaccagtcaagaaccgacaaggttaacttcattttagattcagggccaaataacacccccttggaagttctctaacagggattcctgttacttcctcatgagcctcactggtgtctggaatataagagggagacttatgaaatatgttcattacatattcaactgtttctaaaattaattttcccgaggctgttcactttatttcctgtataaaacctctccctccacatcctcatgtcctcacctgccaggctgtctgtgaggctgcttttaggtgtccttggtcaaactctgcagggcatgatgacacgtgacagtgcaaaaaactcttgattgaaatttggcaaaatgagaaatctgacccagaatttggtactaagtctttgtgtgacctttttttttttttcttttgagatggagtctcgctctgtcaccaggctggagtgcagtggtgcaatctcagctcactacagcctccgcatcctgggttcaagtgattctcctcagcctcccgagtagctgggattacaggcgtgcaccaccatgcccagctaatttttgtatttttagtagagacggggtttcaacatgttrgccaggatggtcttgatcgcttgacctcgtgatccaccctcctcggcctcccaaagtgctgggattacaggcgtgagccaccgtgcccggcccatctctgtgtgactttttaagaaaagcagattcaaccacaatcgtctctgagtttctttccagctttcacattataaaattctatcaccatcatgttggaataaagcactctgccattaattgaattttcatctagtgtyatttccagtttcggagatatctgtcacygggtttctgagtccatttgttctcatatctatttctattttctattggtttgttataacttctgtaagacaagttctttctttttattcaattcagcccaagcctgggcttgaatttatgctaagaggttttctctttctatcttattccccttagaacctcaactataatttagttttctctatttatggttagttttattgttaaggggtcattttcatagagagataacataatctaatttctgttttgctgcagtatcatctctgttttcatgttcaaaatattgatgtttaaaaacatcatcaggaaaacatatcagtttgaattaagttgcaaactctttttgaaatgcaacaacttgaggggatttggaaaccraacatggtggagtcctttataaaatgcaggagagaaatgaaacaaatagctctttttcaaaaagttgttgtttaagaaataattcactcgtgtgttagcaccttctttgtgaagttcaaataaatgaatgaaacaaagttttcttaattatttaatctagaaacccagaaagagctttgtctttccacataccccgtatgattcacttaacatttgctagtttggaggaagactccagaarggctggattttggttctgcctctccaacctacaggccactatgacattaggctcctcatttcacctctaacctgcctccaccctgttaactcagttgtgaaatggaaagcattgtaaacactttcctgtaaagcattatgctaatggatgtgctataatgacggaggttgccattttatagaaaactagaaaattcagtgacttctatagagataggcttgaaaagtagtgtcagagacttggatcttagtgttgaaacagggtattctgccatgcttggtaaagctctggtgggccctggcagtgctgaagcagctagctgtagccaactcacttactcagggtgttaagcaggcctaaaactgttagcctactgcatcaagacaccagagtatgtaattcatcaacacctgtgaaacaatgaggaaattaaaagtgctgtgatagtactcggctccatttttctttctctgtttcattatctaacaaatactctcccatagtatggcgaatcaaatctctgaactatttttcccttgatctaamaataaaatccacttatgggcattaattaatatttattattagcatttactttctctctatagtctcaaagccctttatcaacatttcattatcaatctggacagtcactgtgtcacccatatttttagaaaattactgtgaaccagatggcaaactgtgaactgaacagtctcgaaaatgaacaaaaaaaaatgagctctgcttcagcgagatagcaggtgacaactaaaagtcagactcgagctgattcttgtactgaacctctcctggttaacaacagcaacrgtcatagcaatacacaaaccaaaccaaaacaaaacactttcattttttcctcatcattagtaactgaaatcacctaattatcgacatggtcttttggggatcatgtatcacctgcttaatttttcttgtgggtactcctctctgatttaaaatttggtacttataaacaaggtatttagactactggatctactataatatcttagaancttgggttttgtttaaattactatataattaaaagctttaaatcttatgctaatattgcttttaatttttactcagactggcactctcactgaagatgggctggacctctgggggactgtccctactgctgacaactggtaggcctcttatgtgaaaatggaaggtgtgtttggtggagttacctggatgatactcaaatccatcttttgggtgttaagggatgaatgtcacataaaatatatacaatagttggctggaactagttcctaattattctaacttgcttaaatgaattctaatttcagaatgagaaaggaaaagtaggtcttcaaaatctccatgaaaaatggagtaggatgaggtggataattaaggaactaaatgaataaaacagagaaaaaagagtgaaatgaagaccatgcttaattaaaaactacaaaacttcctgggtggctagcgcaggcaggtggtgtttcacagtctagcgggataaaaaggtgcaaatacacccacctttgatgtacaacacaggccatgaaaattgttactattaaggcagaaatgtcagaatggagaagaagaaatggagattatttgatataacacaaagtcctgacttttatataattacatggtgggtaaagacaaattaattttgaaatttagtgaatcaaagaaagccacctgaaggagatggcacttcagataggttttgagggacgtgcggctagaatttttacagctgtgggctaaaagctggcactagggagaggagaggacaatcacatagatgtctactccagaaagagctacagaagggaaagagggcccctggagggtgaatctcctcatggtatctccctgtggcttctagctccttccctatgggctaagacttgccttctcaatttgagcggcgatggcctctgctcttaagctctaagtaccctattttggtgccaacagtggctgaggctgctgtcagtgacagaagacactttgcaggggactcccaagatgacgaaggggccaggtaaagcatggcacaaggtaacagcagacaagcagtgtgatgttgcagaagataccctggactgggtgacaaggaacacctgagctttaaccctactgatgtgtctctgctcctggtgctcagatgtcccggccagccctttgcccagacaggcaaggaatctattggccagagcagtgaaagggaaaaaagatgtccacagtttccacccctccatcttcctcccttgtctctggtactctgaaggttttcggagactagaaacaactagacacaatcactattcagctgtaaggtgggaagagaggaagatacaagataccagtttgtattatcaaagagaaaaacaggctttagaggtgggatgtccagggtgcttcaagaagtaggggcaaactctaaagggctgagacgtgaaaaatgcttctgcatccatgcagccttctttcctatccctaatttcctgctccctaagtagccctagagacttcttgcctaggctgtgtggctttctgcagacagctctacagagtttgcaggtatgactcccagctgcctgttcagtgccttcccacaatgctgccattatgtgggctggcttcaagtaatatgaaaaaagtccctgcaattctatccaaagcctctgaaactatgttattgattggccagtggaaaattctgttgagaacaaaattcatatccaactcaaagaaatgtttatataaagataactctgtaggcaaaacaccctgtttaaaaaataaagaaaccaagtgggcaggggcttaagagcagagaagtctctggacaagcatagcaatagcaagaagtttaatgtggatctagagtacagggcatagaggacattagtaggagtggacactgtaaggtaaggtagatccgaagtggacaagactttgaataycaggctaaggggtttggactttatcatttggagcatagggagccatgggaaggttctgagcatgaacgttaggtgtttggagctccactttagtaagatttaagggacagaatgtgcaaaatgattttatcaaagactttaacattaccttctctaccagcttccaggaagcccacagctttgcctcrggccaggctgtgccatggagcccactgtgtgcggccatggccagctgccactctctgatccttctcaatgggaccatccagggagaccctctggacctcaaaatgtttgagggcactgcctgggtaaggtgatagtttaatggaaagatgagaatctgaggaaatctttactgggagtgctgaagcttttctaatttttgttaaaacacagagaaggttcataataatgtatgtatragcgtgtaacactaccagaacttcccaacctgtgcccccaaagaattctgttaatgrttgctgcatgaaataggcgtccattattgaacaaacttgggaactgttgtttaaacaaagttaaactcatttcttgactgcctgatttctttaatatactgtggtgttttgtgaatattcaagagggaatatgacatgcagcatttaccgaacctatctgacctcaaaaaccttactgacacccataacccagcatgttctccaaaacatcagtgttttccaaaacactatcagagaaacagtagtcaaaagcagtgttctctggtagagcagccacgagccatatgtggctactcagyccttgaaatgtggctctgcaactgagaaactgaatttttaatctgatttaattttaaatagtttaaatttaaatagctacaagtggctggtggcgactgtgtattgtaaagcataagtctagacaccaaactggaggactgcattccaactggttcaatctcctgagctgagtgtgaatgaaaacggaagggtataaacccaccctgaaggctgccatagtggaaaaccctctgcatttcaccactctccagctgtgtgatcacaaagccagagccaggactgagtctgtgacctcatctgtacgtttggggtaataatgcctcattcacggacttatgaccactgagactatgaatytaaaggggctttgagcacaatgaagagccaaacaagtagagggtgttcactaattaactggttagttaattacaycctgttgcctccgaagaacatcctaaagctgtgtccaatgatgtataaaatacagtacagcagttaaacatagctgcaaaagaatgggaacaaatgattgcagggaaacaaagcacacctaacaaagaagctaatacaaagacatataatagggaaattttagctttctagagggcaaatcaatgaaagaggaaacctggtaaaaagggaaacttctgataccagcaagttaaaatagagcatttgctgtggaaaaacatttgacatagtgaccaattctctggatctcaatggagaggaatcggtgtatttactataagcagtgtccttaacagaatcattgggataaacacggtgatgagttgtgcagggtcattttatatctggctttggtcctggccctaactacatccccctctccattataggagggctgatctgtctttacaaataacatacttgkttgggaatataaatctttagtattagctctgtaagaaccatctgttaagaatagttgtatccatcccaaacaaagcataaaaatgcatgatttttcactgagtttagagctgtgtcagaagctgtcttgagtatcttttggtaactgggaaccttccactccacatacagaggagggaaactgtccttttagactgtcaagaattttagcatttgatgggatgtcagaatatttttcagaagaaattgagatctacagaaataaagtggtgtccccaagattaaacagrtaagtggcagagtggaaaccagatactatctcctgttttctgacctctactatttatatatatgactgtctttcccatattttaatattggttaatattggcttctcagaggtattaacttctgttgtaatatccaaagaatacacgtcattttcaaacaggctttctaatttgctagcagctgacataccaactccctagttaactcaattaggctagtagcataggtatagtatgaagaactagtgccatgtttatctcaggacccagtcctaactcatctgagagctatggtgctcggcaatgttggagactacatctccacttaatccctcctccaattactagatgtaatcatttagaaagatccatggacctgtagctagcacttcttccatcaattacttcttaaaatgaattcacaatatttttggcttttgacattctacaataaggcccctaatataaatcgatacaacagaaatttgacaatgacagtattaagataattggcctggaagagaaaatatgtaaaaatggctttgaaaagattaaagtattgtgcaaataagagatatttctttcttaatatttttattcaaagaatcttatgaatgttttcattttataacagaaaatggaagattgcattgtagactcctgcaaatttgggacgtcagtttcaaacatcataaaaccaggaccaaaagccagtaaggtatgatttccttctttacatcacatagctctttccccataaaactggtaaaacatttctgacttgcacatatttttatagtcctattattttgccttatcataacagtttccacggttggtttgctgtttctttcatttccgaatttgtctattaatttattcaacaaacactacctgtgtacgctagggcattgtgctaggtgctagcagataaagaggcttcaaaacaagacacacttggctctgggttggaggaacaggtagactcatagaaaaatcaatataggtgcagataagtgcracacaatgtgccaaatgctataatcaaggctgaagaaagagtttcaagagtcctgacatgggaatgaatactgtttctgggagataaaagcacygcagaggagatgacctgtgagcttggcctggaaggtgattaggatttctccaggggaaggtccttgcagtccagacaacttgttgagggagtcactttaaggcagccacacacacacacacaaaatcaatgttgtgacaaatatactacatcaagatgtctctgggctcattgcacagtaaagcccttttgttggtatgcatttggaaatatcacttagcagsttgttaagctccctgttgttgatgggcttgcagagtccagtggaagccatcatcaccttgtgycagtttccattttcctcgagcctgcagaggatgtccgtgatcgctcagctagctggggagaatcatttccatgtctacatgaaaggtgccccagaaatggtggccaggttctgcagatctgaaacaggtactaacacttttctctttcaagaagtaaaatacttttgttttttctttgagacagaatcttgctctgtccccaaggctggagtgcagtggcacgatctcagctcactgtagcctccacctcccaagttcaagtgattctcctgcctcagcctcccaagtagctgggattacaggagcatgccaccacacccggctaattttagtatttttagtagagacggggtttcaccatgtaggccaggctggtctcaacctcctggcctcaagtgatccgcctgcctcagcctccaaaagtgctgggattataggtgtgagccaccryggccagccgagaccaaatacataaagccaacaaacacagaaagcttcacaatcaatgaacgtggagctgcttgtttcctgggtaggtgcaaagtaggcccagtagatcctaagaagcaggggtgataatttcaaggctgggaggcagcgactaaatatctggctgtgggtgcagtaagaaaagtacaaccacagtgaggcatctgggaaggagacgagatgtgaagcttgcatcaggagccagaatagggagctactgagggtcagagaactaggggaggtgtgaatgagggaaatggagaggtctggacgctaggtaagttctgcagacatgactgctctgtcacctccagggagaatcagatcgatgggaggagaatatagaagaatatagaacagaaataaaagtgatcagagtaaattcaatggtattagagcaagataattcatmattttcacagcaatttcatctttctgggccagactttgagctgatttgtattgctttttagtcttataaacatatgcactctttaagcggcagccagatktataagaatgttgttgcattcaaatgagttcatttggataaaattggtctttttgtcttccgattttcatgtagactctccttatgattgctgatggccatcaacttgtgcagagaattctagatttggcaaataattcctttaacttctctattgggagtctttttttagccccttttcttctgtctttgatcttcagcataggtcacattaactctgtccttcactgattacaacatatactgtgtttgttttgtttcagttacacgggtacagctgagcatcttcttgacatttaaactggtatctattgtccctgctctctcagtaaggatttgggcctgtcacttggcacttgttttcctggcagctctttcagttcttcctgttttcccaacttccaatctttgacttacgctaatactatcttcagtgatttccaccaccaccgtaccccatttttagaaatagagagctaagaactttcttgaaattagattcccacctccaggaatattttagaattacagaaagtctgaaatgaatggagacagagagatctggaattctcattttatggatgagaaactaaggtgcagaagggagactgaacatgactaaggtccacatggaagtggaagggagaatagaacttagttgatttgccacctaagctactatacctcccattgttctgtggttccctctaatacccttataggtacgttataaatcataaagattttataaacatagttgtgattgccatgctaaaacacacaaatgttggcattgtgtcatctttcacctaaagcaggatttggcaaacttttctgtaaagatcaagatagttcttactttaggctttgccaatcacatggcgtccatttcaattcctcaacactgtcactgaagccttaaagcagccatagacaatgaacaatcaaatgggcatggctgtgtttcagtgaaatttcatttataaaaacaagctatagaccagatttagcctgtgcatcctagttttgttttttttgacccctgatctagaaaatcagctgtttctctcattttatccaagtaccccagtcctgaggtctgttcttactgaacccagttggtacatttgacacccagtttgtctgagtcagcttgtgctattataacaaaagaccatagacygcgtgcttgaacaacagaaatttattcctcacagttctgggggctggaaaggccaggatagaggtgttgcccaacgtggttcccggagagggctttctttctggtttgcagatggttgccttcttcctgtatcctcacatggtggagagagatgtgttttcttagggcatcaatctcattcacgagggctccaccctcataacctaattacctcctgaaggccccacctccaaatactattgcattagagattaggcttcaacatatgaattttggagggacacattccatccataacgcagtaaatgaccagcacggctttgacattttttccatcaaaataataagaacacactgatgaagttgtttgtggcctttaggagaagctctaagttttctattaaagtgcttttatggaatgaaagttaagacaaggtacaatggctgtgtcctggagtcttgcttagaccagccttcaacatgaccttacacttacctgtttcttctaccctggcagtgcccaagaatttcccacaggaactgaggagttacacggtgcaaggcttccgtgtcattgctcttgcccacaaaaccttaaagatggggaatctttcagaagtggagcacttagccaggtaagcaattcagaaattggcactagagcaggctctgtgcccatgaagtgcgagtcctggagatgaacagatgaacagttctaatcacctggaaggctctcagagacagagaattaatcttgtacagtcccctgactcagagatggataattgtaggtgatactggagatgacttgctcaagtcacaatgctggttggtggcagaacaaggatggtacttgagagcttctgactccaagataccagtgtgttatctctgcttggcactatgttatgtcaactttagtcgcagctctcatcccatcaaaacaaccaacgctccttcaacctcagagcattatgtgaccaatcaacttgggtggcccatacacagagaggttgagagagggagacagttggcactttgaaagattttgagaatactttagacgtggttttttcagtgctcaatactacaacatctccttcgtatctgtgaaggtaacaagggcaaattgaattacttatgagaaataaaattcagtatycttaattacattacagggataagttgtcctcattagaggataatttataaattattatttctttcaacgttcttcagtttttaaaggctattttcaaattatctatgacaaaggagtaaaaaaatactgtggaaaactgaatagcagaaaatctatttatttcttacattggatttgtgttgctgataaatgctaatttatatacagctagctccttcatgtaaaatagtgatatccttggtttaacattattatttgcaacctaagtccattgactctaagttaattagtaaacacagtcccttccttactctgtgcttgtttcaccatctataaaatatgcaattggatgatctccaagaaggccttcagccatgacattttaatacttgaaacaggatcacaaagcttattttgaaatatatgaatgtcattctcagatttaacattccaggtgttagctattcttgagcaaacataaaggtccagaccacataggatttgtaattttctaaacacaaatttgaataatcaacgttaaggacatgtgtgaagaaaagatctatgtagctagtgatggagtgtagccatcatccagctgtcacatacgaacgcagctgtgttgttctcatgtaagagccactagtgggatagacattataaatataacaaaataagaaaatgaagataaaatgtgctatatttccaaccattccaggttttttyggggaatatcaggaacttattatacttcttagaatttagttactattttcaaacagggtaaaaggatagggttttggtttttcttagaatcaaattctatttagcaaagttttccaactagaaaaatttaaaacttcttaaaaattggagtcataatggggaagtagaaaagttttttgagatgacgtaaaaagtcaccccaaactaaaacagcaggataaatactccatcaaggctcaccccttcaccagtttagcaaatctgtattgaacttaactgtatgtcagacgctcaaggaattgagaacttatttggaagygaataaaataaaatccttgtcctcatgaatatatcctagttggggaaatagattagaaaataaacccataaaatattatcccactagtggttcttaaatgacctgagggggaaaatataaagtaagttaagaggactttttaaaaaagacagagaatgtcattttgcctaggcaatcagcaaagtcctcagaggagcaacattttaacagacatttaataaaataagagagaaagacacgcagatatccagaggaagagcattgcagggaatagaaatggtgggtacaaaagctttgacacaagcactgctgggagtgttgtagggtaacaagcagccaagtgcctaaagtagtgaacgagaagaagcatcataaaatagaaacaaagaacatttgcctgtttttgcttttgttgcctgtgctttatgtgtcatagccatgaaatcattgccaagaccaatatcaagaagatttctccctatgttttcctctagtagtttcacggtttcaggtcttatgtttaagtgtttaatccattttgagttgatttttacgtatggtataagataagggtccaatttcattcttttgctggtggatattaaactgaaaagttttgcacagcaaaggaaataacagagtgaaatagcaacctataaaatggcagaaaatctctgcaaaccatatatctgataagacattaacatccaaaatgtacagaggacacaattcaataggaaaaatcaataaataatccaatttaaaaatgaacaaaggccctgaatagacatttctccaaagacgtacaaatgaccaacagatatatgaaaaagtgctcaactttactagtcattagggaaatgcaaatcaaaaccacaatgaaataccacctcatacctgtaaggatggctatttgaaacaaaaacaaaagaacaagttgacaaggatatagagaaattagaacctttgtaaaatggtacagctgctatggaaaacaatgtggaggttctttaaaaaattaaaaatagaatgtttttaattttttaaaacattggatcaccaggtgatccaatggtccaaaatcccacttctgagtatatatccaaaagaactgacattgggatctcaaaaawaggtatcttcacctttatgttcattgcagcattatttataatagtcaagatatggaaacaacctaaatgttcatcattggatgaatggattttaaaaatgtaatatgtacatataatggaatattattaagccttagaaaaggagaaaatcttgccatatgagacaacatgaatgaaactgaaagacatcatgctaagtgaaataaaccagtcacagaaggcctaatactgtgtgatcctacttatctgaagcatctgaaatagacatattcatagaagtagagagtagagactagaattgtgattaccaagggctagggggagggggaaataggaagttgttgttaatggatataaagtttcagttatgcaagatgaatacattctagagaagtgattttaacacacacacacacacacataaaacagggtagaaggaaactttttgaggtgatggatatgtttattacctggattatggtaatggcttcacagctgcatgcatattgttcagatctatctccctgtaatcttaacaccacggtgcacagcaaaatgaacaaagatcaaaaaagagttcttggcccccaaatttactttttaaaaagccacccaagagtgattccatttcagaggaacgttcctacataactaatgcaacccagttggactataagccatcactttcaaattccraaaactgttcagagccctgtctgatgccagtaaatattattcaaggcgacagatggaaactaagatgaatgacactgtattcaactactactatcgtgtcttgtatgtatgcagaatgcccttaataaatgccaaataaactgaaacgattgcaagctcaaaaaagacaaagcactgagaaattaaaaaataaagtatatttgattaacatatttaaaaaccaacagaagagttggaagataagcacwttgtttttaaaaataaagttggaaactggaaaaaacagatttagaagtggttgcctctaggaaggagggggtgaggtggtgtggagacagactactggttttcattataagcttttaagttcattttgatttttaaaatgtgcctgtattgcattaataaaacttataaatttttaaaagaagaaataaattgaactatggagcctacgtagatatactttaatattgattttctcctgaatacaaagagaaaaagtggagtcagagttaacatttctgggacttctcatcatggagaatcgcttgaaaaaagaaaccaaactggtcttgaaggaactgagtgaggcccgtatcaggactgtgatgattacaggtatgtatttgtttctaggggcctggcaagttgattgtatcctaggcataagaacaagatgtgtgagctgagtgagttcatgtatcagagacagggaaaaatgttctgttgtcgaatttgttaccctgtagtcccttacctaaaaacatgtgcagctgccccgacaggaccagaagctttgaaggtagggaccgtatctcatcctctttgtctaatgactacccctcccagccaggatctgtgcggtgcctcaaggctcacagtaaatgagcaagaatgggtgtgttctcatcaagaaacccagtgatccctctgcatagaggattgagtctctggttgatggtcctctagggcagtagggccaggcatggtgtatgatcgtcaaacccaagcacagcctgaccctgtgtgttctttgcttagttagtttccagatcccgtggatggtttaagctatcaggctgagatcatgctatattctccactaagagttgtctgtcttctgaggattggtcataaatgcttaagtatttctttattaattcacacatgttttgaaatacacatggaccaggatatgatgcagaatatggagagggagatgggaacatagtgtttgcccagtaggggcagtctacagcagagaggaagataaaataaggcagaaagcggtaaatgctctcaaagaacaccaagcagagtggaaaagggagacctcagttcttgttgctgaggggaggtttgtacatacagcaagcaaagtttctttgtcttctaggtgataaccttcaaacggccattactgttgcaaagaattctgaaatgatccctccargcagccaagtgatcattgttgaggccgatgaaccagaagaatttgttcctgcctctgtgacctggcagctggtggagaaccaagagactggacctgggaagaaagtgagcaaatgttagaaggcccctccgtgggcctagactgatggaatacagtcctggcactgctcagccttctctcaactccaggagtcatctcagtaataatccctcacatctgtccagagtttgacagtttgcaaagcatttctgccagctctggttgcctaggaaaatcacctgggggagtttctaagcttccagtgcaggctgcaccaattaaatcagaacccctggggtaggaactggcatcaggtgcttttcccagcaattccagtgtgcagtcatggctgagaactactgatttatactcatattttccacttggtcattaaaataaccctatgcaattgggcaaaccattaatttttacagatgagaaaactgaggctcagagcagtaagattgcccaatacaaaaactggtgagttgcagagcaggaaagcagacttaggcctatttgattccacacagatccacgggcatttagattgtactatacctatgacatgaagctaacagaggctgggcttttctagatagaaagctccctatgctcttgtgacagaatagctttttcataagacaatgggctgtagccttacattccatcactaaaggtaacacccatgcttttgtgtgaattcaaagatatggccctacaggtgatgaattacaaaaatgctgccttcctccaggctgaccagcctttcagattgttaagtatagagcgggcctttgtgcagtcaggagtctttctgcagcacacaaactgcacagctatacagaatggccctgcccctaccctgggaagaggtgggttaacttgcctcaacctctaattgcatgggctgtgaaagatgacagctctccctctgctctcagcagatttctggtgcttatttccttgtgaacctacttgcttctccatcggtgcatgctgcctgaatttcactgcatgctgtaacccaggtcctttgtgaattttaactaacagtccactcacactactcattcatgaatttaatgcctctgctgaaattttagtccccaccaggagaagctgtatcacagtttcaggccttcctcctctctgggtccctccaccatacttcctctccccacattcccagtgcaagcaaaaggaattcctgcccttgtctcaggagggatgctttagaacatgtcttttgttggttattttgcaattggagatagaaagggaggggtgtgtcatcttgcctcccaattcagcacagcaatttttttttctttcaactacaatgctttccctgagatgaagtcatctgatgaataaaattttctcacctcctgcaatatttgaatttagagtcctaaacacaaatggaagtctctctgaggaatgttgcatgaaaaaccatgattaattattgatataatgaatgcacaggcattcatcagatgctttctccctaactgggaaccagggagggctagaaccaagccagagaaacaccttgacaggtgcaaggaaggagggaaagggtttcggaaaaggattactcctgcagtgggatgtagagtatggaagagaatctgggaaccatgatagaaagagatacctgttgaggtggggtcataacaaaggtcagaggctggggcctaaaaggagttaggcactgaagaaagagtgcctgctttacagtgaagacaatgagggtgattttggaataagtgaatggtagagatcttagaaaatataaggttgcatgaggaggagaaggaagaagagggaagaattttcctattcttgtaataactatttgggacctaagaatggttggatttcttcagtagactgacatcatacatattatctcccaagacgggatccagagtaccatactgtccaagtatcatatgtttacataatcttggggggaatgttttgagtgttttttcctatgggtagaactgctataggcaaattacacattattttgttgctgaccttcacactgttaggcaacatgaaaactcttccttcaataacgcataggaaagcagagacactccttaggagtcaatgtagaaatgatgcccttttgattttaggaaatctacatgcatactggaaacagttcaacccctcgtggggaaggaggaagctgttaccattttgcaatgagtgggaaatcataccaagtgatatttcagcatttcaacagcttgcttccaaaagtaagtactgaagaaagaagtgttttgttttgctcctcaaatcagcgaggcgaaaggaggaggagagtattgaaaacagtgatcactgaggttgcctcacagttagagaataaacacccccaaaggagtactgctcctgaaaaagttttctggccctttttatgccttctcggtcycaggcagacccacggcctcccgttcagagtttgagttctggtaccttctctcacccctgtggccagttcagccttcctccttctttccctccccacccaggagaacggcagagttccaaacacggtgcttgttttgagggccagcttctctctgaaaccaaccagctcatgtcaggctaagctctattccccttcttgcctggattcttaaattacagcaagaggaaacaaaggccccatggtttattttcagagtcatttgttatcttgtcctctgtgtgtcctgttttaaaatagtgctgtgcagggttgcactgtcaatgtgcgggagattaatggagcacaaggggagggcagcaactatctgttagcagtgtcatgaaaattctgtcaccctagcagtcaaagtccacagaatctagaccccaaaggcttctagaaagctcttagttcagttcagggaaagctgagactcagagatattaatctgcttgtctaaggtgtgcacagctagctggcacagctgagaacagagccttgtttctcagcttccagcctttcctctgtctatgctatgattatggagatggtgtctatcaggaaagaactgtgtttcctcaagcatttttattccatatgctcttctgcttcttagttactgtagtattattgattagtggtcaccccatcttggaaaaatagtctgggaaaaaagtaatggagttgtgatggaggactttaagtgaaatttcaatattaaagtgttaaatctccttatttcccttcctggtattggtctaatgacataccatccaatgctgtattaaattagtaaccaggagtgatttttcagggctgttcttttatttttaaaagttttcttcttcccaatcatattgcaatggttgttttttctttttagattctggtgaatggaacagtttttgcaagaatgtctcctgggcagaaatcaagccttattgaagaatttcagaaattaaagtaggtgtcatggcatgaaagaagagtgtgctcattaactcttgctacctatgggtcaataattcaggtgtgagtcagaatggctattattaaaaagtcaaaaataacaaatgttggcaagattgcagagaaaagggaacacttatacactattggtgggagtgtaaattagttcagccattgtagaaagcagtatgacaattcctcaaagagctaaaacagaactaccatttgaaccagcaaccccaatgctggctatatacctagaggaatataaatcattctaccataaagacacatgcatgtgactgttcactgcagcactattcacaatagcaaagacatagaatcaacctaaatgcccagcaatgacagattggacaaagaaaatgtggtacgtacacaccatggaatacagtgcagtcataaaaaagaatgagattatgacttctgcaggaacacagatggaaatggaggctattatccttagcaaactaatgcaggaacagaaaatcaaatactgtgttctcacttacaagtggaagctaaatgatgagaacacatggacacaaagaagaaaaacacagatattggggtctacttgagagcagagggtgggaggaggaagaggagcagaaaaaataactactgggtactgggcttaattcctgggtgatgaaataatctgtaaaacaaacctccgtgacatgagttccctcgtataacaaatctgcacatgttctccaaacctaaaataaaagtttaaaaaaggggattaaaaaaaaattcaagcactggcttgagtggggaaaaaaatctctcaccagcctcattcacatgttgaatgctcagtgcctcatgagcggttggactgaacctcagtttttcactggctagcggacagaagccaacctcagttccttgtgacaggggccattgcataaggaagctcacagtgcaacagttgacttctaaaagagcaagcaagcaagaagaaccagagacagagcacacaagacggatgttgctgttttttatatgccagtctcatcacccttgccgtattcccttccttaggagtaagccactagatccagcccacgtccaggggagtggattacacagggcgtggatgccaggagctggggatcgctgagggccatttagaagttacctattccagagagcatttgttctgtgggccataaggcatatatcttagagaaccctcccatgcttggatgtagcagaaatagtggggcaggttgtatagcttagaatcagaaaaatggggaagtaggtgcgttataccctggaattattttaggttggtccattagaagatatgtgaataatttctggtcttcttagcaagaggtgaaatagcattttgcctttatctggccccagcagggaaagtcaagagaaagtcctttattacccccttcaaaaataaagatgaccaagttaccttatagtgaaatggtacttcttgagaccagatctacctactggtttctgggaatgtaacagtttggggctgcagagtctaggaagtgaaaaggaacatagggtagtgaatctttagatgatggctggtgagttgttggtgaaatcaggagacacccttttattgttagattttgttacccaagcattcatagggaagtcttacaaactgcctattaacttccagaatgcctgaggctgggtaagtaaccagtgactaaatgactatttcattcacatgatcattacatgatattgctgaagaaagtaattttacctttttcaaatgcctgagaaattttgccaactaaaatgcctaactttgaaaagccatattccccttaaaaaatgaattcaggaagacacacactgcctcagaatgagctgtcttctcaacatcccaatcttcctcctcatgcctttgtcattggcaatgtgcataaggttgtctgcattctctttctgaattcagggaatactagaagatgataagattcttgatgtgatatagagactaaatatgtgctttaagcctgaaagaaggagccatttttcaacaattgtgggtagtcatgacatgaacatatatagcatgattattttcatctacacagcccagtatcggattgaaccataggggtgtgcctacatttgacttttttttgtttttgagacagagtctcgctttgttgcccaggctggagtgcagcggtgcaatatcggctcactgcagcctccgcttccaaggttcaagcaatccccctgcctcagcctcccaagtagctgagattacaggagcacaccaccatgcccagctgattttttctatctttagtagagatggggtttcactgtgttggctaggctggtctcgaactcctgacctcaagatccgcctgcctcagcctcccaaaatgctgggattacaggtgtgagccaccgtgcctggccacatttaattaactgtttttgacctataaaagtggttgtttcttatgcattaactaataataacgaaatgctaacaaaactttattttttctccttattgatttcataactctgtttttagaaaaatgcagctaagtctttaagaatattgtcatttatcaatacttataatgtataacttataatagaaggcaggcagtgtcttacatctgaaactccttttctttggcagccgtattaatttttactcttctatttgtattgtgcttgcacaccaaactgatatagatggaaaacatatcttattttcaccctgacatgcatcaaaaatatgaatatatgtctctagttatatctgttaaactgtttttgaaatttctcatcctggtatttgagctgtaaatgctcagcaacagtcagtgactaaaatgcagctggattgggttatgatctctgcattaggttgtgtgggaagtgctctgctcatgactgcatactcttaagcttggccttggtgcgtatcatcaagcaggacttcttttaaagtgtgcaatcactgttttgccgatgtccttggttatatcactaccatttcaatgtgattgattgaaacaacttaaataacgcaactgccttttccctctgggaatatgtctctccaaaccatttttcttcagcctgattccaggtgtgttcaggggacacacacatacacacaaatcacatgtgacttagttatgatggaaaatattcaagtgagctgttcatttttcttacctattaatccttcttctcctgtctcccgcagttattatgtgggcatgtgtggagatggagctaacgactgtggggtgagtagaaatggcttttgctcagacaagccactcactaatatccctctggaggacctcaggctctcctggggtttgtctcttcatccttccaccagcaaccatttgattattttgctgtttatatccacctctacctgagtgtgggttggaagcggaggggagtaaagggagatgagacacttccratgctttctggaaactcctagaataataaacacaaaggaaggctacttagactcccatatttcaggttccaaagatggaactttacaagtctatctgctttaaatctttcctgttatcagtaatgaaatgatttctcaaggaggtgatttcttcccccctcccaaggtcacacaactgataaagactcaatgaaacgaagtttgaaactgatgattaaagttttgaattatatgtaaattatatttattcctgccaaactttcattctctggttagtttttaagtttgcttcacccagaactctttcactcagtaaaatcctagaccaaactatttagttattttatgctatagaaaaagctaaataaaatgattatcagcaaattatttttcatatgcagtagaagggcagtgaatgttttatattctgagttttaaagacatgaaggaaacaaatagtctaccttcaagattatgtacttaaggaaatatttcagtagctgatttatgggacaagaagtgaggaagatttctttgtatttccaaagcttattagagatttaagatcttggtatttgttttatttctctcttaaatattatttccaaatttctgtgaaaactgtgtttatagctagaaatttttatagctagagatgttttttgctttatgtttcatgagaaaaagctaatttttagtctgttctttcaaatctagaatacgtatcctctcacattaattatgtggcgtttagaataaaacaaaaaaatcaaatgcaaaaagggacatagtctctgcctcctaaagagttcattgtctgatgaagaaagaatcatgaataaaactaaccctaacataaagtagatggtcctaaagtacataatagagatacgaactagagatcaaagaggaagaagaaaatgtcctattatttattaaacctgaatctagtatgtactcatggcgccaggtactctgtagttctgtggaactacagatatataaaagttcattttatgcccacacaattcttataggatcggcctaggaattctttcacctttgttcatgaagattcccaccaggtacaagaactgaaacggtgaaggtccccaaccaacgtccatccaaattctgtcatctttttaattgagtttttgaatgagggcttccatctccttttcacatctataatccccacaggcagggcccttgtatgcacatgcccacatgcacacacgcatgcatgtacacacaccacttttctacctctgggtcattgtttagttagtgactttgtggatcaggggagagagggcactccaggtggagggacagcattaaacagagacccaaagatgaaacagtacagtgttatacctttatgatgtgaagaacagcctcttggtgttttaagaggtaaagcctaacctgaaaagtcatgggtgagacatgggcttatcattccaggctttgaaagcrgctcatgcaggcatttcattatcagagcaggaagcatctgtggcatccccttttacctctaaaacaaccaacatccagtgtgtgcctcatctcatcaggtaagtcattttttcctyttccagccctacaatcaatgggcccattgtctggctctgcagacagaattcaactacaagctaaagtgataaatactgcaacagaggaatgggtgaagtgctattggagaaccaatgaagggggccattagtgttactcaagagtgctggtaaaagccacagaaaagtgacttttgctgagccttaaaggataggtgggtatcatgtaaacagttgaaagcttgacttgatgttttaaaactaattgtatttcttactttttctctcctctatttggtatgttggatgcttcctgtaacatttctctcaggaattttggatggatgaggaagcagaaaggaaatacttcattagatagcttccctaaatactattacatgtctccaaaatgcaaattagtaaatatccaatatcttttacataaaaagttgattgacagtgtcagggaaggggaagtgatatggtttggctttgtgttcccacccaaatctcatctggagttgtggttcccagcctggatcatgggggcagtttccccgatgctgttctcatgatagtgagggagttctcatgagatgtgatgaattttaaagtggcagtttcccctgcgtgcttcctctctcttgtcttgtgaagaaggtgcccacttctccttcaccttcgccatctttgtaagtttcctgaggcttccccagccatgtggaattgtaagtcaattaaacctcttttgtttacaaattaccctgtctcaggtagtaatctttatggcagtgtgaaaatggactaatacaggaagccattaacagacgtttattttcacagcatgcttccctcccctccactccactctgatttctgatctcatgtctacttatattttaaatgtagttaagaacaaaacacccagttttatgttttattcataaatctgatttatctattgtttcctatagcacttatggataatttctgggcattttcatgggcagtgatctgaaaaccatcaccagattttgagattcatacaaaaaagacagccatgaagttccccagcatgtcctttggtgcatcagaataaacaggtcactggcaggaatcactgacctaaaggtagcaggtctaaaattccacacccctggttggctgcatatcagcaagacagctttacacaacaccctgaacactgggtgtctgcacgtgtgtcctttcacaccctcaaacacgatcacttcccctgcctccaaagcagctcctcttcccaactcccactttccttgcttctaagaacagtctactccttggagtctgccattgaggttcagacccttagagtgcgtgtaactccttcctcttcttcacccataaccaaacaagcattatgttttactgatttattttgcagagtatctctaagccctttggttactatctctagtgtcttaaccttggtttgtgtcatggtgactacatgatgatagtactcagaaccctcgccttattttatgctttccattgtcaatacaactcatggagctctttacaagtgtgcttggaaatgtaaagaatgagagagtcttgcccccggagaatttacattccagcaaaaattatgtgtgtgtgtgtgtgtgtgtgtatgtgtatgtatatgtgtaacatgttacatatatttacataaatacatatatacatatatatgaatgtatatataaatatgtgtgtgtgtgtatatatatttatatacacacacacatacaaataagtggatgtgggtcacttcccatgtggattgcttctgccctgaccagaggaggctgaaggagagctggtttgctgaggtcccactctcgcatcacgtgctgctacctcacgtcttcttttaacctgtcataatccaccattcagaaaacctgttaccgcattaacagctaagactgaatttttttaaaggagaaatatctcctttacatatatacatatatacatacattaacatatatacacacacatacacacaaatatatacattatttattgagtgtctctcatgcatcaggcatgttttatacacacacatacacacacaaaattatatatatacaatgtctgatacatgggacgtgctcaataaatttgcttgaaataaattaatgtccaaacaagacagcaaatgttctggcagttgagtgtgagaactcaagccaggagggaagctttcagtaggggagttgcaacttgaaaaatgggtgagacttatgtaaacagaaaggaggtgagaaggaattccaggtggggaaaatgcggcagccatgtttagacacagtgttgtaactggagaatgcaggggccagttggtgcaactgggctagaagacttctcagatgagaattgtggtggttaagctagacaaccagatgtggagaccttgcagggagtttgagctcctggataacagtgcaaagtgcctacttgatccattcaacatgcagtggcattcgaacttcagatgctcctcctcatgcatgtggcccagtgcatttatgagtgcagtgtactgttacggaatacaagtcatgatgtaaaatttctccagtggcagatggctcagtaagacgctagggtagaaactccttgcttttatatttcatagactcataaaaattagatatggttcagctctgttaggctcattttactttttctatccttgatgcatacttattcctgagaaagcactccagagaggcaatgagatacagttttagatgcataggatcaaatccacggattttcatctttgtcttttgaaacatgatttacttgttgctatagttcaagtcctttagggcagagactgtgtcttagtgatttttgtatcaagcattatgcctagcactatgctgggtatatcagagcattcagtgaacgtttgtagaatgcgtagataaatgcatgagctacttaaaattcacaatcattaggaatagcagtaattttggaggcccatttatcctttacttagaatagtttcttgtactttcctttgaatctgggtgtcttaattttcctggaactatgcacgattgcagaaaaaaacaatgaaatcgcaatgtttatatcagacttgggaaaacgatccatacttcacatgcttgccccttctcagcttgtcttctgctccatcctcagtgttgaaaacaaacgacagcacctcacagcttggtagaaaatatcttcccaaaatatcctggcctctctcccacccttgccttctcattttgcctgagacaaagtggttagtagtttggcttttaggttcttcttttcatgtccctgttctgttgaccacatctttgagcagagcaggtgtccatgttactggggagtagaaatgaagtggatgtgggtcacgtcccatgtggattgcttctgccctgagcagaggaggctgaaggagagctggtttgctgaggtcccactctcgcatcacatgctgctacctcacatttttttcttctaacctgtcataatccaccattcagaaaacctgttactgcgttaatagctaagaccgaatttttttaaaggagaaatatctactttttaagctgcattttttactgtcgtcttgatctcttgatctttatggcccactcagattattaccctggggtcttcctgcaatatcaaagccttccttacccatttaatctcaaatattagagtcacattcacacttcctaaaatgtcaaagcacctatcctttagctttatgtctccaaggacctctaaagcacacacaatgcaattcccaggaagcatgtattgttaagatgtaatgagtcacaagtgagtcaatgcttgacattttgcaccttatcataatgttgtattgtgtttataatacacatagtaatcttctcacttcactgaaagcttgttgaaaatgaggagtgtgcctgattcattttatatcctctatgactcttagcataatgctggtacttcataagccctaaataaaagtgagtaaatgaaccgatgagtaaggtaatgattgaaggagagaatgaatgaatgagtggttaaataaataggaggatgaattcatgattaagtgaatgtatgtcaacaggctactaaaaatataactcgttttaagtataaaagaagttgggagacatttatcatacataaccaatttttatttttatttctttttaaacagagaaggccgagctgctctggtttcatcctttggagtatttaaatacttgaccatgtacggcataatccagtttatcagtgcattactgctctattgggtatgaaacaaaatcattttgtctcagttctaattgcatttatgtccctaatttattattcagggtgtagctcctatacaagatttaatgttttataaacaaatgacatttctcaaaataggtgtctgcaaactcaggaacctggtgtaactgtgcatgaaatgtggaactagaaataagtacatgtagatgagttttctagtgtgttgtttttctcttgayaacctgagactcttcacctctccaaacccctgtttcttcttttggaatatgaagagagcttcaaagcagcctaagtataattcagcaggaaatggatgagtctccaattgtggaatattttcaacggaagactaagaagagataaaaaggaagagaagctgttgaatttgcttttgaaggactagaatgctaaagacctttcacaatggacccttattcctgaaggtacctagaatttatacagtcagggatatcattagtaaagaatcggaaattctttgaaactaaaaaagactcaaaattaaatgatgaaaatagccatttaaaaattaattagctgtacagaagaactatgtataagctaaaaataatcttcattagtccaaccatagcttgtactacagtaaaatgatccaacaggctcaaggaacacttcaggagggattattctattgctttcctgggaggtttgagaagtgaataagagggccacaagattataccatccagtgggctattgcttgcaagaatcacacacagagggctcaaaggcagcctggtgggaagaaacaagaactggactgggagtcagaaaacctggattcaagttcttcatccaaaagaacaaattaggtcttgcctttggccaaaacctgcttctgggaagctgatttttcagagccctccatagttccatgaaagcttctcctagaagaaaaactaaagctgcggttggaaatttcttcctgctccatctcattctgaatatataattttaccactctcaggtgaaaagaagaggaaaggatatgagaaagaaaagtaaagaagacaggaagaattggaggttgayagggacactgaggaaccaatggcagcctttcaaacatgtgaaagcagaaattcattttccaaagcctccacggatggaggtagaaaccatagtccactctgcagccattcattctagtggtctagacctaaataagagtgtcgcagaagaaccttaacctggtaccttctgggacttggattcactctctgagaagccagcaatactttccatgtgcataaatctggtctgtaatgtgctcagaaccagtttatagtttagtgcttagtcgacagatatgaaacagataaacagacctggctgcaagagatattgcaaggcaacttcctggagagtaatgatttgactttcatatctaaatacttcaactctataatgtgaacttgaaagaagttctgtctacacaaaccttaaaaaggcagatgtacccgactgaattctgcaatgggcttacttagggtaggagcctttgttcagtttgtgaaagtgaatggactccaagagacctatgttgtaaactcataccatgggtgaggatggagagcaatgcctattgaatgaattgcgccttcacttcaaattttaagtataacatttctaagggaacattcaggctttaacatcttatgttgagaattcaactgcctaggctgagactacagctgtcaggtaattaatgcacccaataggagggtggttctcaaataattgacttttgtcgctaatatgaagtaggttaaatgcagggaaaatagtcgtctggcctcattctacaraatgagatgctaataattttaggttagtcattttcttcctgaagagggaaaaaaaagtaacagctgcctcctaacgacttaaaaagagtgtagggaataataaataggctatgatggcagatgccacatttatatttgcttttgtttctttttcagcaactacaactctttggaaattaccagtatctcatgcaagatgtagccattactttgatggtctgtttaacaagtaagctctttagcaaagaaaactrtattgtttttatttatctatgaaattctagaaacagtcacacaaaaaggaacttttgagaaagaggcacccttatttccaaaacctcattatttacaattttttaaaagtgatattgggagtaagttgagagttgaaatcctgagacttggcattaaaacattctgacaacaaataggtcttagtcacaaaaaactgtcaacgtagtccaagttctttgtagttttatgtcttgtacatagaaaaatgaatacaaaayctagaaagggaattttttaaaacccaaaggtcactttccattattcagctatgcttcacattgacgtgaaaccagatttttttctaggtctttgatgtgtgagaacaaatgctaacattttattttagtagaattctccaaaagcaaggtgtggcttccaacagcagctattgctcatgtccttcctttgagatgacactggtaaagtatttcctatcaaggagctcaggacttgatgctgactcttaataagtgataaaggtgactgcctcaccagagagcaaggaaaaagaatggcattgtcatctctttttccttgctcaacaataggcatgttatgaaaaataacagataaaacatcaggcaatgtaggatattaataaccttgagaatttcatgtagcaccttagtacataaaactgatatgttttatgtatcaacccaatgactgaatttatcagtatcagagctataagcactaaaacatcaattttgattcttagggttgaaatgtctattcatagttcattaaaatatttttctacatgttattaatattcatatgactgaataattttgaatcaatgaaattgcttctacagcactggatattttaagcaatttgcatgatttatttgtgaatgatactaaaaagagaaaaaaaacaccaagaggtttcaagaaccaagctttcaggcagcagcatggaggtgaaggccatggctattgtggcctgttttcgtgacctctggctaactgtcctcatagaattgtgaggatcagatacaatgatgctggtgaagtgtgcatcacagcacaggacacactgagcactcattacaacatgaatcatatctcctccttttcctcttttgagaagactgactagctctctgagcacttgaagagccttagaatgtgtacagatagaccagtgtcattagaaatccaaaaacatggatgatcttcctagttctagtcttgcctccgacttrctatatgacactgagcaagttatttggagcttttgcacacttaattccatgatattagttatgtggtaatggggctgcttaaatctttcccacagcaatagcctgttgagcctcatgccagttggtagccctgggaaactcagtctcgcatctcagaatgggctctatgggagtgctgggatgactcacagtgggaccgttattaccactaggagaaaaaaaacctcagaagggtgacgatagaccagaagcataacattctatcagagtgacggcactttaattattactcagcagactgtagctagtaaatgggctaaactcagggagattggtgaaggagagagtagaggcagaaaccagctatgtttgttagtttgttttttaccctctacctgcaaacatcctattgttttcccgtctctgcaaacttactcatcccacaggctagtcatttcctggtcaagtctaggtattaagatgatcttatccttagacatgaaaagtccaggtattataattattacttcacattttcatctgattcaaagcttttcttcccttacattaagcctgaactatgggcttggggcaagcagtagacgagaaggccatggtctcttcttcacttcccttgagtcacctactctccacccctgtttctggggaagaagagcaacaagaagaaaggacttatttttatgatttttgtgttcttttttctgctgcaaattttaagttccagggtacatgtgcaggatgtgcaggtttgtcacataggtaaacatgtgccatagtggtttgctgcacagttcaacccatcacctaggtattaagcccagcatccattagctattcttcctgatgctctccttcctccttgcccttcccaacaggccccagcgtgttttgtctcccactatgtgtccatgtgttcccactgttcagctccacttataagtgagaatatgcagtgcttggttttctgttcttgcattagtttgctgaggaacaaatggaaaaacactccatgctcatggataggaagaatcaatatcatgaaaatggccatactgcccaaagtaatttacagattcaatactattcccattaaactaccattaatattcttcacagaattagaagaaactattttaaaattcatatgaaacaaaaaaaaagagcacgaatagccaagacaatcataagcaaaaagaacaaagctggaggcatcatgctacctgacttcaaactatactacaaagcaacagtaaccaaaacagcatggtactgatacaaaaacagacacagagaccagtggaacagaatagagaactcagaaataagaccgcacatgtacaaccatctgatctctgacaaacctgacaaaaacaagcaacggggaaaggattccctatttaataagtggtgctgggagaactggctagccatatgcagaaaattgaaactggaycccttccttacaccttacacaaaaatatcctgtcaaatgccctcaaacatggcaacacccacatttaggcaataggcacggggttcattggtgaattcatcagagcttccctgtggataggtatggactagaccacaccctgacatagtggtgctctctccctctgacttctcaggattcctttctgcagctgcctcctagtggtacataccatgaagcccttttctactactgggccctccaacccccagcaggctgccacattcataaactccttccaggatagctagctctagcctggctaatttccatggcttctacttaacctaccagacagtaaatagcttgctctcgctgmtgcctgccctttccctctgctattaccatgaaggggagtgagcaaggccaatatcctctcttaaaaccacttccagtctctctaacagtggctcttatgacttcccctcatggggttgtggtgatgctgagaagaaaaccagtttacattgctcctaacaattgcctttaaagaattgcttgataatctccataagttttatcttgtacagacagcatgcagcgaatgaggcaggaacagacatgcttatagttaaataaccaatatggatctctcttgctagacactatggagatatggcrataatctctcttcacaataaattggcacttgcaattcactgtcctcacatataaggctcggcacaattttctagacaagagaagcaccattcaacattcccttatacaagtgttcatctctcactgtatattagccacgtaggttcctgaggcatgagaaggctgattgttcaagttcagagttcagtgggggattcacatacatgaacaaataagatgcaagttgaaagtagtgagtagcagaaaacagcagatgctttgggagtccagaggaagaagagatggcttccgataatctggggttaaggaggagatagcagtggagaaaggagaaagatactaggcatggaggcatgaaagcagtagcattcacatcaaaataggaaagttggataagtttcaaatatcttttgctaaaagaagagcatttcaagtagaaggaagcagcatgagcaagagaaagctgataaatatggggtatgagcttttaatgtgaccacactgcagcgtatgtgaaatcttttattgaaaaattgaaaaagtgaattgggtcaaatcacagagaatcttgactgctggtctgagaactgtggacatttatctgcagcccttaggagtcatcaacaattgatgatcaatgtaaaattacagatgtccccgatttatgatggtttgacttatggtttttgactttacaatggtgcgaaagtgatgcacattcagaagaaagtggcatgatactctcttaggatgctgggcagtggcagcacgctgcagctctcagccagccaagcaataatgaggttaaacaacagacactttacattgtactgtgttgctagatgattttgttcaattgtagcctacttaagcgttgtgagcatgtttgagctaggctaggctaaactatggtattcggtaagttaggtgtacagcataaatgtattttcaactgaaaaatgttttcaatttacaatgggcttatcagaatgtaaccccattgtaaatcaaagagtatctgtattctcattacggcttcttacatttccaggtttccaggttaaggcttttggccttaactctgacttggttctgggaagagacaataccatcacatatttgatttatttacttatttatctatacacaccctgccttgttcccacaaggttttaaggcaatgtacagagacaaaatataatacattacagagaaaatctaaaagagaaataagatgaagtgaggagggatgttgatcaggcaatgcatgtctggaagtccaatttgactctattttgtgtagcggcatttttaaggagcttgttttgccacatctctgtcctcttcaacaagaactcctcaaactagatcaagaaaatagagggagggtttgtttaagaacataattctcaaaaaaatctaagaacaggaacttggaagcacctggatctgaggatgactagaacactaaaggataaaaatggaggtcactttctttatttccaggtggccaccttgtgtctcttcttctttccattcttactgtttccatctgtcttccatttattcaccctacagctgacctcataaaatgacactaggactggggctttgcagcctttatgtttgttttcttatagctaatgagctcagcctttcattgtcctatttgcaaatattttgaagagaaaatttatcgacctgacgtgggttagatgcccacctctaggcccctcatttctctgaatgaaggtgggatcgtgaaattcagatccatttaggccagccattccagcccctaggagaaggcagtatccagagaaggaggtgcaggagggactcayccattatagaagtgcatctcgtacaccccatctgtgtttcaatgactcctaatcttttctgggtcttggtccccttaaataatctgatggaaaatacaaaccatttcatcttagaaatctcatgatacccatttgaaattctgcatgtagtttaggtgggttcatgaacctcctgaaatttgtcttatatgattttcagtgtttggaataaaaagtaaaccaactacttaggagaaacacaactacgagatagccaaatgatgccaaataattaaaaactataagaatagaatttgaaactgcgaagtcttcccatgcaatagatcctgtgctgggtttagtaagaaacagaatgtggaawgagacaggatttcttccttcagggagctcacagtctgctgagtgcagatgtaaacaactagatttaatgcaagacaccctgcactatagcagcaatgtgagtaatgtgttgtgggaactcagaagggagaatgattaattttgaataccatataacacttcagaagttagtattcctctgaatgcaatctgatagcatatatcatcatcattttaaggaaacccagataatgcagaaaagttttatggggggatcctcataaatggtactactgtccaagcttgtattgcagggcttgccattttgttcttttaatttttgagatgcatcatactgcaatatgctgtagagtggagaacatagggcttcacaatcagaaatactggggtttccagtgccatgctgtcactcactaactgtgggtctttaagcaaaggaaactacttttctgagcctcagtttcttcacctgtaaaatttacctactttgctttcaaggaaataaaaatcatgtttataaacacttattagagcctctggaacctaacagatgtcctacaatggtagctataaaattattttatttataatcaggtatacagattctctgtcagaagtagtaagagtctctaacatggaaaaagtcagaatattctgcataagaaccctgtatgcattaggtattgcctcaataatgctgcataacaacccacccccaaaactcagcatttataccatcaggcagttattctccccattcatgggtttgtaagttgattgtcatttagctgatctaggtcagctcagctgagccagtccgctctagtatgtagatcagttgatcttggttaatgcttttggatttgattcaggtctactccacatttttcattctgaggccaggttgaacggacagatttggtattttctcattgtgagtcacaraaagcagagccacagggcaagcccggctgtgcaagcatgcttgaagtctatgctaacatctctttggccagagaaagtcacacagggaagcccaaaattaagggatgacaaartacaccccaccactctgaagccagcaattcagtctaccacagttactgtgtaaaagaaaggcaagaaactacaatgagcatgagagagaagaccaaagaggtagaagccagatgcacagagaagcaattttactctctccactacctgcagcctctttatgaatttatagctacattctgctttggatactggaatacagagagaactccaagcactaaagcctctgccttctgtgacctgaaagcacaatttccttgcacttctcctgagccctgatcacagtccacactgtgtaccccttcttcgtggacccaagcaatggcttctgacaccaaccacccagaattaggccaaactttacagattaagggtaaagcctccacaagaatgccctcacttcagacaccagccacaggtgtggggckctcgataccacctgaacttctgattagttggctacaaacttaggagttcccattactcccttgggttcaacaatttgctacaatttacagaactcaggaaagtgttatacttatgattgcagttttattatagcaaaaagacaaaaatcagaaccagccaaaggaagagacacctagggtaaggtctattaggggtctcaaacaagagagacacttccattgtcctttccctgtgaagtcaggatgcctcaccctcttggcacatcgatgggtgacaatatgcagagtactaccaaccagggaagctcaactgagcttcggtgtctggagtttttattagggtttcattatgtagacatgattgattgaatcattggctgtgaggtcaaacttagtctctaaccccactcccctatctggaggtcaggctgatatcctgtggatcaaagttccaaccctctaatcacagatggtcttttgggcgttggcaggacccttcctgagtcatcttaacacaaacgctcctcattcccaccatgagtcatcttgttagcataaactctcaaagcccaccgtgcataagaaaaatactcctatcactgagggcatttcaaagatttagaggatacatcccaggaaaagccagccagcttctttattacacaatctgtctgtgtctttcatggacttcaaactctttgaaggcaggtggaatgtccttctcatctctgcataccccacagactctagcccagcaccctgccgggaaaacattgattgatctggtataggtaaagacttagtcatagagctttagawaaagagttgaaagggcctttgggtaccatttaggcattccaacacattttatatgtgagaaaatgaaggaccaaggagtttacatgattaccccagaacacatattgaacaaagcaaagaaayactatagagttttatcatcccacattggacactcatttaccactactctacctgtacactcataaatacaaacttaaatatgcacaccccacttcttcccttacatcaaacaaaccagtgataagctgtgagaagggaagaggtgacaggtatgaagacaggaactgaaacatgactacaatatcagtctttaaattcaaattcctgtcctcctcatgcttccttcctgctctgccttgagaagcaaatacatttcattttcatcagcatgttcatatatgtagctactaaggatgtagtcgtctttttaaaatagttgtctttttattttctgcccatttccaaacgctttaaattaaaaaaccctgaaatcaaaatacaatatagtttaacactctcatctagaagcaatatttttcatgagttctttttcttaatgtaacatacatcagcagtcccccattcacctgtgtatccagagagatacttaatgcatctctagcatctatcacagtgcctggctcattgacatgctcagagaaagttggctgaatgaataatagagtgagtgttttttttaaattatccagcatatgaagatgaatctggctatattcctccttattctcctcattctaactctccactttcctgtcatcactgagacacaatattagtgttgcttatcccacgagcaaggccatttccctcttttacacacaatttctggtcagtctggttatggaggaaatagttgcaccatgcgatatggtaaatatattaattacaaaacttcctaacccacttttttatttctgaaggtgaagamagagcatggaagagacaaaggctggtggaactggatgtgccaccaggcaatgtgcttacctaggtgtaaatcttctgttcgtgtttgcttagtctgaatcccaatgccagactcaagataatatgcatctcaatctcaaccttttattctcaatgataagattgtaataggaaaaaaatgtatttgtctttcagtgagttcaactcatgcctacccaaagctggctccatatagaccagcaggacagctcctttctccccctttactgctttcaatatttttgaattcctgtttctcctgcattgtgcagatcagtgcatttctctatgtgaagcagcagccttggtattgtgaggtctaccaatacaggtaagttcattttcttagtgctgctttcgaaaggtaatttaataaatatccaatgacattgcataacttggcttgaacatatatcctaaaacttttaattaatcaaattgtgtcgctgcaaaactcaaatgatgggacagaacacagttaatccatggactactggggtggagtgggtgggaagagatctgtcacactggttgttaatgtatagatctaacaactggttggctgaatgaatatattccctggtattctgtttattttatagaccaggggttggcaaacatttcttagagggccggatagtaaataggctttgtgcactacatggcctcagttgcagctagtcaactccactgttgcagcacaaaagcagccttagacaataggtaaacaagtgggtgtggctgtattctaataaaacattatctacaaaatcaggtgatgaatcagatttggcctgtgggctgtagtttgcaggccactgatatagacatatgagagagatttgtttattttgttttttcccaaatgaatgttaaagttaaaatgtgaattgatggtatccttgttctgattgaattggactagaatcaggacaagtctctttacctccctgggctttaatgtttttgtggtaggctatagcgccgatggctcaagctttattttgctgacaaagtctttctgccgataaaagaaaaggcaggaaaagagctgctctctttgaaatagcaaatgtgcaaactgcccctcactccacagagcaccagaaatcagtaaaacagattgaaaactagcaaatgatcagattgtcatttagataaaaaatttggcaatttaagtataactaggaatatagaatctcattctgtttaaacactagattttttccaaaattggagtgcatatactcagagaactcaagttttgactgaacctagaagacaatatgttgtagccaaaagaggatggataggaaatcaggaattctaagaattcctgactctatcactaactagatgtgccatactagccctcaattttattaccttaatgtaagtatattggactagatactctttggttgtaaactctataattcaggccatctagtctgtctgttcctctttttgtaaaaatgctttgtgactatggaacatctactacaggcctacgtcagagatattgtgggtttggctccagtctaccacgataaagtgaatattgcaataaagcaagtcacatgaagttttgggttcccagtccatataaaagttatgtttacactatactgtagtctatcaagtgtgcaatagcattatgtctaaaaaagtacatgccttaatttcaaaataatttattgctaaaaaattctaatgatcatctgagccttcakcaagtcataatctttttgctggtagagagcctttacctcaagctgagcggctgctgactgatcaaggtagtggttgttgaaggttggggtatagctgtgacaatttcttaaaataaacaacgatgaagtttgcctcactgattgactcttcctttcatgagatatttctctgtagcaagtgaggctgtttaatagcattttatcccatctcagtactttcaaatttgaagtgaattctcgcaaaccctgctgatgctttgtcaagtaagtttatataatattctaaatactttgttttcatttcaacaatgcttacaacatcttcaccaggagcagattccatctcaagaaaccactttctgtgctcatccatatgaagcaactcttcatccattcaaattttatcatgagattgcagcaattcagtcacatcttcaggctccacttctaattccagttctcttgctatttccaccatatctacagttacatcctccacctaagtcttgaaccccaaaaagtcattcaagaaggttgaatcaacttcttccaaacttccattaatgttgatgtttttaccttctcccatgaatcatgaatgttattaatgacatctagaatggtgaattctttccagaaggttttcaattttctttgcccagatccaataaatgaatcactctctatggcagctatagtcttaaaaagtgtatttcttaaaaaataagacttgaaatttgaaattactctttgatccatgggctacagaatagatgtgtattagcaggcacgaaaacattaatttccttatacatctccatcagtgctcttgaagggtgaccaggggcactgtcaataaagagtaatattttgaaaggaatcttttttttctgagcagtaggtctgaacagtgggcttgaaatattcagtaaaccatgctgtaaacagacgtgctgtcatccatgctttgttgttccatttctagagcacaggcaaagtagagttagcataatccttaaaggccctaggattttcagaagagcaaatgagcattggcatcaacttaaagtcaccagctgcgttagcccctaataagagagacagcctctcctttggagccttgaatccagttattgacttatctctagttattaaagtcctagaagacatcttcttccaatagaagaggctgtttcatttccactgagagctgtttagtgtagacaccttcattaattgtcttagttaaatcttctggaccacttgctgcagctgctacatcaagacttgctgttttaccttgtacttttacatatggagacaccttctttctctcagtcttaggaaccaacctcttgctagtttcaaacttttcctctgcagcttcctcacctctttcagccttcaaagaattgaagggagttagggccttgctctggattagactttggcttaaaggaatgttgtgactggtttgatccactacccagaccactaaaattttcttcatatcagcaataagaccattttacttccttattgttcatgtgttcactggaataacacttttaattttcttcaagaactcctactttgcattcacagcttggctaactggtgcaagaggcctagcttttggcctgtcttggattttgacatgccttcctcactaagcttacccatttctagttttttatttaaagagagagacacgtgactcttcctttcacttgaacacttagaggccactgtggggttattaattgaacagatttcgatattattgtctctcaaggaatagggaggccccaggagaggaagagagatgcggaaacagccagtcagtgaagcagtcagacacagacaatatttatcgattaaatttgcattcttataaaagcacagttcgtggcatctcaaaacaattatgatagaaacgccaaagatcactgatcacagatcacaataatagaggtagtaattatttcgaaaagtttaaaacattgcaagaattaccaaaatgtgacacagagacaaagtgagcacatactattaaaaaatggtgccaatagacttgctagatgcaaggttgccacaaacattcaatttgtagaaaaatgcaatatctgggaagcaaaataaagtgaaacataataaagcaaagtgtgcctgtatgtgcaaaaagcatttctagactacagggagcccaggataataagtattaagtcttgcatttgagttcacgttagaaaatgaatcttatttataaacagttgtaatagtggtttaaaagtttcaagctgaacaagaaagctggtggaaactaatttgtaggtttaattattgaaaaaaaagaacattggaaatagatcaatcaggactgggaaagctcatatcttggacaaagattttttgagtaaatattatgtgacctcactttgctaggtgccaaaaatttattgtaaatctaactaaaaccaaaaaacaaaaccacaaaaaaatcccatattctaggaactctcatcccaaagatgtaaaataaaattatgtaaataaagaattgcaaaacaatgagcttgctatgtgttattgcctttaaccgagataacatttttttaaatgtctttacttttgtgggcactagtaccacttgccagcaaaagtaaaggcatttcagatgcagaggtgtttgaaggacggatgttatatcgcagttaaaggcaatagcacatgcaacccaacaggtatgcaaattgatacgtggggaacagggaataatcctatatgtttggagtgtatagagcatgggaggagtggcaaaaggtaagactgaaaaggtagattgagacaaggatgcaaagatctcataggccagttggagaagtttgagcttaatttatcagcaaaatagagccgtagaccccttataagcagcagactgtcatgttcagattttcaggaagatcctttagctatctgagggaagtaaataggagtggcagactcaaactcaaaactcaagttaggagtcttgtttagtccacgaaagagaaaaccacacacacacagtttaattgacatggtctatttactctttgaattgataggaattcataaaatattgtcatccaggccctttcaaggtagatcacttgttctaaayggagtgccagacaaagaacaatcttgacttccttttatttctgctttgtcatagcaagaggtgaacaaagtatgtcttggtagttactggctgacatagtttgaaagctaaaatcccatggtagtgattaaattattttttttttcacctaatggacaaaaatggaatcaaatgtttcataaacactggtgattcttttgtagtgagtgttttctggccaaccaaagtaatttttcaacaaatgtgagtttggaaagaaactggactggaaatgcaactctgattcctggttcaattttaagttttgagaccaccacactgtggcccatcaccaccatcaactatatcacagtagcattcatcttttctaagggaaagccatttcgaaaacccatctatacaaactgtaagtatataaagtttaatttttctttctgaatattttcccattccctttctcaccctagagttgtacctcactggtgaaatgatgggctgaggaagaaacaattgcatgactctaaaattgttgttgaatgcagtggtcatcgttggtagagcccacatgcagaaaatctgcttgtttgcagataagcacagacattatttaactgtcacatgagtcttgtcctattgtgagtcatcaagaatcattttaaacacatacatgcatgtgaagatattttattaaaggctttctaaccaattcaaatgcaaattaacctctttagccttataacattgggcaagttactttaaccattctatgaccttatttcctcatcggtagaatgggagggagtatccttaatttgttaagtcctgagggaaggactaaacaaagcattttatggaatgggcctagcacaatttatgtaaagrgtctggcacttataataggggctcaaaaaatcttacttactttccctgtgtattaatttaagtagagttttttaaaaactcttcaaagctacaattaaggtcctcccagctaaggctgggagtggtggctcactcctgtaatcccagcactttgggaggctgaggtggaaggatcacttgagttcaggagtttgagactagcctgggcaacacagtgagaccttgtctctaaaaaaacacttttacaaattagctgggcatggtggctcttgcctatagtctcagctacttggggaggctgaggtgagaggattgcttgagcctgggaggtcgaggctgcagtgagccaggatcacaccactacactccagcctgggcaacagagcaaggctctgtctcaaaaaataataataataataataataataataatccgcaggccaaagaagccagagaatatgccccatcattactgatcagactgggacactctttaggagtgaagtgagacactattaataattatgccaggcttaaatagagaatgtcaaggcaaactagatacatgatacctatccagatattgcatgataaagatggtcaccctatcaagcaattggcttcagtatgataaataatgctataaaagtatacttgtgtaaattactttgacttagcctcttatttccttaggataagaaaattcagttaactggtaaaatagtgtgaaaatgtcaaagcctggaatacacaatttaaagttgctttctagaaagtttgtactgattttcacttctatcagttgttttggagagggtgtgcttcttaatattatatccaacaggaagtactagttaaaaaacaaaatttgtgctggtctgataagattttagaaaacagtgtcttatttggttttagtttgcatttctttgatcaccagtgaggagaaacgtattttcatgtcattagcaatttcttcttctgtgaattgtgtgtttacatttttaaacttatttttttctgttggattgctgtttctcatttatttgtatgagctgtttattttttgtgatcttttttccattgtctttatgcacaggaagttttttctaattatgaaataggatagattatcacaattagttttaaagtgcttttaaaatctaatgttaattttggtgtatagtttgaggtagggattaaaacaagttgctccaactagtcaaccggtttttctagcagcttttattgactattgagtttttaatattcaattatttttccactgaatataccaccttcatcctatcttcatatatgtgtttgtctgtacatcatttatattatgcattgtttgtatgtgtatgtctatatagtttccatactatcttttttgtttttaaatatcagtctattcttgatttaccactatactttaaaacttatagttttataataagttttatttaataagtggcaagatcagtgtatcctcattattcctcattttaaaaaatgtatttatttctttcctgttcattctttaagataaactctagaataaattgccaggcttttaaaatttccctttgggattttgatactttgggaagaatttacattggtatataacttaatcttcccatttaggaacatgtcatgtctccccatttattcttgctttttgttaaggtctcttagcaaatattcgttgttttctccattacaaatcctgcctgcacatttatttaagaaactaattgggccagacgcggtggctcatgcctgtaatcccagcactttgggaggccaaggcgggcagatcacctgaggtcaggagttcaataccagcctggccaacatggtgaaaccccatctctgctaaataatacaaaaattagctgggggtggtggtgggcacctgtaatctcagctacttgggaggctgaggcagggagaattgcttgaacccaggaggcggaggttgcagtgagctgagatcatgccactggactccagccttggcaacagagcgagactccgtctcaaaaaaaaaaagaaactaatcctttgtattttatatttttgcttatattgtgaatgactttcccattatatttattaacgaattattactaatacacaggaaatgtatgttgttatacatgaataatttttaaaattataaatgtattttacaagcagtatatatttgttgcctagtactttaattattattannnnnnnnnnnnnnnnnnnnnnnnnnnnnnnnnnnnnnnnnnnnnnnnnnnnnnnnnnnnnnnnnnnnnnnnnnnnnnnnnnnnnnnnnnnnnnnnnnnnnnnnnnnnnnnnnnnnnnnnnnnnnnnnnnnnnnnnnnnnnnncctcccaaagtgctgggattacaggggtgaaccactgcacctggcctagtactttaattttaatagtagctgcaaagtccttttacatgaattgagtgaattagaggtagttacctcacagtgacttaaagcttgtgggtaaattcaaacccctataccagacataactgataattttaaatgtaaaatgttttacattttagcatacaggtatgctaacaaatgtaataagataacaaacatatactctcaggttataagtcaaaagcctctagaactactattaaaatatacaagcaactttattttgatgtaacagaaaactctttgccctttttaacagcctttgacagaagctcaactttatgaaaaagtagaggcttaacttttctggaaacaaatgtgaacattactaaccttacctgaaaataaagtgtaatggcttacacaggatttgctttcctaaagcacctgcattaacagagccctattctttcatgtttcctcagcagcagcaactaaccaagaagagccaacattcaaatctttattacatcttttcaatcaaagctgaattttaaaagatgaccttataattttgtttctacattgctcacttgtgcacaggcgagacctagtttttagaccattagacagtgatgtgcaccccactcagccccagttgctagtgaggtctaggacttcatcagaacagacctttcaggcgtcctcttcttcccagcttctgcgttcctgggactccaaatccatgaagtaaatgaaaaatccacacagctatttcctgaaatcgtatcaccaagccatttagattgctttatcctgagagatgcaattcctacttttcttctgtctgcctcatacccttcccaagcacttctgagacgtgctgcatttatttatatacataaagtgaggcatgaataaatattgagggtgtgtgtaggtgctcaaggatgaaaacagaactctgttcacttcaaaaatagagcctgctatcaaggggcagttgcctcagatttctggttggtataggcctgtagagagttgggggtgggaggagtagatcaacactgaataaatgaggtagagtgtaagagaaaacctagtttgttcacttatttataactttataggattgtcagaatcatttgtatcatggcaatgctgattaaatgctgttgtttgggcctgaaggtgataattctattaaaaaataatatttctaaggtaccgtctctaaagtgctctgctaaaggctctgacagaggagtgggtgaggttggaaataagaacagagatgctgtcacagtgcatccgggaagtttagctcccaaaattaaaacaatttgggcaggatggaaagaagaaatgcaacagatgtacatgctaatttctcatttactttttcaagtcagagttccagagaaccagagataaagccactttcaaatggtcacagtccagttgatacatgaattaagatcatgcaaagcagaatatgatacatactatatgaaataagcttttgtaagggagtattactctttgaagaggaagtggtattttaactggtttaagaaaaattggaggccaggggtgtggctgatgcctgtaatcatagcactttgggaggccgaggcgggtggatcgcaggtcaggagttcgagcccagcctggccaatatggtgaaaccccatctctatggaaaatacaaaaaaaatttagccatgcatggtggtgggcgcctgtagtcccagctacttgggaggctgaagcaggagaattgcttgaaccagggaggcggaggttgcagtgagccaagatcgtgccactgcactccagcctgggtgacagggactctgtctcaaaaaaaaggaaagaaaaattggagcatgccaagacaggaagattattatgtacacaggtacacagggcttttttttttttttttttttttttttttaacaaagacacagaagctrgagagtgttgggcctccgtggaagctggaggttttatggtttacctttccaattgcccataaggaagagcagtcagagaccaggttagaaaggctgattgggaccagattgtggaaggccttgaatgtcaatagaggatccctgaactttattctccaggcaacrgggaagaatgagatggtgccaagaacactgactgtttatcccacgcaagcacaactcactggacacgcagtgatagtgcaccagggcagctgctttatggaggttactttaatacatttgattaacagtctctacatccagactttcaargaaagattctaagatattaccttcatcttataagcattaraacatatttcaaaacatatgaggatatatcaaaacatctgaagatatatctggtatttgcccaacagagataattgattctgcaatgtgtgccaaattatatgaaacattcttttaacatctaaaaataatgtttggtatttcctcagatatattttcatttctgctgctagctgccttgggcctcacaattttcattctgttttctgactttcaagttatataccgtggaatggaggtaagtggcwttcatttgcacatctggcatgactcatgtacatggaccatgtattcattgyaattcacaagtcaattattactgtattctctttgaccaccaaatactgtgaggctatttctatatactagaagggcaaataagatatctggatttcacctatactggcctctaatggttttcatattattaatattattgggtacatttatcctgtacctacctgaaatattrtttggatactttattatgctatgttataccaatacaataaaattaatgcaataatacaataattttccaagtacaattttcaaaaaaataaaccatatcatagaaatcctttataaagtagttataaagggaaagaaaacatagacttataagacagtcatgttttgtcagatattgactacatgaagttttatatcagtggatataatttgatccaggatgccctgggttaaaatctaattcatcaaggctattgaactaattcttggaccccgtattgtgagagaaataaaagagaagggttggctcctgatctccgagtcatagatttgttgtgaagatgagacatacttgaacgctacctgaggctatccatacttgaaaagagtgtgaagacagacagaactgggaagaacatagaagaaggaggccccactgtggactgtggctgtcatgggaggcatttcattgatgagatgcaacttgacctgggttcaaaagaataggccacattttgccaggtaggaggtagggatattcccaataagaacagcctaagacgcagagaggactgaaagagcttttgttttagaaatgcaaatgaatgtacggtggcagagacagaaatcaaaagcaaggcttacccaagcactagaagactggctaaaactgaggccatgtgctgtggagtatgaacaagaatgaataataaaggcaggcatggatggatggaggcagctagagaagtttagactttatgccaagggcaacatggagtgaatgaagctatctgagcaggcttctcagcagggctctgaagacagactaattagatgacggcaggaagactacatgtgagaggagagacaagcaattaggaaatgaaaacccaagtcattcatttatcaaacacgaagctccagagtgagtttggtactagagttacaaagatgaataaggtgtggtcactgctctcaagtagtttagaagctaggggagaagaccattgcataaataaataattccagggtcaggcatggtggctcatgcctgtaatccctgcactctaggaggccaaggcgggtggatcacttgaggtcaggagttcaagaccagcctggccaacatggtaaaaccccgtctctactaaaaatataaaaattagctgggtgtcgtggcaggtgcctgtattcccagctacttgggaggctgaggcaggagaatgttgcagtgagctgaaattgtgccactgcactccagcctgagagagcgagactccatctcaaaattaaacaaacaaacaaataattcaaaatcaagtgacttccaggtcaagggatggagaagagttagttctggattggagtggtggcagccatgagaaaaagagccaggttctctgctagaatctgacccagcttttccaaacaaccctttaatccaaacaaccctttacaatttgctgtatttcacaacttgattaagactgtctccacctggggaaaaaaatgacaaagtattactttgaaataacccgtatcagcataggggtgagaattagggataagcatttagatactacggagggtcagtgagttttgttctcaagggagttcagtcccacacgcagtcagccataaatattccactcttgggtggggtctcagaaaaaaggctgtgtaactagccttttgctatggatgcagccgtgggaagttatggctctcacactttaaataagcatatttaatgattaatgtgtacccttaaattttaaaaactggtgggtttggagggttcattcaactttcattaacccatcagacatagggccagaagcaatctgcatctagtctcaatcaaaatatacttacatttctctgtcctccttaaagaatgaattccmsgtagaatttgctttgggagaattggaaatattaacattatttgatgaatgatttaatcttagccttctgtttgaaaagataaaaatggagacagacacatagcctccaaaatgtcctgtctcgtatttgtgattcagggcacatttctcagtaggcaccatgaggctgtcaaaggtacacaggccaagaggtagtccattctcctttgaattctggttctgccatttatttataggctttgagtccttcagttgtaytatctgtaaagggacaaagtaatgcccaccactaagctcagagagttattacaaatctataaattaaataattaatatggtcttttttcaaagtgtgaagtgtgcaaaatataataatggtatttgtttttcaacagttgatcccaaccataacatcgtggagggttttaattttggtggtagccctcacccaattctgtgtggctttctttgyagaggtaaagtaatctctatattttttctaggaagataaacaaattaaggatctcattttcagcaggtgcttattttctagagcaaccactttgatcccccaaaatgacagttattaagggtttattaaaatggtacatattcttttggaggaaaattttggggggaatgatttaaaattatttgaagtctgcatagaaatgttcttgatatcttatgcatagaaagcaaaacatgtatgaactctaattttgcttccatgaatgcactgtattgcacttttctaatattttcaacaatctagtaaagactagaccaggtgaccttccaaccctaaaacccaaagagactttttagagtgaagaactgccttccgcagggtttccataagaaagaggagaagccgttgcttattctagtcaattccttttcttgaaggtcttcctcttacggtgtttcttttctactcagtgtcactaaatgactttacccacttagtaagaggctcaagtattatctttgtaaaaggagagttcttttttgtaaaaggagagttttattttaactcatgtgctttaagactttttggaaaagggatcaaccaaattttaaaatatatatacacctcattatatatgtttaaaggggattccatttttgagactatgttttaataacccaaaagaagagaaaaatactacatgtatgaaggcacttatcataatattatctacagtggcaaaatattacattcaacttaagtgttgttgagatgctgtttttttaaatagctatacagcgatttgaggaaatgctagtcactaaaaatcattattaatcatattgtacctacgttcttcccataataaaataaaaatttttaaaggctaaagctacataaaaattgtttaccacagaaagtttagcataaataaaactgggatgcaaaatttgaccaatttcattactataaatggataaaaactgtgtgggcatgtgaacaaaagaaaactctcaaaaaatgaaaaccaataaacatttgatttctagagctcaacactttattcaacaaacgcttagacaccttttacatggcaggtggcaggtagcaaggctaatggtgatttttcttttcttcattttgagcacgttattgctgttaccatttcagtctgaggggaaaatcattctaagaaaatccctagccaggacttaaccaggaaatgtgtgaaaaggaaatgctggaagcttctggcagatttccgtgaaaacaagcaccctctagcttcttaagggcagaattccagaacttgggaaaggagaggtagatgcaacagcaatgagcacacctcagaggaaggcctggggaaaggaggtggctgtggtggccagcggcctggctgcagggggacctgcgcaataaattgattgttttcccatctgatttttcaggattccatccttcaaaatcatgaactctggctgttgatcaaaagagaatttggattctactctaaaagtcaatataggacttggcaaaagaagctagcagaagactcaacctggcctcccataaacaggacagattattcaggtgatggcaaaaatggattctacatcaacggaggctatgaaagccatgaacagattccaaaaagaaaactcaaattgggaggccaacccacagaacagcatttctgggccaggctgtaatcagaattgtcgtcgtacatgctcaacagcattgcttttttccccaaaattaacacattgtggagaagtgatgatactctycccttacctttcctctctccattcaagcattcaaagtatattttcaatgaattaaaccttgcagcaagggaccttagataggcttattctgactgtatgctttaccaatgagagaaaaaaatgcatttcctgtatcatccttttcaataaactgtattcattttgcatagcattattttgtttaaaatgagcagctgtcatggtactgtagtcaaattagtagtatgaacatcaatggaaaaaagaaaaattgaggcaacatttggtctttgaaagttttactattagttgtcacaagtttacttaaatctttgtgaagaacatttacatatatatcttttcccaaggtcacagttcctctttttgtttcactggtatgcttttcatagagaaacaaggaccaacatttacttcagaaattcaaccctttcggaaattcaaccctaactataataagccagaattgtgtggaagtggtagaatgaaggagatgtttgttaattccatataatcttggcatgggcacagttaatatataagcaaattccaccaaagtttggcatcactcagtgtatagtgtttaggggccagtgaacaggaaagtttagagtagatcacaaaggtaatgaaataaactgtaaaaagatacttttacttaaagaagcatagcaacatttactgcttgttactgacacatgaaaacctcaagcttttttttgagatggtgtctcgctctgtcacccaggctggagtgcagtggcacaattttggctcactgcaacctccgcctcccagattcaagcaattcccctgcctcagcctctcgagtagctgggatacaggcacccgctaccatgcccagataatktttgtatttttagtaaagatggcgtttcaccatgttgtccaggctggtctcaaactcctgacctcaagtgattcacccacctcagcctcccaaagtgctaggattacacacgtgagccactgcacccagcctcaagctctaactttaaaagtcgtccagaactcaacattactcatcttaaaaacaatgctagaaaagggacttatatttgtaactgcagcatgacagttctcaggctactaaacaatcttaagttctatttcatcttttaattatctaaatcatcttactagatgcatattaaatagcacatgaaagggtgcatcctttacaaatatattctgtacactattaccttttatatatcaccctcaccataaacttgagagaaaatttatttctagtgaacattttaaattacctactggtctttccttataacgataaatctgattttgctaatttaacagaccataggcaattagttaaccagtttcattacatgagtgccaattatgtacctaataccatgatgtacggattcaatatatgatagccttgagtttacaattctgaaatctttaggaatgataaatgtttcaacatgaaattcgctactgtaaatcatattataaatgttacacaaaccaccagcataaatgcaaattcctataaaaacaatccctctgtgtttacattttgtttgctttttaaccttttcttgtattcacagctctctggagagtaataatttctacaatgtgtataatttagcagctactggtaacaagacaaaagttttaaaaagaagagatttttagtttatgattataaactatgtatcaaactaaaaaaatggtagttcaggttccttgagctgacatctgcatttagtaatttgacttttagaatgaaaagattcaattgatacactgtataatatttcaatagcataaaaagattttttaaaaaatagattcaataaagttataggctttttctccccccaggttttcctacaacctataaggtttctggtggataacgatctttatttcataatttttattcttagaatgtgataaagttgaactccattcctgactgttaaaaatatgctcagagaaaggtttaatagtcttgggaaaatcatttcataaaagcacaatgagcatgatatcaaataatcacctataggaaaaacaagctggacagtcttaagctggccatcatcaagagtaaccagttttatgggaaactgatggctaactttgtgagctaacctctaagggtgaaaactaccacaccctcaaacactaccaatgtgaacatgaatccatgaatttaatttaaaagtgcatttatgacattatctagcacagacaggactgtcttctggagtggagacatccagaattctccagaaaggctgcacttgaggctcttaggaggttcttgacttcaaattttgctccttctcccactggtgggtgtagtaattcccctgcttcgggttaagatttgccccgtgtaggcatcctttactgaaaagggtaccttgggaaaggtaacacattatgctactgccaggctcatcttaacttgacaatactagaaaactgggtttttttgttttgttttgttttgtttttgaggtggagtctcgctctgtcgtcgcccaggctggagtgcagtggagtgatctcggctcactgcaacctccgctcctgggttcacgccattctcctgcctcagcctcctgagtagctgggactgtaggcgcccgccaccacgcctggctaattttttgtatttttagtagagacggggtttcaccatgttaaccaggatggtcttgatctcctgacctcatgatccacctgcctcrgcctcccaaagtgctgggattacaggtgtgagccaccgcacctggcctgttattgtggtttttaactattacttgggaacaaggcataaaaggaacagagacttgaatttagagtaaaaatgaaagagaaattttctctcattagttcctggtaggagacactcacacccccacagaagaccagtggaagaagagagtctttgagggttactggagacagagttgatgccataagaaagggagggaattattgaaaaagaagggacgagatatagggtctctgtggcctggactgcagcacacaactccttccattaccattattattaaccctgcagttagcttgttgagtatttctggccctggggtaaaatctaaatcagtttaataggtacaagactttcaccgagtcctctgttcagttacattatgtactgtattcctagctttctcactgtatcaaccccctaatattaacttgaacatttcctttatttaatgccaagcttttgatgatagcataagacggatgtcattggctggtggtgtagtttatggggtcatgttacaatgtctgatgtaatcctaggttagagagagctgcactccccctttctccacctgctgcaaccaagaatttcactggagcagcataaaaagcagtgtctttaattcaacacataataaaatgagagaataaaattatgacattccttggcttgtaaaaaagtcttaaaaatatgagatattgttttccaaatatggcattttaaacaaacatttaatgattgcttctcaaggttaaaaggtcaaatccctgaaacacttcaaaatccaaagggaataatatgtaacactgtagaaataacagcccactcttacttgtcatgtcctcctgacaagcaagtagattccacacaaatcaccggaactgaaaccctggagcaaacagcctctcctcttcccatccaccctcatctacacaggcaggaagaagatgagggtgcattccccaaaaggcttgtaaattagagtccctcaaactgcctaaccaaaatgctaaatttcccagtttcttttccaacaagaaaagaaacatgaatttggatgtcaactcttaacaatctggggttcttaaaatttctttcaaaaccatatataaatagtctttcatgcctctggcaaaatggccacccttggggaaaaggaaaataatatttatagtagaaataaaatgtgatgagattttgttaagatcttctgctggctcactcaaaagactactgcttctccgttcaagctgccrcagtacatctatgctagcaggggaaaaaaatttcattggctcaatgataagataatatcagtaagcaatttattaaagagtctgccatccatcataggaatctggaacagtaatgatgcactgaaaataagtattcaccccaggtttcttttcctcctcccaaattccttcaatatcaatatctctttggtaaattgttaatagtattttgctctttgtccttttggaaacaagcccaggaatgagaagacaccaacagcagctgtcacaaactcaacggtacttatcgctcggttggcctataaggaaacaagaagtaaacaaaaaacacatcatattctaaagacatctgtgtcctaaatgaagctttagcctgtttcctaaactgaacacctgttttaatgtacaatggatacatctaaagtacaatgcaaaattaaaattctgcataaagatgaagaaataaatttataatttgtataattatgtcaaagatgtagatacgtacacatgggtatatattcctcatatttttaaagcactctgacagtttataaactaattatgaacacagttcccattcatcataatagtacactggtgaaagaggttaatataccactcttgttttgcaaaacttgggatatcataagtagtttgcctgagatcattccacgaagatgtttaaagataggctgagtcttctgaaacacacgttcttctcctatgcagctcctgccccttaaataaacactttggattggttgggtctacaccaaagtaagtatcgtgtaagagtgtgtgtgtgtgtgtgtgtgtgtgtgtgtgtgtgtttcagggatgtcaaatagcaaataattcagggatgtcatctgagctaaatacacataagctcttatttggtagacacaatttcttttctgataaacaaatttcaaaaaaagccaatactgatgttaactatcatgtcaaaaattaatttctcatgtagacaaaccactctcaagatcaactgtccataaaggaattcagacatttatagctttaagggtattaatcatcatgatgatgagagaactaatgaatattcatggtattcttggcactcaactaatattgccttccattcaaatgggtttgagtgcaatttgatgacccaaaggtcacattcggacacttcagaattatcaagtactctgaaaacatatttgttctctctgggattgaagaatcaggtctttcaaataaagcaaaatatttttcccaaatgactctggggaaccagtctaagagctggaaagcctaacccaggtcatatttgagcatgccctctgtctaaccacagccttccaccgtggaacctgccacccacgtattactgcaacacaatgctacctccctaactgcagcttccctgttaggaacaggcacaagggccagggccaggaaagagggacacaacagaactcttggctccatgtgtttgcagcatgtgttcattccactacaccatcctgtggtgggcagagactaggcctgtaattgtggcccactgtctctgctccaacccccagatgccagggagaatggtaagggcaaacaacttggcactaaccctgaaaaatcctgttttactttataattttgattttatttgatttcttatctattttatttatattttaatccttacctaaactatttcctaagagataatcagaattcactgtagcacagagccacccatatgccatattgggggagcgggggagaagaggcagggagatgcaggatataagataaaatcccaaagaagaggaagagtcactaattagacagggatcaagcccaaccctagtacaattccagcagatagtgagatcccaagaaggtctaatagagagaaatggggtagtcaataaaaaaaaaatgaaggtgcaatcagtgtctttaaacagaggtgtcaaatggtagcagggtacggcccttggaaaatggcaggatcctatagatggtgtggccccagctagatgcagacctaactgactaggtatctttcagccactagaaacacaagatgttaatgaaagctgacaaatttaagaggcc

SEQ ID NO: 93529 - DNA, 13996 bp, Homo sapiens
actgtcagagactactattttccaaaaatgtaaaatgtatagcatttgtctaacagctcaaaagtgtaaggcaagttaaattctgtttcagctgtttaaaattgcatattaagttgctttactgcgattccaagcaccttgacatgagaaatggtactatgactttcgtatatttctacacacttgtagtgagccttaagcctagtttgagagatatgctttaaaatagccaataagattacaacttagtcaaataagttgtgaagactttatctcttacatgcttcttatttatagattttttgtgctattatttaacaaatagattatgaactagatgctgaaaaggaagttatgcaatttctgttcaatctgttttttaaaaaaactgtctagcaattaaatgatctgagtgaattggagtttatgattctaattttacttttctgtgttgtctcctgatttttttgagaagccaactgaacggtttgatagtagtttatattattgtgtaggtagtatattctaggagatgtttagaaatttaaaactcattatatctagtttaattcctaatatctccacgaaatagctaatgggatttgaataatggcctgtataaatcatacatttatgctttaattattgcattactttaattcattcatttgttcttttagccattatatattattttcccattatgtgtctagcatggctgtagatactgagattgcagtggtgaataagccaatcaaggcattgactctccccagtttccagcctggtagagggcaaaaatatcaagtaaatgagtaagtaagtaaacagataacagatggcaataaatgtatgaagaagattaaaaggtgatatgatayagataaggacatatagctaagaggagctcttgttttaactgagatcagaatgatagtaattaactagccacaacaagataagaagaagccccttttcaggcagaaaacacagctagtgtaaaaagccaaagacgaaaatcagtttatcctgttccagggaaacgagaagttgaatgtgcttgaaatgagtgggtaatgtgaagcataaggcaagataagttaaggaggcaggcagaattaaatgatttaagactttataagctagggaaagaattcatatcttaagcgtaatggaaaactactagagtttttaaaaatgtcttttatgtaaacagtgaattgttcacggtaaaagtaaaggctgagagttcagctagggtgtccctgtagcgattctgatgagagataacattaggtaaacatagaaggtaatgcagatggagagaagcagatagtttgggattatgtttttgaggcagagttgaaaaggctttcagactgattagatgtgggtaagagagaaaaataagaaagagaatttatctgcttaaacagcttattgaatgatagcaccatgtattaagatgcagatcagaggaaaaattagttttggggtgttatgaccacttcctattcatcccattggtgaaggaggaatctcgtgcccaaaattataggagatgttcaagcacacaacccctgacactggacagatgagatcatccagccacaacacactgcatgctgtgaagggccacacaggtgttgcactcaggagctgagtgaactgggctgtgggaggcaggctttgttagtaatgggagggtgagatgtcccctggttcctgcagaaggattggattgctttgcttgagtaattgtatgggttggccgggagattaaacctgttaggttgaggacagggtagaatgcaacagctgacggaagaactagctgggcagagaacatttcctactgagtaggggcatatctggtgacagcaagagaactcacagataggcctttcgggccctgtaaagttaaaaatgtcaaggcagcacttgaaagtttaggtcttaccctacgtcggggaaattaaggtccctttggccatgttacatttgagatgactgtaaagactgcatcgaagtggagacatcatgttgtatatgtaagtctgaaactgtgagacatcagaattggaggtaaagatttaggcgataaggacatttaacatcatgggactgagtagaagaatgtgtagatagagaagagaaaaggttgagctttagatgcgtttcaacattgagagttggagcagaggaaagggagcatcaaggagacttggaagagtagctattgaggtaggaagaaaaccaggaaggcgaagtgttatgagccgagagaagcattccaagaaggaagtgattatttctgacaaatgctgctgagttgtcatagaaggtaagtaatcatcagacctacaacgtgataaccttgacaagagagtctctgtagagttgtgggaaattggatgttcttggtaggtacttatttatagttagttgaaactagtggtgtctgctggtctgtagcctctagttactgtttcctgttaatcgcactatgtaaaaaataatctatggaatcaaaggcaaattgataagctcagaattccatagaaaattggcctcatctccctttcacaagtcaatgtaagattttgtgagctgttttctatccaatagtgcaattgcttatggtcataggcaggagtataacaagcaccccatggccctgcctttctgtcatggcacactccatgattggttatactggggccctgttaacctactttattttcacaaacaagacaagctcccatctcagagcactggcacatacttttctctccgtctggaaacataatctcttttcttctggatgatctcaactttaggatcaccttaggtttcttcttaaatgtccctttcttaggaaagtcttcctggtctcataaattggcttatgtttccctgcaatgcactcttatcctgatttttccctttacaactcttgaacgcatctgcattccatgttcatataattatctgagtactatctcctttactcgactataaattctatgaagtcatcttctcaatatattttattcttcacggtatttctggtgcttggcacaagccctggtgtaaagggagtgaacaataaattataaaaataaaataataataaataccagagggtttttctttgagggaggtggcagacagtttattaattcttttttttcttcttttttattttatttttgttacagatgaaaacatttacttcagactgtttactactgttcgattctatttttcctttgattttctcttctcagtcataagtggaaatggaagggattcattcaaaggtagggataaggacaaaatccatttcaattaaaaaattaccttatgtataggataagattattgaaatggaaaytattctgtttattagtattgcttaacttatttgcttctgtgctcaacttcactgtttaaaaaacctcatcgaacatcaaactgtaatatctacataaaaatagttttatttcaggaaagctacactagtttatatatagtttcatagtaaaattttatctacttttgttgttatttttgcactgcatatactttaaaatattaatgactaacaaacatgggaagatattttgttaatggaataatgcttcagagttctttttgtcattccgtggtcagtaattacttaccagcagtagacaatgttctgagacaggggattgtctacactccatacataatcttcatttcaactttgcccctcactctgaacttggtgtcactcagttcttgatctttatatctcccctccctgtacctcaagccctttatctctccactcatacttgacccttattgtttcccacatttccctctctgaactgaagtggtaagtctcagacatgaactgagcacagtgctttaaaaattgtggtaataaaacaaagctgaatatttcatcaaaagccttcctgaaataaaaatgactgcattagtattgctgggccaaaatgttatgtactagcttgtgtatatagtagaaattaaaaaaaaatttttttcattgctaataatgattcaggaaacacactgcacaccaagtttgatctgacatgttacagttaggaaaggctttgatcatttgtaatcagattagtgtacagtcaaatgactttgatggctggctgagagaatctgagaagaatgcgaggaagacatgagaatgtcttcatttgtgtgaatctaaattgatattataaaaggtaactggctctgccttgcagaagaaatttttcagttggcattgtcaaatctcaagatagttttattggtgcctgatgatataccattagctttcttaacttcgaaagttatttagcagttagtggaaaaaaaattgtgtattacttaggcttccttgttcctgcatactctgttctctgtgcttgccttttttctcctcttcagataatttgtatttattctttaggattcagctcaagcatctctttgtgaaaattattccctgtttatctcttctttcctaccaattctttgacataggcagaggtcttctccccaacctgctctcatggcactctctctctatatatatattctttgataatttattatattgtagtgaaattatttgttcacaaatgtaactggaggttaacttgcattttgatggttcaacaagatagattcatcaaggatagatgcaatattaatcaagtctgtcaggcatagattagaatttttatccaaggaacaatatataaaaaataaataaatgaaaatgactatataataatacttattctttcataagttctcaaatttgtctttccatgtaggaagacaatatactagtcagtattctgatattttctccagtttctgggaactttgttaatattgcttaactatcttaatttggaatcaatactgggacaccctaaggcttagaataagaaccagaactggggttaattgatcatggtaaccaggcttcatacaatgtctaagcattcatctgatcagcctcttctctgaaaacactatgtgctttaaaacacatagaggtgggccaggtagtggctcacgcttgtaatcccagcactttgggaggccgaggcaggtggatcatgaggtcaggagattgagactatcctggctaacacggtgaaaccccgtctctactaaaaatacaaaaaattagctggacatggtggcgggcgcgttgtagtcccagctactcaggatgctgaggaaggagaatggcgtgaatccggaaggcagagcttgcagtgagccaagatcacgccactgcactccagcctgggtgacagagcaagactccatctcaaaaacaaaacaaaacaacaacaaaaaaacacttataggtggtagttcatctacttcaaaactactacacgaaatgcataatgtctactctttaaagattaaaacatcagaacgcaaaacacttgtttgtttcctagggttattatgatagtcatagatggataaacatagcatttacttcaagttcatgtggctgcatctcagaaactattagttaaagccatgggtaggttctagagtcaaactacctggatgcaaagcttagtttcatgagtagcaaactgtagtttgggcaggatgcttaaaatttctgttctaatttcttcatttataagattgggataatactctagttcattaagttgtgtttaataagccatgtatgactttcaaaatactgactaaatgcttaagttggtaatatgaggtgtgaggctgattaaagataataaattatatttgacaaaataaatgttaacttttaacaactcttactaaactgaacatagttgttttgccttcttacacatattttctgttaaagacagataaaatagagctacagttctttcatgagagggccttcgcagtgaaacaaacatattagctcagcagtggaagactcctgggtactcttcagggatgagtcatgtggtgattgaaaatgtgcttgggctggaccagcagtttgctggcctagacctggcctattcagataatcagagtgggggaagtacagccagcaaagggcactatatcccttttcrttgaggaacagagcagctactaaggattctaccataaagacagtttagggtggcgttctagcaaagataaggatgcctacagcagttttgaatctcctaatgattcaagcactaagtctagcttcttcagagatcatggaagtggatcaaggggagggtttgataatcatggatggagtgattatgatggcactggcagccattgtgacagaagtggctttggcaaattagcatgtggtgaaaacagtcactggtgtgacaaataagatgaagatgattggtcaaaaccactcccaccaagtgaatgctggaacaggaactcttttctggaggcaacactgggattaattttgagaaatacgatgacattctagttgaggcaacagacagcaattgtcctccacatattgaaagtttcagtgatgttgagatgggagaaactatcatgggaaacatggaggttattatactagcctgactccagtgcaaaagcwtgctgttactattagaaaagagaaaagagacttgatggcttgtgcccaaacagggtctggaaaactgcagcatttctcttgcccatgttgagtcagatgtattcagatggtccaaaggaggctttgagggccatgaaggaaaattaaaggtgagggcgcagcaaacagtacccaatcttcttggtattagccccaagaagagaattggcaatacagatcaatgagaaagcaagaaaattttcgtactgatctagagttcctccttgtgtgatttatggtggtgctgttattgttcagcagatttgagtcttagaaggtggatggcacttgctactagccactccaggatatctagtggatatgatggaaagaggaaagattggattaaacttttatgaatacttggtgttagaagaagctgatcagatgttggatatggggtttgagcctcagatacatagaaaagttgaacaagataccatgcctycaaagggtgtccaccaaactatgatgtttagtgctacttggcctaaggacatacagatgctcgctcatgatttcttcaatgaatatattaataccttattggctgtatggaggagttggctctacctctgagaacatcacaaagaaagttgtttgggtggaagaatcagacaaagttgtttctgcttgacctcctaatacatccacttgatcccaggcaagtacgcactaaccttaggtttatggagaccaaaaagggtttttattctctagaggatatcttataccatgaaggatagtcatgtaccagtatctatggacaccattctcagagggatagggaagaagctcttcaccagttaccctcaggaaaaagcccaatgctagtggctatagcagtagcagtaagaggactggacmtttcaaatgtggaacatgttatcaattttgatttgccaagtgatattgaagaatatgtatatggcattggccatacaagatgtgtagaaaaccttggcctggccacctcgttctttaatgaggggaacataaatatcactaaggatttgttgcatcttcttgttgaagctaaacaagaagtgccatcttggttagaaaatatggcttatgaacaccactaccagggtagtaattgtggacgttctaagagtggcagatttagtggaggatttggtgccagaggctactgacaaaatagtggtgcyagccgttccagtttcagcagcagccatgcaagcagcagacacagtggtgraggtggccacggcagcagcagmagatttggtggaggtggctatggaggcttttgcaacactaatagatatggaggaaattataactcccagagagttgactggtgggtaactgagcctgctttgcagtaggtcatcctgccaaacaagctaatatggaaaccatatgtaacttagctggatgataccttgtgtagcttgaagaactcgcagtatattaccagctgtgattctccactaattttttcttttttaagggagctcaaggttccacaagaagaaaaaaagaacaattaacaaccttgtttggaaggtggtttgaagacttcattgccattgtttggattaattcccctcctgcctacctccaacccaaactgcatttataattttgtgactgaggatcatttgtttgttaatgttaactttaggtaactttttattttgatgtcctgttggctcaatacatcaattgttttgaaaaaattactgaacttgggctaaagtcaaaccttgggacacaggtgtgatacaacttaataggaaccatcgattcatccataaatattttaaggataaacctatttggtagcctccattagggctttttgatacttgaaaactgggggaaaacaaacaacaaatcttgtaaagtatattaatggaattagtttctactgctgcaaactgtattaagttaaagttctgattttctcactctgtcctggataggtatttgtaacctcacagcctttaaacaagccattccagtcacgatgaggtgatgtatgaatacatgcatacattcaaacactgtcttcaaagttaactcaagtaaatacagcaactcctctttcagtgtttaggcagattattaactatgagctagccaaatgtgggcatactattacagggaatgcttaaaggtccggtaacttgaaataggtttttaggagaactcatctgcttagactttttaaatgcctgccataaatgaaattgaaatggtagatggggaccacagcaaagaccaaccctcgttagggccctggatgatttttggtctaataacacatgctagtgttgatgttttctggttaagagggtatgaacaggaagaattatgcagcaggctttactttaaatgctgattcacatgattgttcaagctgagttgagatgctaaactggcttactatagactttgtaaaaatggctccagaagagtaactaactgaaatctttaagctcacacaggttggaaatatgtacataattgcacaaggtgtcaatttactctacagcgcagttttagttgcataggtttccattgtatttatagtcaatttaagttaaatctggccaaagatgagcattgttcaccactaaaatgcctctgccactttgaattctgatctaattttgtggccagaatgtggtgattaaagcgctcagtctttttacagtggcataggaaaatggcaaaaatttcctaaagtgcagtagattttcaagtgtattgtgccttgttctagaacttttattaagtaggtacacttgacagtattgaggtcatttgtcatggtgctatttaattagtctaggtttaggcccttgtacttattgtccataatttgtacaaagtacttcttttattgcacattaagatatatatgcatatacgtcttctcttgtcttgtgtgcatgtccttaaacttccaatcttattttgtctcttggagattgttgaacacagcttgtctgggaaggggatgggactagatttctaaaatttatttgggaccattgggaagaaaactatttgcacacgacagatttctagatactttttgctgctagttttatgtaatatttattgaacattttgacaaatatttatttgtaagcctaaaagtgattctttgaaagtttaaagaaacttgactaaaagacagtacaaacacaatggcacttgaatgttgaatgtcaccatattcgtgaaattatatatttcagggtagtgtgagcttttaatgttaagtcatattaaactcttaagtcaaattaagcagacctggcattggcagtatagctataattttctgatattagtaaaaacaaaattgacaacttgaaattaaatcatgccaaggtattgatacacttgtcttaagatattaatgaaacacttcaccacactgatacgaagtgtccagattttcagatgtttgttgtgtgagttttgttgaattttatgtattttttttcagtgaatgtctggcacattgcaatcctcaaacgtgattatctttagttggcaatttagttggcataatcagtgacttgtacattcagtgatagcgtttgagcaagttttatcagcaggcagtattttcagttaataaataagatttcaaaatcatgtaaggttttaaacttgctgaatgtaaagattgcacctcaagtcactgtacctttagtaattgcttagtataatagttcagatgctagcaatgcatgtgctgtgaatattctgattttattaaaataaagttgaactacaaaaaatagataagatgcataaattgaacaatctctaagactacatggaaaggaaactcttgttcttggtataatattatggaccactgtgaatgttctatggactttgtattctatatatactcatattctctgaggatgatcataatggtagattgaaatatcacaatgatctcaaccccattcttagcaatgcaatttcatgtgatcatttaaaagtattagcaatgcacttatatagtgcttagatatttttagttgctttcactcttatctataaggggttgtccttaataatcatagtttacaagattatcatgtgaggtaggttgctatcatacaaggtagatgaactacattgtgtattgaaccatgtattccatggattttgacaggcataaaagataaatggctgatttgtgtttgtggaagttcattcaattcctgagaaaaatcaggaggtgaaatctaagaaatattaagccatcgagaggaggcagctatctttttgaaattaagatgggatgacaggtctttcagcctgagaacagctagcatgtgtactttagttgtcatgctcaaggtcaaaagaaatttcaaagtagttaaagaggttgcttgattgcctgcctgccgttcgttcgttctttctctttctttctttctttctctttctttctttctttctttctttctttctttctttctttctttctttcttttctttctttttctttctttctttctttctttccttccttcctttctttctttctccttcccttccttccctccttccttccttccttccttccttccttccttccttcctttctttctttctttctttttctttctttctatcttctttttggagtttcactcttgttgcccaggctggagtgcagtggtgtcatctcggctcaccacaacctctgcctcctgggttcaagtgattctcctgcttcagcctcccaggtagctgggattacaggtatgcgccaccacacctggctaattttgtacttttactagagatgggatttcttcatgttggtcaagctggtctcgaactcccagcctcaggtgatccacccgcctcggcctccaaaagtgctgggattacaggggtgagccactgcgcccggtctgattttatttcactatgaatttggagctctaagcctaaaagaaggtttctcataattcatggaaaaaggaggaaactttctctaaaatatttcttgtgtgcatatttacaaaacctaaacatagattttttttggaaatatttaaatatgctattttaaagagtttcatttttccgtgtttatataaggcatgttaaaatagttgtacacctaagataatacagcagctttcagcatttaagtataagtgattgaatgttgatttatgaacattacagaccagaagattaataaaaatttttgcatagtgaaaaataattaggatttgacctcatttttatgcttatatccatataaggaatattttcacttattttatgtttaaatatccattatcagtaagggaagctaatgatatacatttttacatctacatatatctttgtgatgcacagccatttaaattcagatattgaaatacaccactgccaggagaggaaatgcacacaatacttaacctctagaactttgtcattgctatagaccagtgcctgctgtgtctttccattgttcccttttctgaatttgagtttgtaattatgtttatgttatgtatgttaccctttctccaccactgtatattagatgtacagcaggacagatgccttggcattttagatcgtagattatagaactacgagtagccccattaaggtcagatggagaagaccacacaccagctggatatctcaactttgaataggatgaagtaactggaagctatttgggaatgtcaaaaatgggatgtgacagggtatgttctgtgttgggcactaatggtgctcctagatatttggtagccaggtaggtaatctgtagcataaggctagattttcaccggttatgctgcctcccccacagtgctaagttgttgctgggaagtagctgcctagtcagggtctgtatttctctggatcccttgcaattaggtggtatcatatatccagtattgccagtggaaggcagttaggaattagatgtatcttttctaagacttctcttttctcatgccttgatgcaagaaaacacattgagagttggattttggcagtaccaaaaccacaagagggaaagagttcaattcattgactcatatcttggagaagaaccacatcctccaaaagcaaaaatcttattttggagcttagtgtgaaaaataaaccacttaaggtgttatacattttcagtatcatatatttaaatgattattactataactattgaaaaatatatgtttggcatttaaaagtcaatttcttaaaagtaactttcattttttggtggctttgaattggcagtgtagtttttgtctttaaatgaatggtgcatttgattttaaaattatttttcattttttattgaggtacttaaactgtcaactttagcgttttcctcacagatctgtgttttctgtactatcaccttgatctttaaattgcagaggactaagaaattatttgtccctcatgttctttttaaagcttttaatgagcttgcagacaactatctctttgctgttcctactattaatattgcagatgcaaccctgggatagtgtaaaggtagggtaaaggcagagcactcacttgacaaagggtagcatgggatggataggatgggatggattagatgcaacacaaagcaatgaggtaaggtgagatggaataactgtgtagtagtaactcaaaagtatcacaaatttttggaccacattagcctggatgactattcttaagtaaagaaacaatgttgggaggctgaggcaggcgaatcacgagatcaggagatcgagaccatcctggctaacacggtgaaaccctgtctctactaaaaatacaaaaaaattagccaggcacggtggcgggcacctgtagtcccagctattcaggagtctgaggcagaagaatggcatgaacctgggaggcggagcttgcagtgagtggagattgcgccactgcactccagcctgggcgacagagaaaactccatctcattaaaaaaaacaaaaacaaaaacaaaaaaacaatgttattctggcttggctttggattaaaaggctttggctagggaatttacactctttgttttctctctttattgtgtaggcagagagagtttaattttagccaaattcttttattctttaataatgagccatattagtcaagatttgcattctagcacccattctttcaatatgtaaacaacttttaagtatgcaaaattttctttgagacgcctgggttctgccactaggacccaacattttgagttagtttttcttgcctaaagcccacatacttgcctaaagtccagcatcctcactgaaccaccac

SEQ ID NO: 93530 - DNA, 13296 bp, Homo sapiens
tggcgcatgcctgtaatcccagctacttgagaatcgcttgaacctgggaggtggaggttgccgtgagccaagatcgtgccattgcattccagcctgggcaacaagagcaaaactctgtctcaaaaaaaaaaaaaaaaaaagctatgttacatacatagaccaacactattttaaccccaatagaaaaactccaagttttccaaattggctgagtgatctctgctccctccaaactccttcatggataagtgaagtggcagtgagtctgatctctcttctgaaacactttcaaaggtgcgtccagtcatatcagcagcgaacacagctttctatgggttggtgagagactaggggatcccatgcatttgtttagccctgagtttgcaagtttttgttttgggcctacactgggtgttgttgtgctgtttattcaagccatgtattgcttgataacatggaagtttgaaaaccaccaggcatgtattatttaatacatttgccaatgatttggaagaagtaaacactccataaaaacatcacatttctattcccatagatgacctcatattacttgttagttaggagtcacataaaggagaataaattgcagaaattttttttagaatttttttctctttttaaagacaagatcttgctgtgtcgcccaygctggagtgcagtgatgcaatcatggctctctgcagcctcaatctcttaggctcaagcagtcctcccaccccagcctcccatgtagctgagactacaggcatgagccacttcatacaacttattattattattattaccattgaggcagggtctcactatgttgcccaggctggtctcaaactcctgtcttcaagatattatactgatttggcttctcaaagtgctgggattacaggtgtaaaccactgtgcccagccataatttttttagaattttgacttgaagtatcttctttaaattatgtgcttcctttaaaatattactacagctaaaacttaatagctattttttgtaaatatatagaaaatacttaagtatgtgtgttgatgttatgatctcaattcagtacatttatagctcaacagttcctatggttgttgaatgggattctctttttgccagttaatgttaatatgacaaaattgcagagacaattcataagaagtttatttttatttttatttcaatagtttttggggtacaggtggttttcagttacctggataagttatttagtagtgatttctgagattctggtgcacccatcacctgagcagtgtaaggtgtgcccaaaagactgctatatgtagtcttttatccctctcatccctctcccttctcctcccaagtttccagagtatgttatatcattcttatgcctttacatcctcatagtttagctcccacttataagtgagaacatatgatatttggtttttcatttctgagttacttagaataatggcctccagctccaaccaagttgctacaaaagacattatttcattcctttttatggctgagttcataaaaagattaagtaagactggccgggcacagtggctcacgcctataatcccagcactttgggaggtcgaggcaggctgattgcttgaagtcaggagtttgagaccagcctggccaacatggtgaaaacccatttctactaaaaatacaaaaaagtagccaggcgtggtggcacatgcctgtagtcctagctactcaggaggctaaggcaggagaatcgcttgaacctgggaggcaaaggttgcagtgagcctacatggcgccacttcactctagcctgggtgacagagcaagactccgtctcaacaacaacaacaaaaaaaaaaaaaaaaaaaaagaagaagaagaagaggattaagtaagtctttgctgacctccatcagtaggtaaaaattttgtgtgataggctcaaacactgaaaactttcccttgttgggataaaaccatgtgtatctccatttctaatactgtatcccaagtatcacaactgtgagaaagagctactaaaagcagggaaggttcagaagaagacaaagtaatcagtgaaatggggaacccctcaataacatactaaccagattaaaactctaattatcttaaatgaaacaaacaagggcagagagaagacctaactgtaaaattaagaagggataaaaagtaaacagagttgttcattaactcatgaaatcatagaatgagagggcatctcttaccttattgaggtaagtttagtccagttagagagaagtataacttcatattaaaaagtaaaactcaggccaggtgtgatagctcacgcctttaatcccagcactttgggaggctgaggtgggtggattacctgaggtcaggagttcgagaccagcctgaccaatatggtgaaaccctgtctctactaaaaatacagaagaaattagctgggggtggtggcatgtgcctatagtcccagcaactcaggaggctgagacaggagaattgcttgaacccgggaggcggaggttgcagtgagacgagatcgcgccagtgcactccagcctgggcaaaagagcaggactacatctcaaaaaataaaaataaataaataaaactcagccaatgtggtggctcacacctgtaatcccagcatttttggaagccaaggcaggaggactgcttgaacccaggagtattcaagaccagcctgggcaacatagtgagtttctaccaaaaaaaaaaaaatttttttttaattagtctggcgtggtagtgcacgtctatagtcccagctacttgggtggctgaggtgggaggattgcttgagcccaggaggtcaaggctgcagtgaactgtgattttgccactacagtccagtctgggtgacacaacaaaaccctgtctcaaaaatataaataaataaaaatcaataaaatttgtccaggtgtggtggctcatgcctgtaatcccagcattttgggaggccgaggtgggtggattacctgaggtcaggattttaagagcagcctggccaacatggtgaaaccccatctctactaaaactacaaaaattagtcagcgtggtggtgcgcacctgtaatcccagctacttgggaggctgaggcatgagaagtgcttgaacccgggaggcggaggttgcagtgagccgagatggagccactgcactccagcctggttggcacagcaaaactctgtctcaaaataaataaataaataaacataaataaataaaattcatatgaccctaggtggggaattaatcaattttttttataagttaagataaaccagtggctgatagagtcctagtgaagcgcaaagagtggtaagtacctaacctttgatgttgatatctaggaggacagccaagacttgccaccattttgtctggtgatgcatcctctagagataaagtgtttaatgggccatgcaactggtctgatatggtgttaaagcaaaataagcagaaggccattagcctggggttgtttctgcacccagaaaccttacacaagcaaaccaaaacttaatttagaggaattccttgtaactaattaaaattttttatcgactttctctcaactctgtagaatgcagtggagatgcatagaaaaagtctgagactatttacacctactttctaaaaacaattatctcatcttcctttctcttttcttctttgttcctaattcccttacttcctgacctttcttacttttcccctcttccctctgtcaccattttcttgctaatgtaaacttagtttatcattgcctgaaatcaggagtaaagcccaaatatttaaaaaaaaaaaaaaaaaaaagctggaagaggcctgctatggtgctcacacctgtgatcccagggctttgggaggccaaggtgggaggatcacttgaagccaagagttcaaggctgcagtgaggtctgattgtgccattgcactatagcctgggtgacagacagagaccctgtctctggaaaagaaaatctggaagagaattgaaaaaaattacttgtggggccaggtgcggtggctcacgcctgtaatcctagcacttagggaagccaaggcaggtggatcacctgaggtcagaagtttgagaccagcctggccaacacatctctactaaaaatacaaaaattagccaggcgtgatggcgtgagcctgtaatcccagctacttaggaggctgagacaggagaatcgcttgagcccaggaggtggaggttgcagtgagctgagatcgcaccactgcactccagcctaggcaaaaagagtgagattccgtctcaaaaaaaaaaaaaagaaaagaaaagaaaaagattacttatgatatgagtgtattatctttagctattcatatgcattgtcaaatctctgggtctttaaattctagcaaatgttcctctttttcataatgctaatatcttacatgtctgtgaactagagtttttttttttttttagattgttggacaatcgcgagggaggaactttctctcccatttttgatgtttcttccttgtggagggaatgtaattagtgtaactcctgaccttcctgcacctctttattagctcttcccagggaagtcatttatttggtgggtaaatttgagatgtaaatacttgagcatgtatgctctgcttagcttctcttcgtcctctgggaaactgattacatttaaacatacacacacacacacacacacacacacacacacaccccaagccatgcttcagccaatcatagagccaactaccagccaatgacaaacagccagccagctgttagttatataactagggactttcactggatcatacctaagcaaggcaaatgcctagctgtagccaatgaagtaacttctttacttttgcctccatgttcagcctataagcatgctgctgctcatgctgttaaagtggagctctctgaagttattcttttttttttttttttttttgagacaaagtcttgtgctgtcacccaggctggagggcagtggcacaatcacacctcactgcagacttgacccgggtccaagccatcctcccacctcagcctcccaagtaactgggactacaggcatgcaccaccatgctgggctatttttttttttttaactttttggtagagacaaggtctcaccatgttgcctaggctcgttttgaattcctaggctcaagcgatccttccacctcagtttcctaaagtattagaattacaggcatgagccactgcacccagccttgaacttattccaattttgagtgctgcctcattcatgaatcctttattgctcaaataagcgttaaatttattttatgtgaaggctttaccagtggtaatcattgtctttaggcaataaaaaacagatggatagaaaagaataaatgctcagtaaagaaaccacaggatacttatgctttggctaaaaaaaaaaattggaatgaaaatttttatacaatgttgctaattgtatcatatgaataaaagctacgatttttaaataaattactaacattattcacttcttgcattattctggataaacatattttagtgacctacaaagccctacgtaatctctgctccattcccttcccacccatctgagatcatctcttatcatgatcccactcattcactctatgccagccatatggcctccttgctgttcctccagcacacccaccttttcctgcctcactgccttcacctgtgctgctcccactgcctggttgctcttctcccacatgtatccatggcttgttccctctcttcaccaaaggctctatggaaatgtcactttcacagggagtccttccctgactatcccattacaaataccactgttgccctgcccagtgctgccggccctgtgcctgtccccggtttgaggcttggtccccttttcccgtgtccatcattctgtgcagaagcaccgccagaatgtctcattaactactctacgaggttgctgacattggtttggccgcctggggatgcaaggccctggacactgaggagaacaagaagccaggcctgatgcacgtgtaggagctgtactcagcctccaagccactgaagagcgtccgcatcactggctgcctgcacatgactgtggagacagtcgtcctcactgagaccctccttgtcctgggtgctgaagtgcagtggtccagctgcaacatcttctccacccaggaccatgcagcagctgccattgccaaggctgggattccagtgaacgcctggaagggagaaacggaggagaagtacctttggtgcaccaagcagacactgtacttcaaggacaagctcctcaacatgattctggacatcactgggggcctcaccaacctcactcacactaagtacccacagctcttgtcgggcatcagagacatctccgaggagaccatgactgaggtccacaacctatacaagatgatggccaatgggatcctgaaggtgtccaccatcaacgttaatgattctgtcaccaagagcaagtttgacaacctctatggctgccaccagtccctccccagatggcatcaagtaggccataggtgtgatgattgccagcaaggtagctgtggtagcggtctatggtgatgtgggcaagggctgtgcccaggccctgcagggattcggggctcacgtcattatcaccgagatygaccccatcaatgcactgcaggctgccatgcagcgctatgaggggaccaccatggacaaggcctgtcaggagggcaacatctttgtcaccaccacaggctgtgttgacatcatccttggctagctgcccaacaggcactttgaacagatgaaggatgatgccatcgtgtgtaacactggacactttgacgtgaaaatcgatgtcaggtggctcaacaagaatgctatgaagaaggtgaacatcaactccagatggactagtactggctaaagaatgggcgtggcaccatcctgctggctgagtgtcagctggtctacctgggttgtgctatggaccaacccagctttgtgatgagtaactccttcaccaaccatgtgatggtgcagattgagctgtggacccactcagataagtaccccattgaggttcacttcctgcccaggaagctggatgaggcagtggctgaagcccatctgggcaaggtgaacatgaaactgaccaagcagactgagaagcaggcccagtacctgggcatgtcctgtgatagtctcttcaagctggatcactaccactactgagagccaggcctgtccttcaccttccagctgtcgtccttgcccaggccccgcctctcctccctaagagcaaatggcaccaactttgtgattggcttgccagtattccccatcgactccctggggctggtcactcatccctcatgcttttccaagtgtggcaaagggaattgagaggaccctcctcaagccctgatcatgatggaggtacaagggaggcaaccacagggaaccataagctcagtggtcttggaactgctcactaagtcagtccttccttagcctggaagttggtagtggagtcacaaaacccatgtattaatactttaccatctaggccttcacctggtctgtggacttatacccctgtgcttggtttacaggctcagtggttcctcagcccatgacagatgagaaggagctatattgaagggcaaggaggaactgtttgaattttcctgagagcctggcttagtgatgggccttctcttaaacctcataacaatgaggttggtacttttagtccttgttttacaggggttagaatagactgttaaggcacaactgagaaaagacagagaagtaacagccagaggttgagaggggccattaaaacgtaaaagcatagatctgccaccactttgtaacaagatggtttctatcacaaccccagaaaataatttggcttatgtttatataatgtttaaagaaagcaacaaggtgggtacataaaaatcttagtgccaaaacacacacacacacacacacacacacacacacacaatcactgttggccaggcacagtggctcacacctgtaatcccagcactttgggaggcctaggcaggagaatcacttcagccaggagttcaagaccagcctgaatgacaaggtgaaaccccatctctacaaaaaatacaaaaattagttggggatagtggtgcatgtgtatagtcccagctactagagaggctgaggtgggatggtcacttgagcctgggagattgaagctgcaatgagccatgaacatgccactgtactccagcttgggcaacagagcaagaccctgtctcaaaaacaacaataacaacaacaacaacaaaacccacaaacaaacaaaaaccactgtccttgctagtcctttatcctgttttatttttcttctaacacttctagcacttaacaacacttgacatagtctacgtgtatttgcttattgtatgtctcctcgactagaatgtaagtcagctccgtgttgagcaggaattttatattgtgaatctaaaacaatgcctggcatagaacatgcattcagtaagtacttgttaaatgaatggaagatgaaccagattttggactactgcttatgctggatggcatgtaaattgaagctgtgatcaaatacaggccatgcctctaaacagctgatgaccgcttagattctaggtgccatagatactgctgcctggtttgttacaatacttttttttttttttttttttgcttttactctttactattattcattaccggatggtgggtgaggggaaaaatacagaatacatgccctagtccagtgctgtccattagagctttctttaataatggaagtagcctgtatctgctggtcaataaggtaaccaatagttaccaggggctgttgagcacttgaaatatggatattttgactgaactgaatttttaattttacaactagctgtggttactagttactgtatttagcagccatactcaacaatcctataggtctatcttaattacttttataggaatgaagagtattataattatttctcaattatatatatttggttttaatttctacagaggaagaggacaacaaagttttgtgaactattattcatataagtttgtagttgtttaaggaaaagacttcacagagaacagggcagagagtaacacaatatctgatttccaaaaaattcaatcaaactttgatatggatttggtcaaatcattgtttaatggcctccttaacattattattaaactgatttatataatttgctttttactaatcaaatacattgttttaaatcttaattattttttattataaaagtaatacacattcagtgtaacaagttcaaataatctctcaggtggataaaatacggacatccaccacactgtacctaccaagatgcccataccccaaagatgattgctgttaaacatttagagtgcctttcctgacttttttgtctaagcacctttaaaaaccaatacttttggttttcagtgatagctctgaatcccctttaggcatagagtgtgggaaattatatttctgcagcaaactcaggctctgcaacatcaagtgtggattcactggaaattatttgaagtaacacttagagatcatagtagccaaaaaatgttgggaaattaaaaaggggtttttaaaaattaattatcgttattattatttttttcaaagagacagggtcttcactccatcacccaggatggagttcagtggcggaattacagctcactgaagcctcaaactcctgggtgcaaccaatcctcctgcctcagcctcccaagtagcttggactacaggcatgcaccaactgtgccaggctaattttttaatattttgtagggatagggtcttgctatgttgcccaggctgatctcaaactcctgacctcaagcaatccacgcacctcagcctcccatagtgctgggattacaggagtgagctcccacacccagctgaaaaaggtttttgtggagggagtatgatcaggagaaaaatcatggaatgtgctcgaaagagatctaaagggccatggaagtcaaaaggttgaactccatagaacaaaacatgaagtatggaaagattctttaaaaaacacttgactttggaacaaaatccaaattgttcccatgatttcattctttgacattatgttcattttggttatcttagtcttttctcagaattcctctttaacagagaattatctaaaagcccctggctaagttaatgcttatgactatggtcacaaatggatggcttggattttatttgttttgcagtgtttgtaaatttttttatgtatactgttgttgtcaactaacataatccgtatgtatatgggttatatatatatatatatattccccaaatttaaaaaccagtttggagatttttcccacacacagaaaatcagaaaattggcaatactctgccccattaccacatggcaacaatgtagacaggccatgagttctccacatggccctaatccccaccactcttaaacaaatctaatcagttttatgtatattatatatgtatattgctgtgcttctccttcctgcctgaccctgcaagacccctgtctcagtctctctcaacatgtctgaaggactcgagggcaggtgtcaaaggtgaaggccctcatctggatttaatgtcctggaccttgaaacagcagctagtgttttgagctctaagctaacactttggactttcttttttttttcgagatggagtcttgctctgtcgcccaggctggagtgcagtggcaccatctcggctcactgcaagctccacctctcgggttcacgccattctcctgcctcagcctcctgagtagctgggactacaggcgccctccaccacgcctggctaattttttgtatttttagcagagatggggtttcaccgtgttagccaggatggtctcgatctcctgacctcgtgatccgtccgccttggcctcccaaagtgctgggattacaggcatgaaccaccgcgcctggccacattttggactttcagtcatgttttctttccccaatgaaatagaaaagttttatttcaaagaggaaaagggtgcaacagctgcaacatacataaaacctatttagttttacttgggagtgggaatcaggaaacctgggttctgtttttgacttagtttggataaagaagggtagttaagctgtccttatgtctcttaccaaatggagaaaatactgctgtagttcacagcaatttggggagttttagattctatggaaaatggaaatcctatttgtaacttagattttttctttggagaaggagtctcgctctgttgcccaggctggagtgcagtggcacgatctcggctcactgcaacctccaccttccaggttcaagcgattcactgactcagcctcctcagtagctgggattacaggcacgcgccaccatgcccagctaatgtttgtatttttagtagagaccaggttttgccattttggccaggctggtctcaaactcctgacctcaagtgatctgcccaccttggcctcccaaagtgctgggattacaggcgtgagctaccgctcccggtctaatttttaaatttttgttttgtagagatgagggtctccctttgttgctcaagctggtctctgtctcttgggatcaagggatcctcctgcctcagcctcccaaagtgctgggattacaggcctgggccactgcaacctggccttcatcacaaattcattgaacacactttctttattttatccttttttatttttaaaaatttttatttcagtagttttggaggaacaggttgcatggaaaagttctttagtggtcatttctgagattttggtgcacccatcacccgagcagtgtacactgtaccatgtggcacacactttcacttaaagcatttactagacctcgctagccagatttcccatccctgagacacctggaatgttcctgaggacttagtgactactgcctaaagctccacccaagtcaattttatgtttacaggcaaccggagcatccaatcacctttctctaagagagtacaaagatcagctcgcgagaaagttcagacgtctcatttcgtttctattacacggggccttcgcccaaccagacggagtcttgctctgctgcccaggctggagtgcagtagcgcgatctcggctcattgcaaccttcgctccccgggtttaagcaattctcctgcctcagccactggagtagctaggattacaggcgcacgccaccacgccaagctaattttttgtattcttaatagagacgggggtttcaccatgttggccaggctggtctcgaactcctgacctcatcatttgcccgcctcggcctcccaaagcgctgggattacaggcgtgagccaccgtgcccagcctcgccggggccttttaagtgacgttaaaaattgtacataaaatatgttttaggataatacttgtttttctttgaccaaaggcttggcttcagagaatgtttagccagaaatagaggggcgttaaatccccttttttctaatttccaatctgaggaggaaaataacgtagtaaagggacgcaagagcaaccttgcttcttccacaacaaggcccaggcgccgccttgcaacccggaaatgcagggtgcagtgcggggggtaagggaccggccaactatgttgacccgactcagagaaaccccgcccttgccgccaccgcccacccataacgtcctcctcgaccctccctcgaccatccctcgccccgcggccctcaccgaaaaggggagggcggtggaagagagaggagtcaagggagcgcacgcgaagccccgcccctgccgtgacgtctggagacgcgacgcgtcgcctcgcaatgcaaatcgggaaaagggggtgagctgggctggcttccgtcctggtagccaaggctaattctccctcgagttcttgggagatgggcatttggcgagaaggctggcgttagtgaagcgcgcccggcgtcacggtgagtgcgggtcttgggccctagcacctgttctctgggaagtcgtccgctgtgaacgatgaacgcctttccttccaccagctgctggttaccccggagacaagctctgtccgcggagaggagtgggacaactcctaaaggtagaatcagcttgtggagaggaaagg

SEQ ID NO: 93531 - DNA, 12468 bp, Homo sapiens
ttacaccgaatggagtgaggggagctggttgggtgaccacaaagaattcaagctgaatgtgcccgctgggatacagtgctgaagagtttgagactttcaatgtcttccaataacctgtaatagaagatcccgactccgggacaccctgtatgaaggtctccatgacctggccatgaatatcttcctttcttccatccaaaggttgatccatgcacattattccagcagactccctgcttccagttgggttctgctgatagggagtacagggcaattggcgaaaggaaagagaatgctgtcagagtacctctcccctaacctctccctgcgggctcccatagatctggcttcccctccccagctgaagcctacacccctttctcatcaggcaacccttttcatagagtactctgtctccagaatctgggagagcttcatgcctagcagcagcagcactgccctcctacctgtgggtctgtgctacctctgcattttccctgcactcttcccacatctccgcacacagtccctttattacccgtctcacctggtatcctggtccattgctaaaggctcactgctaaagttagccttctggtcactctcttctgtttccaatatccactgatcctttctcctgcctcttgccaatacctctttcttaatattgaagagtgctctaattaactgtgtgtatactgcataaatgagttttcataaaacaatattatttctccaagtatttgattgtgcattgctaatgtatacatgtaatgtctctttcctgtacaattccagaaagtctcttatttgtgaaatcttgggatctaccaacactctgaaaattgaagttttttttttttttttttttttttttaagatggagtcccactctgtcacccaggctggagtgcaatggtgggatctcggctcactgcaacctccgcctccagagttcaagtgattctcctgcctcagcctcttgagtagctgggattacaggctcacaccaccatgccgggctaatttttgtatttttagtatagatggggtttcactatgttggccacgctggtctcatactcctgacctcaggtgatccacccacctcagcctcccacagtgatgggattacaggtgtgaggcaccttgcctggcctagaaaattgaagttcttggccgggcatggtggctcatgcctgtaatcccagcactttgggagactgaggtgggaggatcacgaggtcaggagatcgagaccatcctggctaacacggtgaaaccccgtctttactaaaaatacacacacacacacacaaaagaaaattgaagttctaactctagagttcctccactttcccactggtgtgtcatgttggataatccatctgattaactcagtgttttctttggcaaaatgacttaatatgaggattaatgggaagatttatgttaatttattatcccaagttctattaatgttaaactttttaaataaaatttactcccttttacatttaggttatcaatattcttattaaatattattttctttattctattataggcgaaaaaggaattcgtattactttttttttggagatggagtctggctctgtcgcctaggctggagtgcagtggcacgatctcagctcactgcaacctctgcttcctgggttcaagagattctcctgattctcctgcctcaccctcctgagtagctggggtgacaggtgcgtgtcaccacgcctggctaatttttttgtatttttagtagagacagtgtttcaccatgttggccaggctgatctcgaacttctgaccttatgatccgcccgccttggcctcccaaagtgctaggattacaggcgtaagccaatctgcctagccttcatattacttttaatagtgcctagtcatattctattcattgatacacgattatagatataagtgtctgatacaagaccgtgaaaacctggactacagagcgttaaggaaaagcccagctcaatgccctcaccaaaacaacgccgaactatgaaattgttgctgtgtgttggacaccctgcttggtgggtcataccactaaatcctcatcacatcactgtaagggaggcacattctcctatttatagaaagaaaccaagtattagagaggttaggtgacttatccaaggtcrtaaactgctaggaagctgagctgaaatcttaactttttctggtcccaaagacatcttcctacgacatggtttcctaattgagcatctacaacttccgaggcattatctttcatgaaaactgcaagggttgcacagataagagtttagactgctgccctaaatgaccataaaacgttaaggattagctctgccaagatgcaatccaaataaaaataagagctgtgtttaagaattctaaatattagaattgtcacgtcaatgatttgtagttgtgccaagtgttgggaatggaggaggtaaaatactatcacctccgcattaacggatctgtctgcttggagcctcctaaattaaaaatgcaataaacacctcctttgacttaacgttagtctaagatttttttctggttgtgtttagaaacttcacaagggagatctttgctctcccacgcagagttacagttttgctgaagcttcttcaatataaaagaacgcaagcccttgcctttgcagctcctcccggcttcctcatcatctttgatgactgcctgttcacagcaggccagcagggtacgtttctgcatgcgtctgctcagataatttaatttactaacatgaaggttacctaaggaacacttactccctttcaccgcatgaagcgaaaggattttgtgtcattctgccaggagggagaaaacaaaagacagaaaaattgccagacccgtcctggtacggcaggaacgtaagcagagagaaggaaacgccactggacagtcacagcaaacgtgccctggtggctacaggcttcaaagggcagcggctccagggactccgggcccccctttctgtttaattctctcacttttgtttctaatttaagctttcttcttttcactctggcttcctcattctttcagcgtccccctktcattgtctctcttgtttttttcacatttttcactttattttttttaacacaaataatgttaaaaagaaatttaaaggatactttttaaaaagttaaaagaaattacccttttatgctttcttctcatttttcttttctttctttttctttttttttttttttgagacggggtctcgctctgtcgcccaggctggagtgcagtggcgcgatctctgctcactgcaagctccgcttcccgggttcacaccattctcctgcctcagcctcccgagtagctgggactacaggcgcccaccaccacgcctggctattttttttgtgtttttagtagagacggggtttcaccgtgttagccaggatgatcttgatctcctgacctcgtgatccacccgcctcggcctcccaaagtgctgggattacaggcgtgagccaccgtgcccggccactttcttctcattcttaatccatagaaatatatcagtggccgtagtacctataaagtgtcgataaacttgtgatctgctttcacactcagcgttcttttgtggacacttttcctttcctgtaacatgattctcttgtgttattatgtcatacctattgcactcacatccctctttctttttcttgcccccttcctttgtacatgctcaaaactctctgctttagtttaatctctgctacagctgggtgttccatttgccctgctggcaggtggtggaaaattctagtgtaactttgctctagctgtgtttgaaagctgattttaactacccgtgaatgaagtacacctatttctattcacaagctattggggcacattttgaaaagtatcagtggtatggtaatgtggcaaacataaaaccatgacaatcttcaccttaaacactacttgactgctcacagacagttcctatttcttgcccacaaaatgattctaggcagaggctgataagggttatggttcattttgtctggtcggatatataaaatgtgggctgtgtatgtgttatgtcagttattttaaaagcttttgccatttctcaaactttccctctgctttcaggatgctcatgacataattcaactctagtttttcttgatctgcggaaatgtttctggtttcaattcttgaataattttcttcattaaatgaaactgtatatttatttgtacaacttgcctggaaacagaaggccaaacaagaataaactggaccttgtgataagcattttatctcctcctgtcatcatgaaccagtatttcctgtgtttctgtgtgccatgccatgctatctaataatgctctcacatttcacctgatattgtgagtaaacccaagacacaagttgctctattcttatggcaatgaaatataagccaacaaaatgagcagtgacattgtagttaaagctctgcaatctctaacccatgaagacaggtttctagaggggaaaaaaatggccaactcatgcaccaggcatatcatttatttcttattgtattttatttcccaggactaaccctcaaccctttaataaacacattatgtaatttcccacaacccctacacccaagtgaaaagtagatacagtaatataaccagaaacagaaacacaagttgcattgaaaaactttcccattgccccacttaactgttccaaaacgaaagtattattagaaaataagagtgtgatactatttgatttttcttttttttttttttgagatggagtcttgctttgtcgcccaggctggagtgcaacggcatgatctcagctcactgtgacctccgcctacttggttcaaaggatcctccagcctcagcctcccgagtagctgggattccaggcgtgtgtcaccacacccagctaatttttgtatttttagtagagacagggtttcgccatgttactagtttttatatttttagtagagacagggttttgtcatgttactcctgagctcaaagtgatctgcccaccttcacctcccaaagttctgggattacaggcgtgagccaccacgccctacctacttgatttttcaaggtaaaatcatcactttcgtgtaagcataaaatgaacacagtaaggattttatttaactcaataatataggagggaagcagtaagatgttaaagccagttcaaaaagaacttaaagaatatatatgtaggcaaccagtaatgccaacataaatttaccaatagacacaagatgaattaatgtacaatagggaaatgaaatgcagtatttggatcattttatctataaggtaggaatcagctacatttctactgaacaaagttcacttgctttgctaccaacaagaatcattggcactaatatcttaacttccacctctgaagacttttaaaatggcctagtccatagaaaggcaaggaaatgttcacagtcctataaaatcagtgcccagagagttagctagacctacactgtttaatactatagccactagttacatatggctatttmaattaattaggctgtgcacggtggctcacgcctgtaatcccaatactttggaaggctgaggcgggtggattacctgaggtcaggagtttgggaccagcctggccaacatagtgaaaccctgtctctactaaaaataagcaaaattagccggttatggtggcatgtgcctgtaatcccagctactcaggaggctgaggcagaagaattgttgaacctgggaggcagaggttgcagtgagccgagatcatgccactgcactccagcctgggcgacagagtgagactctctcaaaaaaagtaaaataaaataaagttaaattaattaaaatcaaataaaattaaaactttaggctttgcagacactgccaccactgggcgcctcatactgccagccatggtcaaccctactgtgttcttcgacatcaccgtcgatggcgagcccttgggcagcgtctcctycgagctgtttgcagagaagtttccaaagacagaagaaaactttcatcttctgagcactggagagaaaggatttggttataaaagttcctgctttcacagaattattccmgggtttatgtgtcggrgtgatgacttcacatgccataacagcactggtggcaartccgtctatggggagaartttgttgacgagaacttcgtcctgaagcatacagatcctggcatcttgtccagggcaaatgctggacccagtacaaatggttcccagttttttacctgcactgctaagaccgagtggttcggcaaggtgaaagaacgcatgrttattgtggaggccatggggcgctttgcggggaatgggaagaccagcaagaagatcgctgttgctgactgtgggctactctaatatgtttgacttgggtttatcttaaccagcagaccattctttctgtagctccagagagcacccctctaccccatttgctcgcagtatcctagaatcttcgtactcttactgcagttccctttgggttccatgttgtccttattccctttcatgcctagctggattgcagagttaagtttataattatgaaatacaaacgaaataacaatttgtcaaaaaagaaaatcagttcctcagtgacagtagccacatttcaaatgctcaaaagccacttgtggctagtggctaccgtacctttctgagattacagaaagttctactgaacagcactgcataaatcaatagccactactccattaaaaggatacccagtaaccccctctgctaatttccaagtctttgattatttttcctgacgaaacaaaataagcaatggcaataatgatatggagtagggactctgaaggaataatagctggtatttattgagtaccaatgatatgtccggcattgtatcagacagtttacctaaattacctaagtgggctttcacaatttatgtatattatctaattgagtcctcacaataacttggccccatttattagtttaggagaggctcaaagggattaaagtaatttgaggcttcataatctagacattatttaatgaagcctcacagtaactatacttattagttggtgactcagatactcaaagagatttaaatactttgctcaaaaccatacaactattaaggggctgaactagtatttgatctcacatagggtgcagataacaagtataactaataaaaatacacctaaggaaactgacctacccaggtggacttaagccactttttatagagtatagcatggtggcctggctactgcaggagaatgtgagaagtgttatcccagccttctctcgctcttttttaaaaaaaattattatttccataggttatgggggaacaggtggtgtttggttgcatgagtaggttctttagtgatttgcaagagtttgttgcatccatcacccaagtagtatacactgcatccaatttgtagtcttttatccctcacccccttcccgccctttccccttgagtccccaaagtccactgtctcattcttatgcctttgcatcctcatagcttagctcccacttatgagtgagaacatacaatattctgtttttcatttctgagttacttcacttagaatgatagtctccaatctcatccaagttgctgcaaatgccattaattcattcctttttatggctgagtagtgttccattggttgtatatatcacagtttgtgtatctactcattgatagatgggcatttgggttgattccacatttttgcaattataaattgtccagccttatgtccaaggctgttgctgaaccaaccccagggtatactgtgttcaactgactgtattgtagcacttacaccattgtggtatatttctcatgaaatgtctctctctccaattagaccttgaattactccaagatagaatcagagaaaaatcccactgacttatatcacactgactagtacatagcttttcagtaatgtacgtgatgggttctggacacactacctgcgtatgggaccctagcacactgagtatcttaagctgaagaaagctgagaaaactgcagaagctggaagattctctgaccttctcttgtccctactgtcctgaagcaggtcataaaactagctgacctatccttgaagtaggtcattttcctcctccctatacccagaggaaaagaatgttcttattctcaaagactcaatgacacccagacgaatctgaacaaacagggctaagttcccccaagtttattaccagtaggacactccttttgtcctccaatcatacttctgcaagactgtccataaaaatacacttctcctctttcctttgggtcttcatttttaaggaatcctgtgtgattaaaaccataaagttgtacacttttctcttttaatctttcttttgttatcgggaatctcagctatgattcttgtaatgggtgagaaatctttttctctgctacatttgctaataatataatctcttctatttttatatgcctgccccctgacatcatcccatcttctcccaagttgccccacactaatattaaagagtcacagatggctggtgtaagagttaaaaataaatatcttttctttgcaaccataggttcatggctgaggcccctataacaaaaggcagattaacaagaaaaagcatacagattgatttaagtactacatgatatgggagtctctgcataaaggaagacccaaaataaacaggtaaacgtgcatttttgtgcttacgtttgataaagagtagacagttgtggagaaatatgatcggaccaaaagtgtgtgacctaatggtaataaactgggagaaagttagcgagacctgtttgttcagatttttctctatgtcattgtgttttcagagataaagacaccagtgcgctggctcaagcctgtaatccgagcactttgggaggtcaagacaggcagatcaccaggtcagaagtgcaagatcagcctggcaaatatggtgaaaccccatctctactaaaaatacaaaacttagccaggcgtgttgttgcatgcctgtagtcccagctacttgggaggctgaggcaggagaatcacatgaacctgggaggaagaggttgcagtgagctgagatcgcaccactgactccagcctgggtgacagaacaaggctgtctcagaaaaaaaaaaaaaaaaagagagagataaagacatttctttcctccaggtgtagatgggcacctctggcatgaagatcttatgacttgcttcaggggtgaggggcgggagaaaagtcagaatgactttcctaggttttatagtttgcttcaggtaataagggtgaggggaaggtgagagaggcccttctgctactgctgttttctcaaatgccaaggtgctatgttttgaggtggcacgtcctgaactttatcagtggacaatttgctaggtgtataatccttgcttctactactgttttacttctgcaactattggacaatatggtagcatcaaatgatggacaggcatcaaatagactatctccatcatcacaggtcacaaagctgtgagatttggaggaaattatttaaattcttagggcttagtttttgtttgtaagctatggacaaaaatcaaacctatattataaagtttattgaataatttaatgagataatatatctaaaaagcttaatacaatgtcagttatatagatccaagaaacattgtctattaatattgttattctgggtcaaataattataatttcataatttttttccatgttggcattcatataacttttaagaatacagattgacatgaaaaacttattttcaagagttttaaagaatagaaaatgtaataaaggattgatgagacagtaccattgtgactatccaccttaatacattttctcggataaaaacgtacacgtctaaaactgtcccacactggctatctcagtgaaaaaacaagactgaccgatatatgtgaaataccagaagcaacgtgattacatgagaattctgctggaaaactgagctgagtgatttgtggcttaaaaatacctgactttttgagcattttaatttatgttttaacttctttttttaatgaggacaatgtggaggtttgctttaaccagaatggaaatgacttattattttttttccctagatgtcgtggtgctgttgcttagattgaaatgaggaggaagaaaacagggaagcaggtgaaatgagaaggcaatcaaatcagcagctgagctttaggaaaccatttcaagtattgagcaaagcagtggaagagatgggaggggagaaacattcttggaaatttgataagagggggacgattgcctcaggaggtaaatacaagagcgagtgtacagtactctgctttctcatacacgcacgtggttaggctgaggatttccagggccttttctaaaatgaaggaatctcctgaagcagttgggctgaagcacagatccccaacccttgaaacctgagcaggcctagaagcagagcccaaggatgaaatcctagcatgcttatcagctgcacaatctcacccttagcaaattctgtgtttgccaaacaccttgttcctgtatatacagctctgaaagggaatgccctctcattttcaacattctggggctaatgttctgcatcagtcagggctgccatcatggatccgacattcttccttttcaatccacgtgagtttccttttttcatgatgtgagcaaattgaaacctgtgtgctagtaccttgcaaaacataccccrccacagagaaggtttctgattagcctagtcctgttataatcattggttttgcaagagtaattcmggaaatgttctcaatacaacctaattcccacacgcgcaatgaaacacaggaggattttgcaggtagatatttaatatacaaatagtccaaagagctgttcaaacgcattttgaggatccagctacttaaatacgtgaggatcgttgccaagaaacattgtagtattctttttctctccagaaatgccgaagataattgtcttttaaaggtaagaagatacttgaaaccagatctgcctgcattccaagccctacaggtagtctgagacgtttatgataatgaaaccctcctttagtcatttacatttctttagtggttatttatgcaaatgcacagatttttcactacctagaaacagattcacggatgagtgaatctcctcctcctaaagaaaacattccagcccttctagccaggaagtctcgaaaagaatatttgttgggttgattataagctactttgatatcctactacactgagttttggaaaataaataactatatttgtgactgtagcagaactgagccttcagaggaatcacattttcacataaagaagcaattctagtattttaaaaatcgttgtaagaacctcatattactcagtggatataaaaattaaaagtcctcagtgtctcttccacacacatctccaacataaggagagacatctcaaaggaaaaaacaagcaaataaaacgtgtacgcagttgtcttttgcttgaaatgttagcagagaaaggcctggtaaggtttctgctcagagaaaatgtggtggccccctgggatggatcccggattgtggaaggttactgatacmagttgggtggggatgatattggaatcacccatccaacacagagaaaaccatactcatatgcactagaaaaccagtgaagaaacaaaaattataatgagttctggcttattctcaaccatgccagaaataatggtttctaatttgatacactgtcggaatcatatgaatgtatcacttaggaatcaagttgtttcatgccatttcactcactgatgaaataatcatttaaatagatatgaatgatggttaaaagaattttacttctgcctttttattgtgatagatggctccaggtaagcctggtttgcttgattttcaaactctgatttcttttatttaacaatctgaaaatgccccaaggcttttgcactttctaagttcatgttggctttgtaaaaaatttcaacttagcactgatttttttttttttttttttggaggcagggtcttgctctgtcacccaggctggagtgcagtggtgccatcttggctcactgcatcttcaatctcctgggctcaagcaattctcctgcctcagcctcccaggtagctgggaccacaggtgcacatgaccttgcctggctaatgttttttttttttttttggagaggcagggtctcactatgtttcctggactggtcttgaactcctgggctcaggtaatcctcccacctcagcttcccaaaatgccgagattacaaaag

SEQ ID NO: 93532 - DNA, 12651 bp, Homo sapiens
acatacagagagatactagggatgtgcaggcacagggaaaagaccatgtggatgaggcaggagaatagggtctggaggcagggaagctaaggccaattcacgctgactttctagaactaaatcaaaaggaagacctcaactttccacacctaagtaacaaaaggactggaagctactccctttgcaaactgccccccactttttatgcgtggcagatggaatattgaaagtacctctgattggttgctttctgaaaccaatcagatgtttgcataggagtgtaacttgtaacttcacttcagcttctgattggttgcttaccacaaccattcagactgattgcaggccttgtcttcctttgcataaaagcgtaactttgtaacttcattttagtctctgaatggttgctttccacaaccaatcagacgtttgcaaatggtgtaacctttgtaacttcacttcactgattgtgggccactacttcatttgcatgggttgtacaccaagtgaccaatggaaaacctctagaggatatttaaaccccagaaaattctgtagctgggctcttgagtccctgtgcttggcctgctccaaccctgtggagtgtacttttgtttgcaataaatctctctttttattgctgattctttcttggctttgtttgtccattttgtccaattctttgttcagaatgccaagaacctggacactctccgacggtaacatggagacactgagagaaggtggccatctgtaagccaaggagagagaccttagaagaaaccaaacctgccaataccttgatcttggacctccagcctccagtcatgagaaaataaataaaataaatttctattgtttaaccacccagcccgtggtattttgttatggtagccccagccgactaacacagttgcttaagagagctgggtgtgatctggatccctgctaacctggggttcactctttcgccattctcctttgctcatggccctccagccacactggtcttttctagtttctagaaggtcagccccgttccaggctctggagctttgaatgcactgttccttctaactgtgccccatgctttttaagtgactggctccttcttgtctcacaggtctcagctgacatatcatttcctcagaagtgccttcctgaccaccccgtggaagagaagtgtctccctctccctgatattctctatccctggccatggtttgtttctttacagatttttatcatgttttgtgataattttgtttgtttacttttgtcaagtcttttgtttgtctttccaatagtagaccttaaactcccatgtaggcagaaacatgcctgtcttactcattgttatatcccagtggcctagcacattctagaccttcaataaataatttctgagtgaatgcaatgtgtgtcatctggtattttctgttgcttaaatttattatttatttatgtattgagacagggtctcactctgttgcccaggctgagtgtggtggtgcactcatgactcactgcagcctcgaccacatgggctcaagtgatccttccacctcagccccctgagtaggtgggactacaggtgcacaccaccatggctggctaattttttttttttttttttgagactgagtctcactctgtcgctcaggctggagtgcagtggcacaatctcagctcactgcagcctctgcctcctgggttcaagcaattctcctgtctcagcctcccaagtagctgggattacaggtgcacgccaccacactcatctaatttttgtatttttagtagagatggggtttcaccatgttggccaggctggtcttgaactcctgacctagtgatctgcccacctcggcctcccaaagtgctgggattacaggcgtgagccgctgcacccagccaatttttttatttttctgtagtgatggagttttaccatgttgcccaggctgatctcgaactcctggactcaagggatctgcttgcctcagcctctcaaagtgctgggactacaggcatgagcctggccaaaccacacctggccacttaaatttattttatttttatttatttatttattgaaacagaatctcgctgtcacccaggctggagtgcagtggcaccatcttggctcactgcaacctccgcctcctgggttcaagccactctcctgcctcagcctcctgagtagctgggattataggtgcatgccgccacacatggctaatttttgtatttttagtagagactgggtttcaccatgttggccaggctggtcttgaactcctgacctcagtgatctgcctgccttggcctcccaaagcactgggattacaggcgtaagccactgcgcccggcctaaaatctacattaaaagttttttgtggtttcttcccccaaagtttctaggcctctgaacatatctaaggggagcaaaaatactatgtttgcatgtttcaaataaatgaataaaatatagacagaattgactaactgtctcaagaattagatcaggacttttgcctctaaaataaatccaaatattagttttcctatttttctcactttattatcataaatgggcctgattttatttatttctttttttctgcgtctgcttgctagggaaatgtgtgccttattttaaaagtccgttgtgttccttgaaggctgtctgcaaactatttttggaaagtgaatcatctaatatctaaagatatcaactattttagagatccttatactgaattttgtttgcaatagtaagaaatatatttgtaatgcaaatattcactttctagtttttctatctttgaaaattcagattttaaaggctcagatttatgtgtctcatagattctgaaagtttatcactattaaaatagtaaatagctgacaaaatacaaatggcatgatataaagcacagaaaggaattaaatcagtgggtggaaatgtcttaactttgtgctgattaagaagtagtatgtgagaagaactgttcttttccttttttagcttcctcatctcccctgttatgttgtccttccctctcccagtcccctacttcagcaagttcccaaattttgaacaaatcagtctcctgtttggcaacttttcctgaccattcagcagtcagaaaacaggaaagttactcttccctttgccctgtttttaaaacttctatttctactaggcagcttttacctatcacactgggctttaacaaagtatctgaggaattaactcacactaatgtagaaaacactggtggcaattttccacgtctgttttttttttttctctttgagatggagtttcactcttgttgcccaggctggagtacaatggtgcaatctcggctcactgcaacctccgcctcccgggttcaagcgattctcctgcctcagcctcccaagtagctgggattactggcgcgtgctaccatgcctggctaattcttgtatttttactagagacagggtttcaccatgttggctaggctggtcttgaactcctgacttcaggtgatccacccacctcagcctcccaaagtgctgggatcacaggcgtgagccacggtgcccggcctccatatcatttttttaaaggtcacccagaggcaacaatgttttgactgaaaggaacagttcattagtgaatggattctctagaggacttctgttttacatgcatttatctctgctctctctctagtccactctaacaagagtaaagaaaagaaggcacacagccaaaaggacaaagagacaaagaagaacaatctaaacccaaagcaagcagcaggaaggaaataataaggattagtgcagatattaacgaatagagaatagaaaaacagtagagaaaatcaatgaaagcaaaagctgattctttaaaaataccaacaaaatggacaaaaccttagcaaggctgaccaagaaaaaaagactcaattaccaaatccagaattgaaagagggctcattactactaatctcacagaaataaaaattgtaaggcagccaggcaaggtggctcatgcctgtaatcccagcactttgggaggccgaggtgggtggatcacctgaggtcagtagttcaaaaccagcctgaccaacatggtgaaaccccgtctctactaaaaatacaaaatcagccaggcgtggtggtgcacacctgtaatcccagctgttctggaggctgttggcaggagaatcacttgaacccgggaggcagaggttgcagttagccaagattgcaccactgcactccggcctgggcaacagagagagatcctgtctcaaaataataataataataataataataaattataagggaatactatgaacaactgtatgccaacatattacataatataatttagatgaaatgaacacattcctcaaaagacacaaactaccaaacctgattcaagaaagaatggaaaatctgagtatacctataacaactaaacaggctgaattaatagtaaaataaaagaaaagtctgagcttcactggtgaattataccaagcatttaaaaaagaaataataccactatggtgctattctatgatagtattatggcatggcgattcctcaaaattagaaataggattaccatataatctggaaaatctacttctggatatatatccaaaagaatggaaagcatgttctcaaagatatatttcttgttcatagcagcaatattcacaatagtcaaaagatggaagcagccaaagtgtccgtcgaaagatgaatggataaacaaaacgtgatgtatacctacaatggaatattactcagccttaaaaaggaggaaaattctgatgcatggtataacatgaatgatccttgaggacattatgctaatgtgagataaaccaatcacacaaagataaatactgtacgattccacttatacgaggtacgtaagagcagtcagaatcataggaacaaagccaggtatgcatctaaagtctgaggtacttgggaggctaaggcagaaggactgcttgagcatgagttcgaggctatggtgcactatgattgtgcctgagaataaccactgcactctagattgggcgacatagtgagatcttgtctcaaaacaatttttttaattatagaaacagaaaatagaacagtggttactaggagcagggagaaggggaaatgggaggttgtttaataggtatagagtttccattttgcaagataaaaaagttctgggccaggtgcggtgctcgtgcttgtaatcccagcactttggaagactgaggcaggtggatcacctgaggtcaggagttcaagaccagcctggctaacatggtgaaaccccatctctactaaaaatacaacattagctgggcatggtagagcatgcctgtaatcccagctacttgggaggctgaggcaggagaactgctggaacccgggaggcggaggttgcagtgagctgagatcgtgccattgcattccagcctgggtgacaacagtgagactccgcctcaaaaaaaaaaaaagttctggaagctggttgcacatcaatgtgaatatacttatcactactaaattgtaaacttaaaaatggttaagatagaaatttttatattagtgtattttaccacaatttttaaaagataaatgatacaaattcttcacaaactctttcaaaatatagaagaaaagggaacatttcccaactcattctatgaggctggtattaccctgatacccaaaccaaagacaccacaagaaagctacagactaatatctcttacaaataagatgcaaaatcctcaaaaaaatattaggaagtagaatttggcaacatgtaaaatggattatacaccacgatcaagtggaatttatcccaggaatgcaagattgttttaacatccaagagtaaattgacgtaacacaccacatcgatagagtaaatgggcctttctgcagaatccacaccgaccagcaccatgcccgtgacactggggtactgggacatctgagggctggcccacgccgtctgcytgctcctgcaatacacagacttaagctatgaggaaaagaagtayatgmtgggggacgctcctgaytatgacagaagccagtggctgaatgaaaaattcaagctgggcctggactttcccaatctgccctacttgattgatggggctcacaagatcacccagagcaaggccatcytgggstgcattgcctacaagcacaacctgtgtggggagacagaaggggagaagatttgggaagacattttggagaaccagcttgtggacaaccacgtgcagctggccagactctgctacaacccagattttaagaaactgaagccagaatacytgsaggmactccctgcaawgctgaagctctactcacagtttctggggaagcagctattgtttcttggggacaagatcacacttgtggatttcatcgcgtatggcatccttgagagaaaccaagtatttgagcccargtggttggaygccttcccaaayctgaaggacttcatctcccgatttgagggcttggagatctctgcctacatgaaatccagctgcttcctcctgagacctgtgttcacaaagatggctgtctggggcaacaagtagtgccttgaaggccaggaggtgggattgagttgcccatactcagcctgttgcccaggctgtggagagcagctggactctacaccccagcacctgccttcttgttcctttctcctgtttattcccttctttacccccaagactttattggccttcttcacttcccctaaacccgtgtcccatccaagccctttaaagcctcagctacccattttccttcatgaacgtctccctcccaacattacccttccctgcactaaagccagcctgaccttccttcctgttagtggttgtgtctgctttgaggggcctaacgggccccttgcctgtggagctcagccctgaggtcccagggctgcatgaaagagcagtactgactggtttacaggcccttctcctgcagcatggcccctgccttaagcctacctgatccaagtaaagcctaaaacacacacacacacacacacacacacacacacacacagaataaacgtcaaaatccacaggatcatttcaatagatgcagaaaaagcatttgacaaaatttaacaccctttcatgatgaaaaaaaaacactcaacaaagtaggaatagatgagaatttcttcaacctaatatagggcttctacaaaaaacccacaggtaacagcatatttaatggtaaaataactgattctttttcagatgaagcatcaagacaaaatgaagaacaggacaaagatgtccgctctcccggtttctattcaacattgtgaaggaggttctagccaaggcaattaggcaagaataagaaataaaaggcacccagcttggaaaggaagaaataaaaggcacccagcttggaaaggaagaaataaaagtatcctattagttgatgatgtgattttgcatatagaaaattctaatgaatccactaagaaactatttgaactaataaacaagttcagcaaggtttcagaatacaagatcaatatacaaagagaaactgtatttctttatagcagcaataagcaaacagaaaatgaaataaagaaaattctgtttacaatagcatcaaaaagaaaaaatgcacaggaataactttaacaaaagaggtacaaagcttgtatgctgaaacctacaaaacatcattgaaagaaattgaagattttaataaacggaaagatatcctatgttcacagatcagaacacgtaacattgttaagatggaaaaactcttcaaattgaactaagattctacacaatccctaacaaaaatcttggctgatttcttggcaaaaattggcaagctaatcctaaaactcatggaaatttaagaaactcagaatggtcaaaacagtttttaaaaagaacaaagctgtagaatttacatttcccaattctaaaactcactacaaacctatagtaatcaagacagagtggtactggcataaggacagacatatcaatcaacagaacagaattgaaagtccagaaataaagcctcacatttactgtcaatcgatttttgacaagagcacacaaccattcaatgaggaaagaatagtcttttcaaaaaatggtgccaagacattggatatccatatgcaagggatgaagatggaccctctaactcacaccagatacaaaaatgaattcaaaatggatcagatacttaaatctaagagctaaaactctaaaactcttcaaagaaaagacaggagtaagtctttatgaccttggactaggcaatagtttcttagatatgacaccaaaagcacaagcaaaaaaaagaaaaaaatgtgtaaattagactttattaaaacaaaactttagtccttcaaagtacatcatcaagagagtgaaaaaattccaatgctcaacaccattaatcatctgatacatgcaaatcaaaaccacaatgagataccactttacatccattaagataactgtaataaaaatggaaaatatacataagtggacttgtgttatatggggaaaaaatggaaaatagcaagcattggtgatgatgtggagaaattagaacactcggccaggcatggtggctcatgcctataatcccagcactttgggaggccaaggcctgagaattgctagaacccgggaggcggaggttgcggtgaaccaagatcatgccactgtactccggcctgggcgacagaacaagactccatctcaaaaaaataaataaataaataaataaataaataaataaaaaataaaaagaaaagaaatttgtaattaaagatgtgctttgttgagttggtatgccacaaagttatatagtcctaaaaatatgcctgtactcttcttacctggcgactccagaactgagggagatcatggaaggatgaaagcaataggtttctcatggcagtgaatatgattttcttcttcaattttccttctccttcttgttaaataaaattcccctggttgcaacttcctaatgagaggattgatgacaattgagttcttttggaagatccatctttaggcagattttggttgtatcactgaagctgtgactgggatgtcatatatgagaagatatatagaatgaatctataggtactgcaggctaagtctaaagtatgccttgatttggcttcctagcctaaagaagttttaaaatgtccattcttagagttcttatcaaaagttccagcaaagctttgcagcagttaatgttatagaaaaagagaaaaaaagttccagcagtctgggtgcagtggctcacgcctgtaatcccagcactttgggaggccaaggcaggaggatcacctgaggtcaggggttcaagaccagtctgaccaacatgaacaaaccccgtttctacaaaaaatacaaaatcagctgggtgtggtggcgcatgcctgtaatcccagctactcgggagactgaggcagaagaattgcttgaacctgggaggcggaggttgcagtgagctgagattgcaccattgcactccagcctgggcaacaagagcgaaattctgtctcaaaagaaaaaaaaaagttccagcaaaggaaacttaaaaacagtctgtgtggtcattcactattcctgctgctcttacgtaaataatcaggctaagtttgatgagactaaccttattttgtaaacacatttgtgttattctgattatttttggtagaaatgggagtaactgcagagagaaaaactgtttctgaagaaaagctatagtacacctgctattaggttgtggctttgctcatcgttttcaagtttttcttatcttcttgtagactggactagattctagaattctcttttcctccaatatctggctacaattctccaactaagaacaagaactgctctgtacccaaagccctctaagctgaaaccagacaactcgttgtaaatttcaagggacaagtgccattcctgatgtgttggccacacagagttcaccaaaacgcctgatgccataaccagagacattcaaactgcaaaccagggaaagaggttgacaacttcatgttgtaaacagcttttcccaaggtgtcagcacaagactgcctatcataataagactcttgcccctctgaacttttttttttttttttttttttttgcccatctttttcgcttggcacagtcagcagctcctgcgggggcaatctgatgaactgttggatctgtcgtgtgaaacccaaatctttacataacctaagagcttctttagtccatctagtgggtaagtttagcaacatccctaacgtaactgttgttcaaattgtactagtggtccctttaatagggttacacttctagatccacttgttctcactctctgctttaatataacccagtcataggataccagatttcctgctagctgtatagtataggaggagtctgtgccattgataacacttcttgttgtacatgggtagatacgttgggtattacagagacttggttgcaaaaaatgaacagtctgcttggttaaaacaagtggactcctcatctggctcattctttgatctattcaattttagttggtttggttcatggggaccctggctaaggagcttatgccaaactgctggtattatcctcctgatagtcataatagtagtcttgctggtgtgctatattctctcaaaggttttaaatacttacatgtagccatccatcgaacattgaatgatctctcttcagctagaataacaaaaactcaaagaaatatgtgatcagaccagacttgatggctcacgcctataatcccagcactttgggaggccaaggccagcagatcacgaggtcaggagatcaagaccatactggttaacatgatgaaaatttgtctctactaaaatacaaaaaaaaattagccgggcattgtagcgggcaccagtagtcccagctactcgggaggctgaggcaggagagtggcgtgaacctgggaggtggagcttgcagtgagcccagatcgcgccactgcactccagcctgggcaacagagcgagattctgtctaaaaaaaaaaaaaaaaaaagcaaaagaaatatgtgatcctgaggacaccacaatctaagaatggtacatcgagaccagaaacccagaatgatggtaactgagagcagtgtgaatggcctaggttttggtcgcactctcacctgggtgacagcctgacccaaatggtgaaattgtttaaaaaaaaaaaaagtataggaggccattggtttggactgagctcctgctttagatccaacagatcaaaccaaaatggagtcagtcatgctaaagtttcacatcaccaaactgaaactaagttgtttatctaacattctgagaaatcaggcgagagataatagctaaatccccaaacaagcaatttcagccagtatgataaagaaatcccctctcctttagcctttacaaggaaagtataactttgaaacaatcaatcgactttttgttttctgttttggcttttctcagcctttttctgtctataaaaccaacctcctctgattagaacactcattgtactttttttttttttgagactgaatctcgctctgtcacccaggctgtatgtagtgcagtggtgcgatctcggctcactgcaacctccgcctcctgggctcaagcaattctcgtgcctcatcctcccgagtagctgggattacacgtgcgtgccaccacgcctggctaatttttgtatttttagtagagatggggtttcaccatattggccaggctggtcacgaactcctgacctcaggtgatccgcccgccttggcctcccaaagtgctgggattacaggcatgagccaccacacccggccttattgtattttatagtatgaggtgtttctcagttctagaattacaaaaagccaattaagtttttaagctaaatttgttataattttgtcttttgcaactcttctttcttctcctcctcttcttcccccccgccttttttttttttttttttttttgagataaatctcgctcttgtaccccaggctggagtgtaatggcacgatcttggctcactgcaacctccgcctcccgggttcaaatgattctctttgctcagcctcccaccattcaccttacaggcacctgccaccaggcctggctaatttttgtgtttttagtagagatggggtttcaccatgttggacaggccggtcttgaactcctgacctcaggtgatctgcctgccttggcctcccagagtgctgggattacaggcatgagccaccgtgccccgccttttcccctttcttttcttccattgttgttcttaagtttgcacaataattaggataaataagcatttataaaatcaggtataatttagtcttctaatacatattccaattgtgttgtcacatcttttatccagattaataccttggtacatatcctttaattttattaataaaagttaattattattttaattactttatttatttattacagaaggggtcttgctaggttgccaaggc

SEQ ID NO: 93533 - DNA, 13061 bp, Homo sapiens
aaatgaatgcaacctaattcatccatggctggattcactagcacagagcttatcatccataggctttatcttagtctattcaagccactataaaaaaattaagactgagcggcttataaacaacgaacatttatttttcacagttctggaggctggaacatccaagatcaagacactggaagaaggaaacaaatgccagtcatcaattctgtaagataactggagaagagtgacatatttatttggcattgcagagccttcacatctttcatctttaacccaccagtcagcaaatttctgttgagaaccactttgggcccaaactttgctaatccatagtcacccaaccagcctagctgatgtgagggatgaggggaaagccctccagcttgccccccaccccgaactgttggtggtagcctttcatctttcaaatgccagcctgggcctgttattctcttgcctaggaccctgcagcagctctcattgcccttttgtgtaggcctggaatggggtgattctgatggtgatggccctctttacacagctgctgtggcccagagtcacccagcagaggcccagcctgccttagctgccagcatgcactgctttgtgcctacaacctgggaaaaacatggcaagttgtagactcttttttaaagagtggtctacacatttttgggttaaaagccacgttggacatatttctttctctacatgatttgcattcaaaggaatggaacaactttattaataatctacagtgtgaattgttagtttctatcacagaatttggatggcatggggaacaaggaatgagctttgaagttagaccgagattaccactaattgctgtgtgaccctgattcaattatttaacttctctgatccttgaattcctcattggaaaaaggaaaataacaccaacttcatttgttaatgactggatacactagtacagtgcgtataatccataggttttatcttagtctgttcaggctgctttaataaaataccatcaactgggtggcttataaacaataaacatttatttctaataattatggctgggaattccaagatgaaggcatgggaagatttaatatctggtaagagaccattcctcatagatggtgccttcttgctgtgtcctcacctggtagaaggtgcaaatgagcttttgggggcctattttataaaagcactaatcccattcctgagggattcactctcatgatttaatcacctcccaaaggccccaccttccataccatcacattagaaattggatttcggggatggatccaagatggccagttagaagcagctgcagtctccagcactcagaggaatgaaaaggggcaagtgaattcagcaccttcaattgaaatatccagattctcacaatgggactgactaggcaaacaacacaaaccagagaatgaagaaaagctggggctgctgacagcccacccaggagtggcacagagccaaaggaacccccaccccgagccaagggaaccagtgagtgattgtgcaaccccacctggaaaaccatgcttctcccatgggtctttgcaacccaaagatcaggagatccccttgtgagcccatgccttcaggtctttgggtctatacacagagctgtgtggagttttggcagagcagccactcaggcacacacacagtcccaggagtgtcacatactctagccctgggatccctgggaagatgggaattccatccatacatatccctaggaagggagctgaatccagggtgccaagcagtgtcattttgtgggccccatttccatggcacctcacaacttaagaatcactagcttagagtcccagtcagcccagcactgggttggagtctccctgagatggattcaagttcctgtgggaggaggcagccaccatctctgtggttcagttgactcagctatgccagcctgctgactttggagaagacaggcggtccagatgaggaagggtccctccaatgcagcacacttgctctaccagacagcagccaaactgcttctttgggtggatccctgataccattcctcctgactgggtgagacctcccaactggggtctctggccacctcctacaggtacatgcaggctggcagtaggtcagtaccccctgggatggagcttccagaggaaggagctggctgccatctttgctgttttgtgctcttcactggtgataaccacatatgggagaaactgaggcaactaaggtctggagcagacccccagaaaaccatagcagccctgcagtagaatggcctgactgataaaataaaaacaaataaacagaagacaacaacatcaacaaaaaagaccccacaaaaacctcattcaaaggtcagcaacctcaaagatcaaaggtagataagcccacaaagatgagaaagaatcaatgcaaaaatgctgaaaactcagaaagccagagtgcctcttctccaaataactgcagcacctctgcagcaaggacacagaactgggctgaggctaagatggctgaattgacagaagtaggcttcagaaggtgggtaataaaaaacttagctgagctaaaggagcatgttgtaacccaatgcagagaaactaagaatcatgataatactggagctgatagctagaatagccagtttagagaggaatataattggcctgatggagctgaaaaacaacatgacaaattcacaatgtaatcacagcagaatggacagagaggaggaaagaatctcagtgcttaaagattatctttctgaaataagacaggcagacaagaatagagaaaaaagaatgaaaagcaatgaacaaaacctctgaaaaatatgagattatgtaaagagagaaaacctatgactgattggggtacctgaaaaagatggggagaatggaaccaagttggaaaacatactgcaggatatcatccaggagaatttccccagcctagcaagacatgccaacattcaaattcaggaaatgcagagaatcccagtaagatactccatgagaagatcaaccccaagacacagaatcatcagattctccaagattaaatgaaagaaaaaatgttaagggcagccagagagaaaggccaggtcacctacaaagggaaacccatcagactaacagtagacttctcagtagaaaatctacaagccagaagagtttggaggccaatagtcaacattcttaaagaaaagaatgtccaacccagaatttcagatctggccaaactaagtttcataagtgaaggagaactaagatcctttacagacaagcaaatgcttagggaattcatcaccaccaggcctgccttgcaagagctcccaaaggaagcacaaaatatggaaagaaaaaaccaataccagccactatgaaaacacactgaagtacacagagcagggacactatgaagcaaccacattaaaaaaagtttgaaaaataaccaactagcatcatgatgacaggatcaaatttacacataacaataccaatctaaaatgtaaacatgctaactgccatgattgaaaggcacagaatggcaagctggataaagagccaaaacccatcagtatgctgttttcaagagacccatctcacatgaaaagacacacataggctcaaaataaagggatggaggaaattttaccacactaatggaaaaaaagaaaaagagcagaggtggtaatcctagtttctgacaaaacagactataaaccaacaaagataaaaaaagatgaagggcattacataatggtaaagggtttaattcaacaagaagagctaactattctaaatatatatgcacccaatacataagcatgcagattcataaagcaagttctcagagacctgctaagggacttaaactcccacagaataatagtggtagactttaacaccccactgacaatattagacagatgatcaagacagaaaattaacaaagatattcaggatctgaactcagccctggatcaagtggacttgataggtatctacagaactgtccactcaaaaacaacagaatatacattcttctcatcaccacatggcacttactctaaaattgatcacataatcagaagtaaaacacttctcagcaaatgtaaaaaaaaacaacaaatcataacagtctttcagactacagcacaatcaaactagaattcaagattaagaaactcacttaaaacttaaaaactacatggaaatggaacaacctgcttctgaaagactcttgggtaaaaatgaaattaaggcagaaatcaagaagttctttgaaactaatgagaacaaagaggcaatgtaccagaatctctgggttgcaactaaagcagtattaagagggaaatttatagcactgaatgtccatgtcaaaaagctagaaagattgtaagttaacaacctaacatctcaaataatagaagtagagaaccaaaagcaaatagaccccaaagctagcagaagacaaggaataaccaagatcagagcagaactgaaggagacacagacatgaaaaaacctgttaaaaaatcaacaaatccagaagctagttttgtgaaaaaaaagtaataaagagacaggctgctggctagactaataaagaagaaaagagagaagactcaaataaacaatcagaaatgaaaaggggaatattaccactgaccctacagaaatacaaacaactatcagagaatactataaatatctctaggcacataaactagaaaatctagaagaaatgaataaattcttgggtgcatacaccctcccaagactgaactaggaagaaattgaatccctgaatagaccaataacaagttctgaaactgaggcagtaataaatagcctaccaacctaaaaaaacccgtgaccagatggattcacagctaaattctactagatgtacaaagaagaactgataccattgctactgaaactatttcaaaaaattgaagaggagggactccttcctaactcattctatgaggccagcgttatcctgataccaaaacctggcagagatacagcaaaaagagaaaacttcaggccagtatccttgatgaatattgatgcaaaaatcctcaggaaaatactggcaaactgaatccagcagcacatcaagaagcttatccaccatgatcaagttggcttcatcccaggatgcaaggttggttcaacatatgcaaatcaataaatgtgattcatcacatcaatggaactaaagacaaaaccctcatgattatctctaatagattcagaaaagacctttaataaaattcaacattccttcatgttaaaaactctcgataaactaggtattgaaggaacatacctcagaataataagaaccatatatgacaaatgcacagtcaatatcctactgaataagcaaaagttagaagcattgttcttgaaaactagcacaagacagggatgccctctctcaccactcctattcaacatagtattggaagttctagccagggcaatcaggcaagagaatgaaataaagattattcagataggaagagatgaagtcaaagtatctttgtttgtaggtgacatgatcctatatctagaaaaccccatcatctcagcccaaaagtttcctaagctgataagccacttcagcaaagtctcgggatataaaatcagtctgcaaaaattgctagcattcctatacaccaacaacaggaaagcagagagccaaattatgaatgaactcccattcacaattactacaaaaagaataaaatgcctagaaatacagccaacaaggcgaatgaaggacctcttcaaggaaaactacataccactgctcaaggaaatcacagaggacacaaacaaatggaaaaacattccaggctcatggatagaaagaatcaatatcatgaaaatggtcggctccctgcttctcctgttcgacagacagccacattttctcttgcattgccagccgcatccctgagacatcatggtgaaggtgaaggccagagtcgacagatttggtcatgttaggtgtctggtcaccagggctgcttttaactctgctaaagtagatattgtggccatcagtgacctcttcattgacctcaactacatggtctacatgttccagtatggttctamccatggcaaattccatggcactgtcaaggctgagaacaggaagcttgtcatcactggaaatctcatcaccatcttccaggagcgagatccctccaaaatcaaatggggtgatgctggcactgagtacagtgtggagtccaccagcatcttcaccatcatggagaagtctggggctcacttgcagggaggagccaaaagggtcatcctttctgccccctctgccaacaccctgatgttcgtgatgggcgtgacccatgagaattatgacagcagcctcaagatcatcagcaatgcctcctgcaccatgaattgcttagcrcccctggccaaagtcatccgtgacaactttggtatcatggaaggactcatgaccacagtccatgctgtccctgccacccagaagactgtggatggaccatccaggagactgtggtgtgatagccatggggctctccagaacatcatccctrcccctagtgacgctgccaaggctgtggccaaggtcatccctgagctgaatgggaagctcactggcatggccttctgtgtccccactgccaacttgtcagttgtggatctgacctgctgtcttgaaaaacctgccaaatatgatgacatcaagaaggtggtaaagcaggtgtcagagggccccctcaagggcatcctgggctacactgagtaccagcttgtctcctctgacttcaacagcracacccactcttccaccttcgacgctggggctagcattgccctcaacgaccactttttcaagctcatttcctggtatgacaatgaatttggctacagcaacagggtgatggacctcatggcccacatgtcctccaaggagtaagacccccagaccaccagccccagtgagagcacaagaggaagagagaggccttcactgctgggggacacttagtccccctccacactgagaatcccccctcctcagagtttccatgcagatctcctgaagagggaggggcctagggagccccaccttgtcatgtaccatcaataaagtcccctgtgctcagtcaaaaaaagaaaaaggaaatggtcatactgcccacagtaatttatagattcaatgctatcccattaaactaccattgacattcttcacagaatggaaccaaaaaagatcctgaatagccaagacaattctaaccaaaaagaacaaagctgtaggcatcaagctacccgacttcaaactatactacaagactacagtaactaaaacagcatggtactggtacaagaacagacacatagaccaatggaacagaatcatatactcagaaataagaccacatgcctccagccatctgatcttcaacaaactttacaaaagtaagcaatggggaaaggattccctatttaataaatggtgctgggagtgctggctagccatatgcagaaaaacgaaaatggaccccttcctttcaccatatacaatattaactcaagatggattaaagacttaaatgtaaaactcaaaactataaaaaccttagaagaaaatctaggcaataccattcaggacataggcacgggcaaagatttcatgatgaaaacaccaaaagcaattgtgactaaagcaaaacttgacaaatgagatctaattaaaaagagcttctgcacggcaaaagaaaccatcatcagagtgaacaggcaacctacagattgggataaaatttttgcaatctatccatctgacgaaggtctaatatccagagtctacaaggaacttaaacaaatttataagaaacaaccccattaaaaagtgagcaaagaacattaacagacacttctcaaaagaagacatacatgtagccaacaaacatatgaaaaaaacctcaacatcactgatcattagagaaatgcaagtcaaaaccacaatgagataccatcttatggcagtcaaagtggctactattacaaagttaaaaacaaaacaaaacaggtgctggtgaggttgtggagacaaaggagcacttttgcatacacaggtaaacattgtctgggagggttgggtgggagggtaaattagttcaaccattgtggaagacagtgtggcaattcctcaaagacctagaggcagaaataccatttgacccggcaatcccattactatatgtatacccaaaggaatataaatcattctattataaagatacatgcatgcgtatgtttattgcagcacccttcacaatagcaaagacatggagtcaacccaaattcccatcaatgatagactggataaagaaaatgtggtgcatatatatacactatgggatactatgcagccataaaaaggaatgagatcatgtcctttgcagggacacagatggagttggaagccattatcctcagaaaactaatacaagaacagaaaaccaaacaccacatgttctcacttataagtaggtgctgaataatgagaacacatggatacatgatggggtcaacacacactggggcctgtggggtggaggatggggggagggaaagcatcaggaagaatagctaatggatgccgggcttaatacctaggtgatgggatggtttgtgcagcaaaccaccatggcatatgtttacctatgtaacaaacctgcacatcctgcacatgtactcctgaacttgaagaacaaaataatgaaataatatgaacatttgttgtgtaaaaaaatttagatttcaacatgtgaatttttgagtgacacaaacattcagaccacatagtaggttctaaataaatatttataataatattgctaagaaataccattttgcatgcttaataagggcccggcattatgctaagcacttatttttaatttttgtgtgtacatagtaggtgtatatatttatggggtacatgccatgttttgatacaggcatacaatgtgcaatggtcacatcagggtaaatgaggtctccatcacctcaagcatttatcctttctttatgttacaaacaattcagttatcctcttttcattatttttaaatatacaaaaaattattgttgacagtagtcaccctgttgtcctatcaaatactagatcctatttattctatctaactatatttttgtatccattaatcatccccaattgcctgcaaccccactacccttcccagcctctggtaaccttcattctgttctctatctccatgagttcagttgtgttagttttatgctaagcgctcttaatccacagtcccattttattctcacaataaccttgtggagtagctactgttgtcacctattttacacaggaggaaacaaatgctcagagagttcaagtaacctgcctcaggtcacacagctaaggacacagtaaagctgaatgtctgggcccttaatcatatgctgaacaacctcttcattgtgtcttttacctaattccacctccaacttgaaaataattgatattcgtaattaccacttctactttttagtggctactgtctcaactgtgaattatgatttaaacaactaagttagtatttagtttacacttggaaaaaatagtgtagatgaatattatgaaagatgataaagctttaaaaaggttacatattgcaacccttacaagtgagtgcacaaaaaggcagacaaaaaaggaacaaaaagatttggtcaacactccacaaaagtaaaaaaatcaaatagccaataatcatatttaaatagtgctgaccatcatcagtaatcagaagaatgcaattcaaatcacagcgaggtgtatatccattagaatggtgacattttaaaaatctgaccttttaaatattagtgaagatgtacatggggaactctcatacagtgctggtgggaaaggagaaattgacacagccactttgggaaataatttagtgttgtctagtaaacttccatgtgtgccataatttagggtttctgctcatagatatatgagaaattcatacatgtgtatctagagacatggacaagcctgttcaaagcagcattgttcataatggccaaaaactagaagtgggagcaactcaaactttcattgatgttagaataaatgaatctattgtgatgtatgcacacaatggatcattatttgtcaatgcaaatgatgaactggggctacatgtggatgaaaattacaagtacaatgtgtagtagaaattgcaagaccacagaatccagacagtgtggtttcatccacgtcaagtttgtaaacagacttcaggatattgttaccgccacaggtgaagtggtaaaactgtgaggaaaagcaagacatgatcactacagacatcttgacagttgtttcctcgaatggaaaggcggggttgagacctgacatccctctggctgccagtgatcttctattcccactcctcacctgggtaacaattgcatggatgtttgttttataattatgtgttaaactgcacagataagtgttaagtattgtattttataatagatatgtttaaaactatattatagtagttgattaagaaaaatatgtgaatgaatatgtataatttggtttgaaataatgcatttaaatggttatggctggttgagaatatgatgcaaatgaagaaaaagtgtattttttgtacttctctctaatgaatacgtgtccttttataagaaaggaaataacttatcttaatacttatgtaccttggatggctgagtctcaatctgacatcctagccagataacttagtttaaaccataagcaatagaagccaaagacagtttaacatattgtttactttctatttgtttattagtcattgtttccattcagtggcaacttcaatcacaaagtttcccatttataaaaaagaaggcaaaaaattgttcaattactatctaatcaaaggtagtcttatttagcctccagttggagtttcaggggagttcagactcactggagggaaacttagtaagaatatttgccttggtctagtgaagtgggacatcatagagggctagagacaatgtaggctgggctcaaaaacaaacctccagcctcattccctaccctgctctccctgacctgctgtcccttcactccggtacctttgcacgtgatcactgcccccacatccctccaaccccactgctctgcagcgcccttgccctcttgacaagtctcgcatacttcatgtctcagctcaaacataaccttcttcactgaagccttacctggctcctcctccatgctcccagagagaaatctttgcccaaacctctgggctggtgcttgctacaatatcttgtcattacttatttacatgtcccactaattggtgaattcctagagctgaggattctgtcttttcactttgaaatctccaacagctaataccatatcaagtacgatgtagccaaccaataaatatatgataaatgaatgaataaaggaatgcttgagctctttcaagaaaatgatatctccaaaaatttttaaaaggatgaggcaggctttcaagtaaaactacaggatctaatatgaggacacttaatactaaatagactacattagggatttttaaatttatacggggagaatgttagctttaaaaagggcacaattttattgtgcttttgaattaatggtgaaaataaattattgggtagaaagagacaaataatccagatcatttcttttatttggcttaatgaaaactgccacagtgaataaaattcaaacatctacctgtgtagctttaaaaatgcaaagtatttattaccactagttacttattcacatgctctcagtatctaatagatcatgcaaagtcctgattccccaagagaactggattattttcttcctacaaatccatcatattcagagctttactcattttgtttcaagcagtatgtacagggatttctcattgatcatttacaacatgcctgtttattatgtggggatagagaggtactaggaagaaacaagaaagataaaaagctatttcaaaatgtcaggaattcacctaatctcaaggttcatgttattttccatgggggaagaatgtgattagttagtaataataaccaactcatttatttacaaatatttactgagtgggcaatgcttgtgaagtgtattgtctaatggggaatatggacaggtgagaaggcattcaacccatagtgtagtaaagctgtggccccagagcattagaacagcaggctgaggtgtgaaggatgtgttggagtagagggaggaggctgctgcagagctctccctacaggaggcatggcactggtgtgaattacgaagttgcagtgactgtggaaaaaaaaagtggactagatttaagacagacaacaagatgtatatttcaaaagatttggcattttattgagcataaagaagtgagagagggaggagatgaaggcaagatcattatttatggcttgggcaaaaaagcacatttaccaagttagggaagctaaaaatgaaaagaggttttgttaggtgacagtgagttcaattttggacatatggagtgtgatgtgcatgggagatatccgaagagaaacattcatctataggttggagattatatagagagataagatgtataataagatatatgtctacatgtatatgtgtatacacatatatggaacacaaatattaggagttccataaaaacaacagagaaatcagaggagaggtaattatgaagcaacatatcaagaaaatttcccagaactgcagaatgagagtttacagattaaaaggccccctaagtgtccagcataatggatacaaaaagatccagagcaagacacatcagcatgaaattttacaacgctggggaaaaggagaaggcaccaagaacttcccaagagagcagacagatc

SEQ ID NO: 93534 - DNA, 64179 bp, Homo sapiens
cctagcatgtgaattccatgtaaaaggaaaataaaaatattgctgaattgttgaaagactggctcagatgtatttcagtttaaaatcaggaaaaataggccagattatttttagggctccaggctacattccttcatcctctcaatatcccctgtttgatcagcagaaacagtaactgggtttatattttacagtccaaaaaacggaagctttgctcttaattatcaatactctgaatacctcattcaagagaaaaatgcatttaatcacacaccaagacatacatgcatacacacacacacacacacgcaccaccaccacccccacccccccccacacagttcagggtccctctgttttttattatctccattactgtactttattatctggatgatatctgtcttcagaaagacacaagattctctgtatccctagcccctagtagaatatgacagtacagaaaataacacagtttttttgaatgaagcaatgaatataacaggagaggaaataagaaactgattacagaatccaaatgtggccctagctatatctcatcaattcatttaagaagatgatattgaaatagactctgtgctgagctgtgatgtataagacagtttgctcccaatgatttcatgtcatggaagaatatttgttggagtcctcactttctgtcttctttgatgcttgttatagaaatgtggtagccgatagaatagatatagtcaacactgagtcactttttaatcgctaaatttcagaatcatccatgcttgtcttattgagtttccacattctagccttatttaaaatcaggacaacttcccccccattttatgcctatttatttctttttcataaattgattgcctaactaactgatgtttttgcaattactacattgccaggagttaatatgggtataggatgtagggtgcaaagctgagaagaaattctgtataatctgtgcctgtcaaatcttggatcttcctttagttgcctttttctataaagagctcagaagaagaaagaactctgatacatgtgcagctttgttcagaatagtacccttaaatatttctgctacccaaactaatggtgaactctcccataccagctctctgagtttcttaaagataatagtatttgcatacagcaattggatattgagttgcatacagcaatatccttctcaggatggactaagtttaaaatcaacttttaaaatagctggagtgattttaactgaaattctttggttgaattcttggctaatgtatctaaaatcttctcctaccttctgcaccctaaactggctgcaaaaatcttttatgacttcattaaacaaatacatgccataattattgttattctacttcattagtatgaatgaccatgtttacaagtaaaggcatagcaatacatttaaacaaaatcatttcagtaatcatttcagctgggtttcttttttctttctaagtactttattcaggatattgtttgatcgttctagtacttattagatacttctttgataactctgtcacttgggctttggaggtcatatcactaagttgtatcttaaagagattgttccattttcatgggagcttagttgcctctttcagaaaggcagtaagaaaaatcactgatagcatggcagggatagaaatcctgagattagattaatacttggtagaacagaggaggcttggcctagagaagctataacaatacaagacttaggattattgtatagaattccttctactgtggcactgctaacaattaagaatttactggggccgggagcggtggctcacacttgtaatcccagcactttcggaggctgaggcaggcggatcaggaggtcaggagatcgagaacatcctggctaacacagtgaaatcccgtctctactaaaaaaaaaaattagccaggcttggtggtacacacctgtagtctcacctattcgggaggctgagatagaagaattgcttggacgcgggaggcggaggttgcagtgagccgagagcgtgccactgcactccagcctgagtgacagagtgagactccatctcaaaaacaacaacaaacaacagcgaagaatttattgcatgaatttgggcacagagatagatatggaagcaatctttcttcactgtggcttttctggcaaaccagctttctaggcaagggaagtgggagaacccctggtttccagcattgcctatttttgtgttataaacgtatgtgccaccagtttcaagatatcaacatgatgtcattgaatgtgaagttgggaagaagtgcgcaccaccagctctgcccaagcccatgcaagctggcctggcacscactggactctgcagaaccatcccagccccagagctccctgcagggtcagctcaggtctgtgctgtgactgcatcaaggttcagactctccctttgccttcttctttctcctctcacattagagacaggtgttgttcctaagaacatgctccagtaaacttcctgcgtgagaatctcagagtcccaaagcgaccccacctatagtgaagagaaattgaaagttaagttcatgatcattgaaaaatagagagcgaaagtcctctgttctctctcctaaattcattaactaattagatcaactatggcctccacctggttccctaatgagtcatagaatttaccttgataagttaataaatgggcaactcagtggcgctttgtgttttgttctgttggtccttatttaagtcctttatctcaaacagaccacacacaaaccaggatcaaatgtagccagatgctgacattagagatccacagtacaaagtcctttgttgccacagagggctgtagcaaaactgggaagactaaatctcatgtccaaatattattactgtcttgtttatcctattatgtcactaaattctcccatagctagcactcataagtcggtatacagaaagaatggatttctcagccataaacagcaccggcaaaattcctttttgccacatgaagcgaaaaagaaggggtgatattaatgaaatgtaatggaataatgtgctagaatagctataatttttagacctggtaaaattgtaaactagattaaaatgtgggtgacaaatgttgagtctaagctatttccccagaaaaacacaacaatttctacagtcaattttcaattatctgcccaaggagaaatagcaataatggcaattatccaaaagagtagataatgaacaaattcatttctacttgactttgaaatattattttgtattctgaaaccaacatttgaatgtagatgcattttatattctggaaagttgcagtgcctctaacttaagtactaaaattacactttagaaatcagactaaagaaagtagcttatatttttcctcttttcttgtacaatacgttcccactttctatattattcctgtgaatagatgtcattatctcttaggataatgttcagttcattctaaagcagagaaaatttgcatgtatatgttttctagttaatattttcctgcattgatggcaattaagtattttgattaaaaggacaccctcctttcctgcctctgctttgctaaaattattttttaatgtgtgaaaagaaaaatcccaaaacaaaacagaatggatattcaagataaaagttacatctaagtaagatttaagttttaaacctgcatctgcccatggaaaaatgagttagctatttacacattttccacacctttttttttttggccctggtttggttatttttcactcagtgaatgctatgatgactataataatacctaggatagggtctgtctcatgacagcattcagtaacttctcatttctttcattccttgcttcccttttctttgttcaataatattttatagaagatgcttcatattaaggcttcatatatttcaataatgtttatgtttttttccactctttccatagtaaattctacaaaagcaaggaaatgttttaaaaatatcgtagagtaaaatctttcaggtgctatttttccaatgtcaacattcagtacatgtttaaattcttaaaagctacctccattattttatcaatattattaagcaaataatctagtaagtgctatatgcactttaaagagcagaatgagggttcatgcagactaaaaactgactacatgctctcctgtcttatgcttacttacatggtacactcccattattagaataagacattttttacataaggcaaaggattcccaagtgttgcaatacttttgattgtttctgggactcttttgctttggtatttgacttgataagcagttggtgtttgtctgtttggccaaatagacgtgctctcctttaaagttctgaaatttgtcttcaattgaacaaatgacaaggcactggagaggtaggttaagcagctgtctaggctgagtagatctaagttcaaacaaacactggctccactaatcccaggatgacattgaacaatagacttgctctccctcagtcatgttttctcattattaaaatgaaggtaataatacaaaactaagaggattgtggagatgatgacagataatacgtataagtaacttggtgtaggcattcagtaaatgtgggtagttgttacaaatactagctaacgttgatgactacctatgcaagcaccatcctaagcactttctatgtattcatttatttgaacctcatgacaactctaggattcaggtaccgtcatcatgattttgcacatgggacctagaaaggttaagtatcatcagtggctgagtcagtctctaaacccaacccatacacttacccatcacacaacagtgattatcatagaaacagagagtcttttaacagaaactggaaccagcaaatggatccactggaatccacttgtgcctctgtccatattgttcacatggggccacactgctgaaacaccatcccaaacaaatgcctttgataagagttttatttcatatgaggacccatcacatttcagtcactcagcattacccagaacttactctatgatatacatgaacagttagttagaatagaacattccactttttattatgaagctttgtatacatatatagcttgagacccaagaatctgatcaatagaaggcaggtctagttggcttccatcctgttatttaaacaaacaggtctggatcagattcagccagtggcagagtggtcataagtgacactaaaaggtcttaagtgaaagggaaggtgcrcatgcctaaaatcccagctgtgccgtgaatgaaccaaatgtctttgcccaaaggcagcttcagccctctggaccttttttatcacttggaaagttaagatgttgcagaagaccttaggtaaaagctggccatccatgtgccaatcctgacccctcacatggactttggttttagccttgtctgacctgtgcagttttgttttatttttaaaattagatcctaaagtacaaaactcaaaatatttcacatttaaaaaatctatatttctgtttttccctaaaaattggacgttgtgacatcattgggcctgtttatctttgtggcatcagtcaaaatcatcaactagacctgagcagtagctgccccttcagrtggggcatgggctcagtagctcatcacagtacccaccattccttattatctcacacccagtctgctggctcattgataccacctgcatgggcttgaaggcatctgagtttgtaatcctagtaccagctgaaaccctaaatgaggttaatttcttcattcttttttcattcagtccacctctattcaacgcctacccacatgccattctttgtattgtattgtccttaaatagaaatatttttttaaagtggcagttctgttttcatttctctgaacccaattcatttccgttatttctaaatttttctctcttcttggtgtccacttagggctacrcagcttgctcctggcacrggcaccttgaatctcctcctcacacagatggagaccatgcttgatttcctgaacttgtagtaagaagaaggaaaacacagcacgctggagccaacaggtaggcgagaaaccaggtaggcgagaaacacrtttytcagttatgcagcccagcgtcgaggaaaaataacagcaactctacaaaatcagaaatcagcgtctaaggactaatgagcagagagaaaagtctaggtttttttctttattaatgtttacctgctatagtatgcaaaatatccttgccataaaagccttatttcttttttaaaatttttaattgtattttaagttccaggatacatgtgtaggacgtgcaggaaaaagcctttattctgaaagatacaggagaaaaaaactcatagcttaaaagagtgtctttttaaaaaattcatacttacaagtgtctatgaaacattttagtggtggcctcttttaagataaactattaggtaactaaagatatgctttagatgacctaagacaattcctatttaaaacccatttctccaaggccatcactaattgattcttgaaacttctttgctgaagtaaactcatcccacaggcaattgtgcttcaatcatttcttacttcagttgaaaataataggattttgcatagaaaatgatggtacagttattaaaagtctctaaaatagtgaataattgttaaaatgtttttatttaaagtgataaaaagcaagataaatacttagaatattcctttatacactaaatggcacattaaataaataaaaatgattgcagcctatccggactgtgattcagggaaagaagcaccatgctggcaagaggtcacctggatgacactcctatctttcccatcatagcctctgtgactttgggccacttacttaacctttctaaactacagtttccttgtccatgaaattgacagttatttcagagtgtcttcaaaatgccaagcagaatcagaccctgaaatacaattgttagtggaaggtggcgggtagctctgagccaattccctgtgagctatttttccaaaagcaagttcaacaaaactccaattcaccaaatgcctctctcctggttcttatttacaaaattcatagtaatttgcactggatatgttggttttcacagcctttggagatttctctaaggtttcagttgatagttttctccctccgcttactgacagcattggaaggaatgtgcagtttgtttcagcccctgacagtgagtcgcaagaggaccctctgatgaggagcagtggagcagcgtcagcacacagcctaaacgggtggacacagactaagagacatgagattatactcataaggattctccaagttcaagacaaatatactgagtattttaaatatatgaagccgattgggtacttttgagaacagctttatggaatcagcctgctggtataaataatacttcctcttagggatcttagcgtccaatggaggaaacagactaaaaacaaaacagaaaataaataaataatacaattacaaattgcaataagcactatgaagaaaacaaacagggtgctcaggtagtgaagaggtggaacctgctttagaaagggtggttaggggaggtgtgagagtcaagagagctctccctgcttcccttcccttctgggcacatgaaaggaccagataacttggggcyatgggatgtgggatgaccagtgagttgtgagtagaaaggatctatggcacttccatgctggagcatttaattgctgttgcaggactccctggctcccttcccctgtgacattctgactggtgatgtggctcaaggtgtggttttctccttcagcctggagcctgtgtgactgcaaagaacagagtgcccctctccgtccccccaacccatggacccacaatggacctgtaacctgagcaaacaacaaactttaattgtcttaagccactaaaatatggaagctatttgttagtgcagcgtaactgagactatcctgactattattattaggggctttaagacaaaaagcgttaagcttcgctgatttgtaaaattgaaagatagccattatggctggattacagcaaagcaagaaaaagtagcaaattagagttctccttctactacaggctgcctgcctcaggctgttctgatgtttgtttatattcctggcgatgctttaagacagattaagtagcttgactctaaatgcttttgatttgtttacacaaatcaaactctcatattttatctctgcctctggattatgatagtttttatcaagaactttgcatgtgtgctattgatatgataatgcaatcctaatgccttcccaagagctaagagcctctatcctttcagtcaatactgagatgcacttgggtgtataggccattcatagctgaggcttgggatgggcagttcacagcactttgcaattgaatcatatgtaatactgtgcagtttttaagctctcagtttttcatatcaatttctaatattctggcaacagaagctagtgaaaagcccaacttttatgggactcatcataggcccttgaatgtttaagtcttttgcacttaagatcttgtttgcaaacaaaacaaaacccccaagcagaaagcaaattgcaygatatccaatttatcttctttggaagaaaagaagagctgagtcagccctcatgagatttgacaaggaaggtacttttttttttttttttttttttgagacggagtttcactcgtgtcccaggctggagtacaatggcgtgatctctgcttactgcaacctctgcctccygggttcaagtgattctcctgcctcagcctcccaagtagctggaattacaggcatgtgccaccatgcctggctaatttttatatttttagtaaagacagggtttcaccatgttggccaggctggtctcgaactcttgacctcaggtgatccacccgcctcatcctcccaaagtgctgagattacaggcgtaagccactgcacccagcctaggaaggtattttttttatccttgacactgctcagatagagccactgatattataactgcctttattgtagtttggtagctttacaggaagtacatctgtcggttattacagtcattcttgtacagttcttaaagtcttaaggatttttatttgagatgagtgaaatctcactaaagaaaaggaaagttgggaaggggaaaggaaatggatctaaaattaaaattgtatccttaatatagtctaggcttagtgctaggtgctttcatatgcattactgttcccctatccccacacagtggaggaagcagctcagagaagttatgatcacccagccagtgagtggcagaccaaggaagaggtcttctccctctaaaaaccctgctttttcctctttattatgtagactagaatgtcaaagtctcctgtaccatccctatagtcaaatccaaaatggccaaatctcacattccaaaaatcctgcattaccaaaatttaagagttctctaaaaaataaatgctaggtcactattacatattgatttattacatatccaggttcagaagaggtgctaaacagagctggttataataggctgtactytgctaactgtgcatcytccctttgttccacctcatcctgtgtaattaacacagtcttgaaagtagaagtttccatgacattaaaattcttacacagcgcaccctctaattatttcatatcttcacattagggaccaagatactcacggtggagggtgggattctgtttgttatttaattacttaaagaaggagcacaggaaaaccaagacaaagagattattaaaataacatttacacttgactctgagttgcctacacacagaccaaggcacaggcatacatttcttttcgccttcttactcccacctggcttcagacctcctctctcttggcactggttttcatctcagttatgcctgttgccatctcttcctatcaaggacttgcttattcttcaagccccactcaaaattcactcctccacatgccttttcagatgtccacagtgaaaattaagctccttcttcccttacccgagggcactttttactaatcttacagcatctctctgcattgtactatgaggacaagggtgggacagagaatgctgatgattcaatcagatgtgttttctcttttttcttcctggacatatagatagaccgcatttcctagccttccttagagttgggcatggccacataataaatttctagcaatgcaaaatgagtagaagtgacatgcttcatttggaagccagggttttgaggaaggaggtatgcctcctctatgctttttgccttgctgccatcagtaaaggagctctgagacccccccaggtgggggccccatggggtgaagaaarcctgggttcccaaatcaccaggtgaaaagctttctggccaagcagcaacgctaggttgttacacaagaaataaccacctattgtgttaaggcttagaaatttagggcttatttgttacagctgctggtgtggacctaacagmgagtatgcatctttctaagtgtgtgcttgagtgtgtgtgcttttagaagccccaaaaggactggaactaaaaaaaaaatcattcttaactgtgtgtaaaattaaactgagttggtgcctcatttggaaatggagcagatggtcattaaaatgaaaagtggaggctactctaaagcatctccaatattaggaatgccattttctcatttgcaagcagctgtctasaattttgtaaacaatctcataggtgactaatttggtatagcgaacaaaaggaatacccagttttcatgttaaaatatgccctggttcatttctcatttgaatattcattatttcattcaacaagtacatatggaacacattctacatgccaggcagtcctctaacagtgctgatccatgaacagtggccccagctcattccaagtacacaggccagtgggggaaccaaatatccactaaactcatcacactgctgaatatgctgtcagcatatcacccaggttctctggttcctctcttggaaaataagaatgataatactggctatttctctaattttaaattagataatatttagatataacaattataaaatatttagcagtgtgcttgacacttgaacttggcaagcacgtgataattcttagctattattatttgctttgatttagagaaatactatgagattgtgtaataaaggaatctgactaggctgaggaaggggtgtgtggaacacaacagtttcctctggaaatgactcctgatatgatagctgagaagttgggaagaatattccaaattcttaaaactagagtaaaaacagtatattcaaagaacccatgatggggacttcattttcaggaattaaaagaaaaagctagtttagctggagtctagaaagcaaggggaaaactgcagcaggataagaccatgtagagccttgggaaccaatcatggtatgatttccaacacataatggcacagaatgataggatcagacttagtttttagaaagatcactatagctggagtgtaaagaaagaaatttagaggacagactgagaataggcagctacttgcaacttgcaacttgcaaagttaatataggagtcaagataagagatacccatagcttgagtggtggtagtggagcttgagagaagtagagatataagagaaatttctgaagtgacattggcaggatgtggtgatggattaggtacagagttaagaggtgaaaccgggacttgactcccagtcttgctctcggtcctctctaccactccaccctccagggctcatggcttgatcctctccagcctcaacctggccaggtttcccctcaagcctccagagcctaaggaagaggagttgacaggaaggacagggaccagtgtcatttggtccctgatctctcttgggacaggtccccaagcagctgagccagagctgttaggaatggctccaggtctttccgatacagagaggtacatttcacagaagtggggaaccatgaaagaagatcagggttgcaggatcatgaatttacctttgcatatgttgcattcagatgcccttcagatatccaagtacacaattagatgtgtgggtctggagatccatagagagagatctctgagctagaatataaacttaagagttattcacatgcagatggcaactgaggtcatgggcagaaaaaaaaattgcatagaaaacaagcaaaactgcctgtaatcccagcactttggaaggccgaggtgggcagatcaccaggtcaggagatcgagaccatcctggctaacacgatgaaaccccgtctctattaaaaatacaaaaaattagctgggtgtggtggcgggcacctgtagtccagctgctcaggaggctgaggcaggagaatggcgtgaacccgggaggcgaagcttgcagtgagccgagatcgcgccactgtactctagcctgggcgacagagcaagactccgtctcaaaaaaaaaaaaaaaacagaaaaaagaaaacaagcaaaacttagagtgagaagaaaagaaggcctaggaccttggcttgaggaacttgttagcaaaggagacaatgttagtcagggctctccagagagaaagaaccaataagatatatgcaggggtgtgtgtgtgtgtgtgtgcgtgcrcgtgtgtgtgtgtgttatatataaattatatatatatataaattatatatacatatataaaaaggccaccaatagaagacaattctcttactaattccacgttgtcagactcagagtacaccataaataatttttccccttagagcacctttttcattttcacttctgagatagggatcgatcccttttctctgacccacccagggcagttgttcagaaagcacaccactcttgactccagctcctgtagaaatgagagacactgtgattgtgcatctgcccctctgactttgtctcgggcttgrgcagggagtctgtgccacagcccttggctccactcttctatctctgttgccttgcataggtgtttaacaacttatccagcttgtaattcaatatccactgtgaggttgccaggtggttttatttttccttttaaattaaatactgataaagatcttagaccatgacaaattcagagcaaatgttacaaatgttttccctctgattccttctctttcagtccaataagctaaggccttaatttcagcatcatttctttttattcagagtagagattggtgccatacaatttccctcaaatgggctttccttgacattcttcagctgagaagagtagcagaccctcacctctgcatttggtttctacatcttgcctacatttcctaaagtgatgtggggtgagcctaggtcacacggcagggaatgggtcaggtcacttgactcccggtcttgcgctcagtcctctctaccactccaccctccagggctcatggcttgatcctctccagcctcaacctggccaggtttcccctcaagcctccagagcctaaggaagaggagttgacaggaaggacagggaccagtgtcatttggtccctgatctctcttgggacagctccccaagcaactgaaccagagctgaggaagaggaggcaacaggagatggtgggctagactcaattccctgcacattagcatagcagcctggtgctccctatgcccctgaggaggtctctgaggcttaaacccttgaagaaactcaagaactgattagaagacaccctgtcaggaatggggtgagtgtaagggatcaggtgatgaccagtattgaataaggctcaaagaaggaatgaaagtcaaagatggggtgagagtcagggatgtttatggcacatatgaatcagcccactgtatccacaggttccacatctgaggcctcaaccaaccgtggattgaaaatgtttgtaaaagagaaacaataaaacataacaacacaacaataaaagataatataartaaaaaatacagcataacaactatttacataacatttacattgtattaggtattataactaatctagagatratttaaagcacacaggagaatgcatgtaggttatatgcaaatcctgcaycatgttatataaggaacttaagcatttgctgattttgtatggtggaatcttggaatcaatccccatcagatactaaggatgacagtattggtaaataaatcacgtatttttccactgtactctaccaaatgtcctcgacaccagaacaatcatgcttcctgttcagaggcagaactccaggctccaagaacaccagtgggacagaatgtacaaaggtcaagactcagacaccagcacaaatggcacatattctctgtgccagatgcctcacaagctrtttcatctactgcccaaaacagcccttcaagtcagtgctttaagattcacctgccagttaaagaaacaaggctccaaaggttggggtacaaagaacaagacaggtgccagtcacggtaagcagggtacaaggtggtctatttagtcacaaagaacaaaacaaaatgcagttggctcaactcctaaaggctgagcacacggtcagttggaaatatgacgagatccttgccactgtgttactgcccttgggccccctaaattctccctaactagggaactgcattggtctagactggcacctaggtgagactgaatgggcaacatgaagccaagcagctctcgctatgggcagtagtgagctaaggagcagggagtcaggcctgttttctgcaaatagcgcccaccccacccsttccctctctggcagtccctgctcagtgcgtggctgctgctcagagtgcactttctgatggcgtgtttgcatatggcctcggatgctctatatccaaagtccttcgcaagctgtgcttcagccactgagcaaactggaatggaaaccagagcattacacaattcctgggtttacagactttgaaaggcaccaagagtggtttgttggggttgagattggccacatcccagtgtgcttttctgggactttgtaacagttatttctgagagggtttcactgagccctagagagactgctagaaggtcaacacagagggctctcgaagcacagcagagacaggcaacaaacccgtcacaaccacagcattcagccccctcccctgccctcttagggtaggttgctctaagctctctaagaacacacagaattaagtaagggtttatttcccagttgcctcaacaaatatttattcagctgtgtataagacctcatgtttctcaccagactgtgatgctgtgtaatgtacctttgattccctggcacctattcctgggcctaaaagaagtggatgctctacagttgttagtcaaatgaattagcatacaccatctagtcctagaatttggaaaacgccctataatgtgaaacagtcaacaaatcccctgtcaccaattgagtctacctgccgtcccataaatgacttctcacatctttcctaatagcacaaaattgctctcaagctcgagtgaaataagtctaacctgtgatgaactgccgaatgaattaataaacaccacttcatggaaagtgttctgtgggaatgtgacatggtcagaaatatgattggcagaggtcatagagtggatgggaacctaccagtgtgtggtttctgatattttttcctgcataagagatgagtttctcatggctcctatattcccaacaggcacgtttaaaacatgtccccttctttgtctctcaggaaagcaaatcaatcagtaggcaaatgcataaaattgatatcttcacaaggacaaacctgaatgtgctctctttttaaaaatcacaatcctaataatggacagcctttactgagtgcttactctatgctaagcactgtgccatgagctttgcatatatgatcccatttgagctagaaacaaccaaccctgtgtggtttgttctgtaggatcttcattttgcagattaggaaacgggcctatagaggttgcagaacatttccaggagtaatatgtgtgtgggactgaaatgcaggtcttgacattaacactgtcctgtctctaaaattatcatactcaaatttcagtacttggtgactgtcatcataagttgtcatgctgtccctcacaactgactgccacaatctgtgtactataacagagagaaacgtttaccaaaagtacggtctggcttttatcaaaactaactttttgcttcatggtttgaaccaaattgtccaatactgatttgagttactcgggtcttaaaaagcaatacgttaataactgtctcttactgattgtctataatgtcctactcactatatcagacatttttcaaaaattatttctaataaaaatagatatctaggccaggtgcggtggctcacgcctgtaatcccagcactttgggaggccgaggtaggtggatcatgaggtcaggagttcgagaccagcctggccaacatagtgaaaccccatctctactaaaaatacaaaaaattagctgggcctggtggcgggtgcctgtaatcccagctactcagaaggctgaggcaggagaatcacttgaatctgggaggcggaggttacagggagccaagatcacgccattgcactccagcccgggtgacagtgcaagactccatctcaaggaaaaaaaaaaagaaaagaagaagaaagaaaaaaaaatagatatctaaagtatgataaataaagttggagcaggacagaaaggggagccaagtcttcccccacttatgagtttcatttttcaggctccagaggcctttcatgtctctttttcccactcttgaaaagtctcagttgatgcctttccttctctcctcctttgttgatatccttctccactggcatcatctctacccctccccttggctaagatgtgagctgtgacttcctgctgggcaggatgagatgatctgggagaatagtcctctgagatgcgcggagaatggggtgggaagttatgtgagaaagagaagccatagcagggcgagtgctccaaggaggggtgcaaagcccatgtaggtaaatgaaatggagtggtggtccttctgaggagaaaatggaaaggccaggagaaggggctgactacaagtaaccacagtcttttgggaggagaggaaaaggcaaaagaaatgtctagaaagcacggatgttctttatgaacaaccacacaggaagattaaaagcagtgttttcctcaccaagcattgacatttgtgtggaagtcctgttgaccactgcatcatttctctctgtcgttctcgccaatgcccaccagagtctggaagtcacgcccagagaaatgtcttcaaggactgagcagaagtgaattctctgcagccctcaacacttgagcagcttcctgaatgacaaacctcactaaggccgggtctttttcacagacctgggagcaggggtcagtagcgggcaggctgtgcggcaaacataccattgkcatttggatgaggaaagacattaagcgggaacagggcagggtagggattcgttcatacttaaaaaaaaaaaaaaagtttggttagacaatcaaggagacgtgcaaatgttccccagccttcagtgaaatgctttcaggctttcacgtgaaaagtttgtacattaatttacttcaaacttgtccacaattgtgaactgtcaatatcaatatgggcccatgtgctgcctatttgaagatgatgctaccattgttgattatcctggatgtgtatgaatttagttgaaaagactgctgcatgctcagctgtttcctctgttgcacaaaaaaytgatttcaaactgtagccgtttgaaaatatataccaccaaaaagtttgatgtaaaaataagcaagtgcttccttaacccgtgttttcacaaatagctgattcaatcactttgattttaaattagcaagtcaacaagtcagtttcattaaaaatacatgcacagtctaattcattggttgactgaactgaccgttcccaggaagcagcagcgtgaggtgttgctaagagaagtggcttgaatatcagggcagccttgccatgggtctggacgccactgcacaccagttgtaagaacatgggtgagcctctgagcctctggacatttgtctctacctcctggattctggcgataatcatagtgtaagtagaaataaatttgtatgctaccaagttctctacaaaatctagttattactatcaataactgtcacatagccccaaagccaagtattcatcaactctttgaaatgtcagcattacatttgacacacttattcacgggaaccttcccatgcttaacaactgctgtccctctcctgtctgaatcatactttctaatagttctcaacagtgccctttattaacaatttaattcagcgctcccacagttagttataagcccaactacaactgcagttaatggaaaatctcctttatacgaggtgcatctgctgtgacatctgtctggaagccatggagaggattcagtgttcataagcaaattgagtaattactatgtaatcacacagtaaattgtgtagtcactgatttgctctcaaaattcatatctttgggacataatattaaaaccacctgggttctttcagaatgggcaggtatgttcttaaaatggccaaaataaggatttgaggtaaacacttgtggccaaaaaattagagtattatctccagaagagagaaagagaaagtggtgcagcgggaagaaatgagaatgtggaaaggagatatgaatagagggaaaaagagatgggagggacgctttaaaggtggattactaagtgctttctcagtcatctcatgaaatctgtgacatttttgagcctcactggttggagaaaacacagagaaatataaatgaggaagagagatcagagatgcaagattttacctgtctcaggaagagcccatcactggtgacagctatttggactttggaaaactgcaacatatgtagagaggagagaaaataatgactcaaaagatagtgtctaatagtcttttataatcacctagatttacagtggtaaaacctgagacctaatagttcgccaaatggttacaaaacatgaatctgtggcactctctaaactcccttttaaaaagccagtcaacagacagtagccatatatattgtgtgtaatgtatacaaggtgagattcttgaaataagacaaaatataaataaataaggcagcagcatggcaccatggaaggaaggctgactatagattgtggctgacactagtttgaatcctggctctcctgaagtgccatagagagctgctgatgttcaaccatttttaagctacataaatgacaatttcatgtgcttccaccaaatggaattagacgtctctaaatactccaggcttcagtttcattatttctaaaagtaaggatgataacttgagaattacagaatagtttctgacaccaacgtactatacattattagcaaaagtagtattgttatcacaagttgtaattaccatatacacacatgccagaagaggtgtacaaacctcccactgtcaatcccccagcaaaatgacaccattactgtacaatgggaatggggacaaaataagtcaatgcagcaaaatccaaagttatgagaatctcacttttaaccaccatatacttaaaaatacaaatttcactgaacagttaatatgaggagtttcaattaaatatgaggactcacttgttaaagcaaaggcatttgcataactatgcaaacatatgtccagtttctaaaaccaaaattttatgctgaacacccaccctcaacaaacgctctattaaaaattagttactatgcaattgcattaacatcaaatggttagattttaaacagcaaagtgctttcctaacaaacatgttccttcacaatcttcaaaagttctatacaggggcaagtgagggtagtgcagtgtagtagttaaatgtacaaagcaacgtaaagtaaaaatgcagcccaaagcaatccattacatgaacatgggttccttcctttgggggaggagcggctgcacatggcaccattagaggtgacagcagggaacgagccagggccattagtcagtttgctaagtagaaatgggaagcaagttcaatggagcaaaaaggtttctgctctgcagasttgatggagagcagtgtgattggtttcttaagggacaggcagaggggcaatgcgtaatttctcctcccctcactgaacatgcctgtttatcagagatgatcaacaccttagataacacattatgcaaatgactgtggcagtttggcacctaatgcagtctccctgccagagtttcgattcactctcactgtggtctgggaaaagtgaaaataaacatgcctcccttccctccttggcttctttgtccttgaaataaatattcttccaagcccacagctcggaggcttagctgtatggcagatggcagtatctcctgcagaggttatgaatatgaaactcacaggctaggaaattaatttaacaaaaacaaaaatagaggcactagggattatggcaggtcatacagtgggtatctcagggaaattcaattccttaagattcggaaagattccaaagatgtttcagtgataatgaatcagatgaaactcactccccaaggtagctatttcctgatttgctcattgaaaaatgacactgggcaataacagaaaaactacgcgtgatgtaaattcttcttttctcccaccattgaaatgggcatatcttaacctggagaaaggaaaactgaaagttacctatctatctaaacatagttactataaaaagataattgattggaccaagtcccaaaataaaactggaggatacgtgctcaaactacacaaatagctattctatccatgaaaaaatgacatctttaagtaaatatgatcagatctgagtacaaattcccaaaggaaatactggaagctcctgctgtaattcctaagatacatctgtatctaaggtactgtttacacctagagtagataattttcctaaattatctctaagactacttccaacgctgaaatttgaggtgtaaggataacatcagaattttttattaaaaaaacaagctcaatgttgttggatttctatatcagtgaggagtagaactctattgcagagtagattcttatctaaaaaaggaactttgctgcacaaaatagggtatgctggtctctgtttcaaaaacagtctttaacaaaaggcagagttcaaaaacaaacagaatgagatcagagctgtggtattcctgtgggtcatcatgtctttatactcagattaaaaggagcctccactttgtatcatgaagactgggtacatgtaacagtcttctgtataaacatctgtgcccagagtagaaaatttaagcttgaagttaataataaatagcacccaaatggagcctaggtttttccttataaaaagcaagcagtgtctgaataatggtttccttattgtgcatmctttgtaaggtcataaaatgagaagatggagaaagattggcttgtcctggcttgtccgtccttgaaagccattgtggtctcttttccagaagatgacaagtctcctaatagagacttcagttctaggttagattctgctggctcttttactttggttacaaatggttagactttctacaaatgttctccccataagatatagtaataaagtttctaggcagcactttgggaggccgaggcaggtggatcacctgaggtcaggaatttgagaccagcctggccaatatggcaaaaccccatctccactaaaaatacaaaagttggctgggcacagtgccacacacccgtaatcccagctactcaggaggctgaagcagaagaactgcttgaacctaggaggtggaggttgcagtgagccaagattgcaacactgcactctaggctgggcaacaaagcaaaactccacctcaaaaaaaaaaaagtttctaaactagttacactcataaatatgttgagatctgtgcccaaggagaggcctgacatttttatgcaagctaagaaactctgcctctgtcttacatcttgtcattaatttcactgaaaatgacaacttgatagatacgcctatgtgatagtcataacctccttgaaaagcctttttgaggggaggagccaagctggccaaataggaacagctccggtctacagctcccagcatgagcgacgcagaagacgggtgatttctgcatttccatctgaggtaccgggttcatctcactagggagtgccagacagtgggygcaggttagtgggtgcagcacaccatgcgcgagccgaagcagggcgaggcattgcctcacacaggaagcgcaaggggtcagggagttccctttcctagtcaaagaaaggggtgacagatggcacctggaaaattgggtcactcccacccgaatactgtgcttttccgacgggcttaaaaaacggcgcaccaggagattatatcctgcacctggcttggagggtcctatgcccacggagtctcgctgatygctagcacagcagtctgagatcaaactgcaaagtggcagcgaggctgggggaggggcacccaccattgcccatgcttgcttaggtaaacaaagcagctgggaagctccaactgggtggagcycaccacagctcaaggagggctgcctgcctctgtaggctccacctctgggggcagggcacagacaaacaaaaagacagcagtaacctctgcagacttaaatgtccctgtctgacagccttgaagagagcagtggttctcccagcatgcagctggagatctgagaacgggcagactgcctcctcaagtgggtccctgacccctgagcagcctaactgggaggcacccccaagtaggggcagactgacacctcacacagccgggtactcctctgagacaaaacttccagaggaacgatcagacagcagcgttcacggttcacgaaaaaccactgttctgcagacactactgctgatacccaggcaaacagrgtctggagtggacctctagcaaactccaacagacctgcagctgagggtcctgtctgtttgttagaaggaaaactaacaaacagaaaggacatccacaccaaaaacccatctgtacatcaccatcatcaaagaccaaaagtagataaaaccacaaagatggggaaaaaacagagcagaaaaactggaaactaaaaagcagagcacttctcctcctccaaagtatcgcagttcctcaccttcaatggaacaaagctggacggagaacgactttgacaagttgagagaagaaggcttcagacgatcaaactacaagctacaggaggaaattcaaaccaaaggcaaagaagttaaaaactttgaaaaaaatttagaagaatgtataactagaataaccaatacagagaagtgcttaaaggagctgatggagctgaaagccaaggctcgagaactatgtgaagaatgcagaagcctcaggagccgatgcgatcaactggaagaaagggtatcagcaatggaagatgaaatgaatgaaatgaagcaagaagggaagtttagagaaaaaagaataaaaagaaacgaacaaagcctctaagaaatatgggactatgtgaaaagaccaaatctacgtctgattggtgtacctgaaagtgatggggagaatggaaccaagttggaaaacactctgcasgatattatccaggagaacttccccaatctagcaaggcaggccaacattcagattcaggaaatacagagaacaccacaaagataatcctcaagaagagcaactccaagacacataattgtcagattcaccagagttgaaatgaaggaaaaaattttaaggcagccagagagaaagggcgggttaccccacaaagggaagcccatcagactaacagcggatctctcgggagaaactctacaagccagaagagagtgggggccaatattcaacattcttaaagaaaagaattttcaacccagaatttcatatccagccaaactaagcttcataagtgaaggagaaataaaatactttacagacaagcaaatgctgagagattttgtcaccaccaggcctgccctaaaagagctcctgaaggaagaactaaacatggaaaggaacaaccggtaacagctgctgcaaaatcatgccaaaatgtaaagaccatcgaggctaggaagaaactgcatcaactaaggagcaaaataaccagctaacatcataatgacaggatcaaattcacacataacaatattaactttaaatgtaaatagactaaatgctccaattaaaagacacagactggaaaattggataaagagtcaagacccatcagtgtgctgtattcaggaaacccatctcacrtgcagagacacacataggctcaaaacaaaaggatggaggaagatctaccaagcaaatggaaaacaaaaaaaggcaggggttgcaatctagtctctgataaaacagactttaaaccaacaaagatcaaaagagacaaagaaggccattacataatggtaaagggatcaattccacaagaagagctaactatcctaaatatatatgcacccaatacaggagcacccagattcataaagcaagtcctgagtgacctacaaagagacttagactcccacacattaataatgggagactttaacatcccactgtcaacattagacagatcaacgagacagaaagtcaacaaggatacccaggaattgaactcagctctgcaccaagcggacctaatagacatctacagaactctccaccccaaatcaacagaatatacatttttttcagcaccacaccacacctattccaaaattgaccacatagttggaagtaaagctctcctcagcaaatgtaaaagaacagaaattataacaaactctctctcagaccacagtgcaatcaaactagaactcaggattaagaatctcactcaaaaccgctcaactacatggaaactgaacaacctgctcctgaatgactactgggtacataacgaaatgaaggcagaaataaagatgttctttgaaaccaatgagaacaaagacacaacataccagaatctctgggacacattcaaagcagtgtgtagagggaaatttatagcactaaatgcccacaagagaaagcaggaaagatccaaaattgacaccctaacatcacaattaaaagaactagaaaagcaagagcaaacacattcaaaagctagcagaaggcaagaaataactaaaatcagagcagaactgaaggaaatagagacacaaaaaacccttcaaaaaattaatgaatccaggagctggttttttgaaaagatcaacaaaattgatagaccactagcaagactaataaagaagaaaagagagaagaatcaaatagacgcaataaaaaatgataaaggggatatcaccaccgatcccacagaaatacaaactaccatcagagaatactacaaacacctctacggaaataaactagaaaatctagcagaaatggataaattcctcaacacatacactctcccaagactaaaccaggaagaagttgaatctctgaatagactaataacaggagctgcaattgtggtaataatcaatagcttaccgaccataaagagtccaggaccagaaggattcacagccgaattctaccagaggtacaaggaggaactggtaccatttcttctgaaactattccaatcaatagaaaaagagggaatcctccctaactcattttatgaggccagcatcatcctgataccaaagccggccagagacacaaccaaaaaggagaattttagaccaatatccttgatgaacattgatgcaaaaatcctcaataaaatactggcaaaccaaatccagcagcacatcaaaaagcttatccaccatgatcaagtgggcttcatccctgggatgcaaggctggttcaatatacgcaaatcaatatatgtaatccagcatataaacagaaccaaagacaaaaaccacgtgattatctcaatagatgcagaaaatgcctttgacaaaattcaacaacccttcatgctaaaaactctcaataaattaggtattgatgggacgtatctgaaaataataagagctatctatgacaaacccacagccaatatcatactgaattggcaaaaactggaagcattccctttgaaaactggcacaagacagggatgccctctctcaccactcctattcaacatagtgttggaagttctggccagggcaattagtcaggagaaggaaataaagggtattcaattaggaaaagaggaagtcaaattgtccctgtttgcagatgacatgattgtatatctagaaaaccccattgtctcagcccaaaatctccttaagctgataagcaacttcagcaaagtctcaggatacaaaatcaatgtacaaaaatcacaagcattcttatacaccaataacagacaaacagagagccaaatcatgagtgaacttccattcacaattgcttcaaagagaataaaatacctaggaatccaacttacaagggatgtgaaggacctcttcaaggagaactacaaaccactgctcaatgaaataaaggaggatacaaacaaatggaagaacattccatgctcatggataggaagaatcaatatcatgaaaatggccatactgcccaaggtaatttttagattcaatgccatccccatcaagctaccaatgactttcttcacagaattggaaaaaactactttaaagttcatatggaaccaaaaaagagcccgccttgtcaagtcaatcctaagccaaaagaacaaagctggaggcatcacactacctgacttcaaactatactacaaggctacagtaaccaaaacagcatggtactggtaccaaaacagagatatagatcaatggaacagaacagagccctcagaaataacgccgcatatctgcaactatctgatctttgacaaacctgagaaaaacaagcaatggggaaaggattccctatttaataaatggtgctgggaaaactggctagccatatgtagaaagctgaaactggatcccttccttacaccttatacaaaaatcaattcaagatggattaaagacttcaatgttagacctaaaaccataaaaaccctagaagaaaacctaggcattaccattcaggacataggcaggggcaaggacttcatgtctaaaacaccaaaagcaatggcaacaaaagccaaaattgacaaatggsatctaattaaactaaagagcttctgcacagcaaaagaaactaccatcagagtgaacaggcaacccacaaaatgggagaaaatttttgccacctactcatctgacaaagggctaatatccagaatctacaatgaactcaaacaaatttacaagaaaaaaacaaccccatcaaaaagtgggcaaaggacatgaacagacacttctcaaaagaagacatttttgcagccaaaaaacacatgaaaaaatgctcaccatcactggccatcagagaaatgcaaatcaaaaccacaatgagatatcatctcacaccagttagaatggcaatcattaaaaagtcaggaaacaacaggtgctggagaggrtgtggagaaataggaacacttttacactgttggtgggactgtaaactagttcaaccattgtggaagtcagtgtggcgattcctcagggatctagaactagaaataccatttgacccagccatcccattactggctatatacccaaaggattataaatcatgctgctataaagacacatgcacatgtatgtttattgcggcactattcacaatagcaaagacttggaaccaacccaaatgtccaacaatgatagactggattaagaaaatgtggcacatatacaccatggaatactatgcagccataaaaaatgatgagttcatgtcctttgtagggacatggatgaaattggaaatcatcattctcagtaaactatcgaagaacaaaaaaccaaacaccgcatattctcactcataggtgggaattgaacaatgagaacacatggacacaggaatgggaacatcataccctggggactgttgtggggtggggggaggggggagggatagcattgggagatatacctaatgctagatgatgagttagtaggtgcagggcaccagcatggcacatgtatacatatgtaactaacctgcacattgtgcacatgtaccctaaaacttaaagtataataataaataaataaataagtaaaaataaaaatatgccttcaccacaaagaaaaaaaaaaaaaagaaaagcctttttgaaaagccattcaagagccatctcctgccccasggtgttagagcacaatacaggtcagcacaacatgcttagccttacaacaggaaggtggactttctggttcctcagatctgacatttaatcattgtgaccacctcagggtctaaatggagaccgaaaatttgggttggtgcctttctgtgcctttgggccaataaagacaatgggattaaacctcctatttcacaaattctccagagatactgagattatgtgtatactctttcacattctccagttagcaaacctggctgcaatgatgtgaccacacttgcctgagcagcatctgtgaaatatacaaatgaaatgtatcaaccacctaatgaggacagaaggccccttccagcctcccccttctcctaagagagtaaggagcacgttccaggctgttttgttttttcttttagccagaagccactgagccatgctcctaattaggaaagtaaaatgccctaaccaagatactagaaatcagaatggttacagtgaatatagcttttcagattctatatttgccaaatgaatatttcagggaaaggggaaaataaggttaaccataggaaataatgatagaaagactatatttaagtaacttttcatacaataatgtgcttcctttaaaataataaaattttttgcttgtttttacttcaacactattacctattaacttgacttcatccaggtttttaagcactttattagaatgcggtttagcataaatattaataaagctggaaaaagaccaaatgaattaaaatgtattccctgaactgggctatataaagacacatattattacaaaagttacttttcacctattatggtagggacctattttatcatatcttccagacaataaaagccaatggtcaaaacaaagcaaaatagaaacacatgaggtctctccagttctttagatttgagcctgagtttaaaatcctagagagaagtagcaaccacaaactttcagttacccatgctgctgcctggccaagtaaaactccactgcatgtgccttttgactccagcaattctttcccacatctgttcaagctgagcaatgcatcttcacatttcatacttacttctatgtcattatttcatcagtttctgtagaatgtatactgaaataaatcgtaagtgactactgtttagacttcaactccttagaggacaggagcgcctgcacttagtaaagacaatagtaataacagcacctagattgctaataagttgtattaaatatttaactgtatgtataattttctttaaatgttaaaattaataatattaatatttggctgggtgcagtggctcacacctgtaatcccagcactttgagaggctgaggcaggaggatcacttgagctcaggaatttgagaccagcctgggcaacatgacgaaactccgtctctacaaaaaactatcaaattagctgggtgtggtggcacacacctgtagtcccaactgcttggaaggctgaggcgggaggattacttgagcccaagaggtggaggttgcagtgagtaggatcatgccactgtattccagcctgcacaacagaccctgaatcaataataataataataatatgtattaagcactattgtgttccaaggctggcattaagtgcctttctgacatttatttctttcattttcatgaacctgaaataggcacacttttctcatgttgaagctgaagaaatgattgcggagcagtgatacagctagtaaatggcaggatttgaacccaggatgcctgaccacatggtctgtagttttagcaattcacaatactgcctcctggaataagtcccttaacaaatggtcttcaaaattactgacaaaattaaaaatcctgataagtaaaaagtaaaagtttgcagctgtaaattttcgtaaacatttgacacttagagaaagctgatgtatttttagtctaatttgactgcctttatatgaaagattatttcaagatacttcacagttcaggaaagtaagatgaaaggaaatcaagataacatacctggagtagagctccatttagaccagggcaatccagcctgtcagactccatcatgccacacttgaccagatgcccagaaggacctctgtggtgaatccccagataggaatcctcagtgcttggcagtcaggtcaaatcattattctattggctaatcagacagactgccaggattgctgatttcagcctcttaataactgccgctatggtgctggagacactacctaggatagaagtgatgtgtctttgtcattcctggacaagctctgagataaataaccaggaagacttcaaaccaaacatggtactgtcttatgctgccaccctaaagaccccagatcacatactattgtcatcctaacatcagaagggttgacttagtgccgttctgtgtacttgacccataaattgcaggtttcaattgcctgtattgttcctctgaaatattagtggcctgggaataagttgtagttgcagaatgatgagccaggttgggaagttatgactttcagtggcactatgagtatgatctgaggactccagacagcagatcattgttagtgcctttgttctctgacaccaaaactgaggcatgtgaagtttctaggacaaggctttatagaaccaagaacaatgtcatctgtccctatattcatatcactggattctctgagaatgctcacagagtaaatgtgggaagaataggaagcctattagacgaaatatctaataacagtggagagatgcttacatgattggaatatggcagtcattgaaaatgaatggcacaagagtacatagtcaaatgcaaaagtgttgatgatgcttgctaagtgggggaaaagcacatgaaaatctgcagactacatgatcccatattaataaatgaaaatatgtaagaggaggcaaggatcatcatggtggacgggaggcaggactggattgcagctccacacagagcagcatgcagagactcgcattatgaattttagctmcagatcgactgcaagaacaaaccagaaatcccgagaggacccacagaccctctgaaggaagcggactgctcctgcaggactcgggagacatcccaagtactatgagtgccccaactgcggtagtgggaaagggagaccctcctctcccaaacacacacccctactggagaaactaaaggtctgtttgcaggagaagcttcagaccttacctggagcagagtcaatttagagagcctagcgaaatacaggggtagaggaagcagcagaaaggccttgggagctcgctgggtccccaaacaggcccttcctgctgggcaccacaaggatccgtcgagagggcagccrgaggagcaggaggtaaaactccacagaaagaaagaaatctctagctgaactgtataacaatttgaatggggcgagaagcctcctggccagaactcaggggagggcgcaaatccagtgtgcagactccacaggcaggaaaagaaccaagccttgttctttcccagctgggaggcaggtagcctggggcaggttttcaagcctggcttgccctctgcctggaaacagactgggggctgttagggggcacagtgggagtgtgactggccctttggtttgcatgagagctgggcaaagcctgtgactgccggctttgccccacttccctgacaacctgcatgactcagcagagacagccataatcctcttaggtagacaactccaatgacctgggaatctcacccccatcccccacagcagctgcagcaacacctgcccaaggagagtctgagttcagacacgcctcccactgcccccacctgatgctccttccctacccaccctggtagctgaagacaaagagcatataatcttgggagttctagggccccacccaccaccagttcctctccatactaccacagctggtgctctctggaaagcgccacctcctggcagaagtccaagcagcacaaaaacaaagcattaaaccaccaaagctaagaaccgtcacagagtccattgcaccccccaaccacctccaccagaacaggtgctggtatccacgtctggaaggcccatagacgattcatatcacaggactctgtgcagacaacacccagtaccagcctgtagtcaggtagacttacttacggagtggctagacccagaagagagacaatattcactgcattttggcttgcaggaagccacatgcttaggaaaagcggggagtactacatcaagggaacatcctgtgggacaaaagaatctgaacaacagccttcagccctagatcttccctctgacagagccttcccaaatgagaaggaaccagaaaagtaatcctggtaatatgacaaaacaaggctctttaacaccgcgcccccacccccccgcaacaacaaaatcacacttgttcaccagcaatggatccaaaccaagaagaaatccctgatttacctgaaaaagcattcaggaggttaactagggaggcaccagagaaaggcaaagctcaatgcaaggaaatcaaaaaacaataaaagaagtgagaggagaaatattcaaggaaatagcttaaacaaaaaaacaaaaaacaaaaatcaggaaacattggatacaattatagaatgcaaaatgctctggaaagtgtcaccaatagaattgaacaagtagaagaaaaattcagagctcaaaaacaaggtctttgaattaacccaatccaacaaagtcaaagaaaaaagaaaaagaaaatatgaacaaagtctccaagaagtctgggattatgttaaatgaccaaacctaagaataatccgtgttcctgaggaagaagagaattctaaaagcttggaaaccatgtttgggagaaaaatcgaggaaaacttccctgccttgctagagacctagacacccaaatacaagaagcaaagaactcctggaaattgatcgcagaaagatcgtcacctaggcacattgtcatcaggttacctaaagagaagacaaaggaaagaatgttaagaaatgtgagacagaagcaccaggtaacctataaaggaaaacctatcagaataacagcagatttctcagcagaaaccctacaagctagaagggattggggccctatcttcagcctcctcaaacaaaacaattatcagccaaggattttgtatctagcgaaactaagcatcatatatgaaggaaagatagatagtctttttcagacaaacaaatgatagaattcaccactaccaagccaccactaccagaactgctaaaagaagctctgtttcttgaaacaaatcctgtaaacacatcaaaacagaacctctttaaaccataaatcacacaggacctataaaacaaaaatataatttaaaaagcaaaaacaaaaaaaagtacacaggcaacaaacagcacaataaatgcaacggtgcctcacatttcaatactaacattgaatgtaaatggcctaaatcctccacttaaaagatacagaaccacagaatggataagaactcaccaactaaccatctgctgtcttcaggagactcacgtagcccataaggactcacataaagtaaaggtgtggaaaaaggcgtttcatgcaaatggacaccaaaaatgagcaggactagctattcttatatcagacaaaacaaacattaaagcaacagcagttaaaagagacaaagagagacactatataagggtaaaagccttgtccaacagcaaaatatcacaatcctaaacatatatgcacctattactggagctcccagatttataaaacaattactagtagacctaagaaatgagatagacagcaacacaataatcatgggggatttcaatactccactgacagcactagacaggtcatcaagacagaaagtcagcaaagaaacaatggatttaaactataccttggaacaaaaacaacatttcatccaacaaccacagaatacacattctattcaatggcacatggaactttctccaagataggtcatatgataggccatacaacaagtctcaataaacttaagaaagttgaaattatatcaagcactctctcagaccacagaggaataaaactggaaatcaactccaaaaggaaccttcaaaactgtgcaaatacatggaaattaaataacctgctcctgaatgagcactgagtcaaaaatgaaatcaagacagaaatttaaaaattcttcagactgaatgacaataatgacacaacctaccaaagcctctggaatacagcaaaaacggtgctaagaggaaagttcatagccctaaacgcctacacatcaaaaagactgaaagagcacaaactgacattctaaggtcacacctcaaggaactagagaaacaagaacaaaccaaacccaaacccatcagaagaaaggaaataaccacattcagagcagaactaagtgaaattgaaacaaacaaacaaaaaatacaaaaaataaatgaaacaaaaagctggttctttcaaaagataaaattgatagactattaacaagattaaccaagaaaagaagagagaaaatccagataacctcactaagaaacaaaacaggacataatacaactgacaccaccgaaatacaaaagattattcaaggctactatgaacacctttgcatacatgaactagaaaacctagaagagatggataaattcctggaaaaatacaaccctcctagcttaaatcaggaagaattagataccctgaacagaacaataacaagcagcgaaattaaaatggtaatttaaatattaccaacaaaaaaaaggtccaggaccaaatagattccgagcagaattctaccagacattcaaaacagaattggtaccaatccttttgacactattgcacaagatatagacagaaggaaccctccctaattcattctgtgaagcgagcatcaccctaataccaaaaccaggaacggacataaccaaaaaaagaaaactacagacctatatccttcatgaacatagattctaaaatccttaacaaaatactagctaaccaaatccaacaatatatcaaaaaagataatccgccatgatcaagtgggtttcatactggggatgcaggaatggtttaacatatgcaagtcaacaaatgtgatacaccacatgaacagaattaaaaacaaaattcacatgatgatctcaatagatgcagaaaaagcatttgacaaaatccagcatctctttatgattaaaactctcagcaaaatcagcatataagggacatacctcaatgtaataaaagccatctatgacaaacccaccgccaacataatactgaatggggaaaagttgaaagcattccctctgagaactggaacaagacaaagatgcccactcttaccactcctcttcaacatggtactggaagtcctagccagagcaatcagacaaaagaaagaaatgaagggcatccaaattggtaaagaggaagtcaaactgtcattgtttgctgatgatatgattgtttaccttgaaaaccctaacgactcctccagaaagctcctagaactgatgaaagaattcagcaaagattctggatacaagaatcagtagctcttccatacaccaacagcaaccaagtggagaatcaaatcaagaactcaacccctttacaatagctgcaaaaaaaataaaatacttaggaatacacctaaccaaggagtcagaagacctctgcagggaaaactatgagacactgctgaaagaaatcacagacaacacaaacaaacggaaacatatctcatgatcatggatgggtagaatcaatattgtgaaaatgatcatactgacaaaagcaatctacaaattcaatagaatccccatcaaaataccaccatcattcttcatagaattaggaaaaacaattctaaaattcatatggaacaaaagatgagcctgcatagtcaaagcaagactaagcaaaaagaacaaatctggaggcatcacacgacctgattttaaactatactataaggccatagtcaccaaaacagcatggtgctggtataaaaataggcacatagaccgatggaacagaatagacaacccagaaatacacccaaatacttacagccaactgatcttcaacaaagcaaacaaaaatatgaagtgaggaaaggacacccttttcaacaaatggtgctgggataattggcaagccacatgtaggaaaacaaaactggatactcatctctcaccttatacaaaaatcagctcaagatggattaaggacttaaacctggccgggcgcggtggctcaagcctgtaatcccagcactttgggaggccgaggcgggtggatcacaaggtcaggagatcgagaccatcctggytaacacagtgaaaccctgtctctactaaaaaatacaaaaaaaattagccaggtgtggtggcaggcgcctgtagtcccagctactcgggaggctgaggcaggagaatggcgtgaacccgggaggcggagcttgcagtgagccgagatcgcgccactgcactccagccccgggaaaagagcgagactctgtctcaaaaaaaaaaaaaaaaaaggacttaaacctaagacctgaaactgcaacaattctgaagataacattggaaaaactcttctaaacattggcttaggcaaggatttcataaccaagaacccaaaagcaaattcaataaaaacaaagataaatcactgggacctaattaaactaaagagcttttgcacagcaaaagaaacagtcagcagagtaaactgacaacccacagggtgggagaaaatcttcacaatctgtacatctgacaaaggactaatatccagaatctacgacaaactcaaacaaatcagtaagtcaaaaacaaacaatcccacaaaaagtgggcttaggacatgcatagacagttctcaaaagaggatatccaaatggccaacaagcatatgaaaaaatgctcaacatcactaatgatcagggaaatgcaaatcagaaccacaatgtcatactaccttacctctgcaaaaatggccataatcaaaaaatcaaaaaacagtagatgttggcatggatgctgtgatcagggaacacttctacactgctggtgggaatgtaaactaatatggccacgatggaaaacagagtggaggttccttgaagaactaaaagtagaactaccatttgatccagcaattctactactggatatctacccagaggaaaagaagttatatgaaaaagatacttgcacacgcatgttcatagcagcataattcacaattgcaagattgtggaaccaacccaaatgcccatcaatcaaggaatggataaagaaactgatattggagactattattctaagtgaaataactcaggaatggaaaaccaaacgtcgtgtgtgctcactgatacgtgggagctaagctataaggatgtaaaggcataagaatgatacaatggactttggggacttggggggaagagtgggagggggccgagggataaaagactacaaatatggtgcagtgtatattgcttgggtgatgggtgcgccaaaatctcacaaatcaccactaaagaactttctcctgtatccaaataccacctgtgccccaataacttatggaaaaataataaatacaaaaataaataaatgaaaatatataagatacaaaaaaagcaaattatctacatctacttgtcaatagtgcctatatatacttgataggattatgggtgatttttattttcttctttttatttgtttttatcctttagattttctgtttttgaacatgcatcatttttgtaatactaaaacaaaagctttctcaaaggcaataaagtcgtcaaatacactgttagaggttaaaaaaatcaagaataataagctactaaatttacaagaattaaaaaaaatacatgtgattaggtttaccccataaggcaaaccaaaaggtgataaccagccctaccttttattagaactcgtttaaaaagcaaaaaacacaataacaaaaaagtgatgatagtcatttacaattccaaaagggaagtcacagaacatcttaactgtccactaaggcctgacaccccaaactgtcttctcaagaagctgtgagtaaaaacaaaaatctgtgagccatgttatgtctccgtcttgagtttctcaaaggaatggatcatattaaagactctaagcagtctttccataaataaatctgatgaacattgtttaactcgtttctacccattagcacctcactacccaaaataataaggctattggaatacactctggctgtaagccagcattagaaaaacttctttcagaactccatgaatattttacttctattgagcatttacttatgtgcttagctctccagcccaagtagaagataaataataatcctgatttctgacaattgttccaggaaccatcgcctagagttcctgggggaaccagaagcattggcacttctctactagtcttctgagactgacatgtgcctggggagacacggagcacattattgctgttgtgcatcatgccttgaaaactttccagttgctggagggttattcttcaccctgctcctattacccaaaaatgcaatttattctcttcaatctggcagtaaacagcctatgtaaagaattttcaagcattttaaaaccaacttaccaatagctctgctgataacttcttggaagggcaattttggcagtgaagttatgttgtcttcaaacttttcaatatatatattcttatcagtagcttgggtgtgacatgagttgaagcatcttgttaggaaatttcagagaacacagcacagcagctattgcaaatagtgactgtggctatggtcacccgaggtgaaaagcaccatttgcaccactttatcacttcttagagacacaatttacacattactgctcttactggataagacggatataatcacaaatgacctaccacaacagcaaatcagaaatttattaaaaatcagctcagaaagacatttcggaaagaataattcaaggatttggcagttgacaaccattcatcacagaaaagattcagattttgtattaggtttcccaactgtctcttttattcgtgatggtgtgtgtgtgtgtgtgtgtgtgtgtgtgtgtgtgtacgtgcttatcatcttccactaggattattttcctaaacacaggaacttttattttatcggaaaatttatttttaatctagaaacataatgaagttatatgagttcaagaactaaatcagaggcagaaatttgccttgaatggcacagtgaaaagggctaggcatggggaaagatactgtatactcaaaatatgaatataaaacatcttttgatacacctttccagcacatcacataaaaacttactctagaatatagtccacttttctatgatatctcagcaaaggactcttgttgaagctaatactggatgacraattactgtttatggctatctggaagccatttactcagattatttcttcctcaacaatgcttcttgcactgtgctagtatgctgaggcaaaaatgataaagatagaaatagtaatgagagtgacaaaaataatgataaaaccagattaaatctttgcccttacagaggttaaagtttatcaaagagtcacagttcaaagcaattgaaaaattaacctattgattgagttattttcccatttgaggtaaggaaacaaccaacctaaaatacaatcaattgtaaagctacaaaggattactgaaggaaaaaatgatgtaggtatggtggaggaaaaaatattcagatgatcaaaacctcccttcgcattctcagtttcaactttattctaccatgaatccagcattctctcatactggacagctccctactctagaaataaatcaaataatttaacacctttgtgtctctgcaaatgttcttaacttagcattgaatgtctctcccccacaatcaatttttctcctattgagagttctctatttttttaatttgagaaccacgtcaaatattgtctcttccatggatctaacccaattatccttatcaataattaactatttcaattgtagtatcatacaagtggtaccattcatgattccttattttttcccatatagattatagttaatataacttgaagctccttaaaggtaggaaatttgcattttcatttgtatatttattataatgttaataaatgttaatagtgggattatcaaatatgatgaattaataaatgcaaacaaaagcatagtggttttcagtaccaaaaaatggaaaragaataacaagttgtcagcatgtctccagactcaccaacaggcacatgtatgttggcacatgtaattataaataaaaattaacacatcacaataaatgaactaagtaaattctcagcaatttttgagagtacatttatggtggcctactttaaaatgaagattctgtggttttcagttaattcacctagggggagggcgtgcaagtgttccctgagagagataatcagttgtcatccaggacaagttcacaagagggccatgtgacatccagtcaaaagacacatgccatttttagacaacatgaaaagagaaatagggttttcagatatcatcttcaattcaaagtgctgctcctcacatgggcaatgctaagtagcattttccaggatgagcacagtagggattgatttatttagtttatggtggttgatatttctcttggacaatgccaaaatgaccagcaattaataatagccaaaattaaactctgtaccatataaagtttatgatttacctcacagccagcctgtaaattagattatcttcatctcattttatacttaaagaaatagagacaatggtgtgtggctaagggttgtaaacaggggaatctattcaaccaggctaaggagaaagggacttatcaaataagtgtcaaggagctcatggactctcttgaagggcttgacctggatttattaactaaccagccagaacaacatggccatgaacaatgcagcccaaaaagtacctgataattctttggacttgttttagtggacacgttattgcttctattgcctttactcacaactgtgatgttcacatttggaggctacaaattctatcatagctgcttcagtagaaccagggacctttgtcactccatgtgttttctggaacatccaaataaccagaaaacagctgccatctcatgctgctcacttctccatctatgtcttgcccagaggtatctgatgggtggaaactaggtcatttacttttatcctagttgtaaaggagcctgggagacttcattatggatgtcagtttcttttacagctggcccatttccaggaagaaaagctaagggggaattggaacaggagaggagttggctaaactgccaaatcggccatgagtggagaatttattgaccatagtcacatcgctagtaaggggcagagccttctgatgccatctcttaagttcttcccaagataaaatgagtgcctcattgtagcagagatgagcagctcacctgtctctcagagcttaattgaaatataccttaagagcaactgttgccttttaacctaggattgcatgaactgcaagtgtcattactgatttggctttgtagataccttaatattgttaaggaagtagcccagtgaatggggatgaattcttcatcctctgtgcagttttcatttaaaaatactagcacacctacactgtgaaactgagaagctcagagctagacgaacccttaagccaaggtgaaatgcatagcagctggactacattttccctacctctcacattaagtcatggataattaaaggaaataagaaaataaatttgattctgacgaccatgtaaaaagtgagatgcagaatatggtgtayagacctacatattacagtttgatagacttgtattcaaatccaggtttaatcactcattagctatgtaaagctggggcaagttgcttaatctctccaggcctcagctttctcttctgtaaaatgggaaccatgcctacttcttagtagaagtaattattagtgagattgtatacattatttgtaaaacactgtatagactgtcacatacagaaggtattgattaaatagaagttaccrtttaacattactttaaaagaagtaattactaaatgtcacaacattgatttaacaaatctttaaaaatatgtgctgtagtaatccatccagctatgaaaatggttacctattgagggtacagatatagagaatggcaagtgagatatttttcctttgatttctgatattttgtatggtttcatgtgtttaaaacaaggactatttcctttcacgactgacctgttttcagtcatacttagagaccttccctaaattctacttctaccaaactttcaaactgtctgatggactttcaaattatgtactaagggaaagggaaagcaaatagcttggaatttcttagaaaactcacctataccatctgttcagaacttactaaagaaatgactattaaaatgtcatttctttaayagtctttaaacaacaacaaaaaaaatagcctcagaatttcatggaaagtcatctctaaagggccaagtaaaaacatcctttgaatgagactttacaacattttaacaatttcagaaacaagctgacagctaaaatataaagaaaaataaaacacatctatgtcgatgaacaaaaactacagaattgttttttgaccttttgttgtcattagcaaaacctgtcctatatgcctactaagtttgtctatgatacaagtatcccaagaaatttaactcaaaacactcatgttctaaaatatgttttctatttatgaaaaacaagagcaaaaagcagaaggaaggcaaacttctccttcctttggtataaacttacatatataccatttaagagagaaagcagtgctgaaaatatgcagggctataaagtgcattggtctctgatccacctgctggtgaacatatttggagagtcaatagcagaagtcttgttctcaagagcatgagtactcyatgctgatgagactggaaggagggataagcactggtttggaggctgcaaaaagcaggctgaggaggtgtgaagagaagaaaacacataggaccaccagcaaagtgagcagaaggacatgagggtgcagtcagaaggaatccaaagcgggagtgaaagaagagagtgactcagtgtgtccaaagcagctgacaccaggaaagcttggactgggaaagttgtatgctttactgagaatagcatcaagtgccatgttgatctattgtaggagttaaataggtaaggaaatgggaaaaagcaggagagagtgcccagttaaggcccctagctatgaaacctaggaggaaagcatgatagtaattggcagtgatgccagggtcaagagaaggttttgctgttcttgttatttttctaagcaaaggaagacaagcacttctagagacaaaacaggagtcaatggaaatggagagactaaaaacacagaatataaaagagtcctttgttaagggggctgagaaagcatgtactagtgacaggatttctgatccgtgaggattaatgtgattttgaaactaagagatatttttaaggggaaaacatttccaaagagtttttatggttttataacagagctaccaccagttttctgttgactgacaaccctatgctttgtccaggagaccaatttaccttaatgtttctttgattatgagaccttaaccccagaatattttaaggctcaagagtaaaaatacaggtgatggacagtaatgggaattgatgcagtggggaggagagcatagagaagtgataaaggaacaggagttcctttgctttgaaaagcaaaggccttgggagagattaagattgtaatccctcttcacagagtctaaatgagaagagtccagcatagcctgaaagagtttcaagagcaatgtgagtagactgtggcaaagagttcaaggcaccagtaggatgaaaactggcaggctgagtctctagccatagaggaagtaagaatcatgaaccaaaaggaaattgtaaaagaggagaatgcctagaaatagaaatctcaagcataaaatggtatccagtgagagtgaagctgagcaaatrtttggtgagtagcttgtgaatccaagcaatgctggagattggcagcggggaggactgtggagagccagcataaatgactgagcatgggaacaaaacaaaacacagcattttcatctgattggccagtaagtactaatttaggaaaattgtacacataaccacagatttcagaaacaaaaaggcttggttaaaaagctactctgccaaataaaactatctgtcattgtcacccaggcattcctttgggtgcatttctagaacaatttataaatctgattctagcgctgaaaattgctaagtccctccattaagtgattaaatgatgattctcttggcaagattacacttcggattaagtttcattacaaccttgacaagcctatgaagaaaaaaaatcacaaaatcacaaagttatattttatagtggctttgtcttaaacctctgtaaaataatcatggtatagccatttcaggctgttttcgtatacacagaatgttaattatggctatgtaaatattattcggaaggctatttaaatctggtagatttttaatatcctaaagttatatttgagaaaagcaaaattctatgtcacattagtgctagtaatgacaatagtcatgacatttcctctaacttgtatatatcctccccattttttttacaacagtgcaagactttttaatataggctctgtcaagtaaaattgaaagcttcttatgaaaacggtcaactggaggtgccaagtttttgtttttcttttgaacaagagcgaagtaaaaaaaaaaaaaaaaaaaactgcttttgcaccaattagtcaagatgcattgactgatcgttccttatgaaacatcttataggcaatcctctctgaatttgtctttatttgtcatgtttacattaataatgataatactttatgttcatgtagcaccatttgacttatatagtattttcaaatacgttatctcatttgatctttacagtgatccttactggcaaagtctggccagacattatcattctcattttatagatgaggaaacaaaggcatagagttgcacaggcttcagagctgatgactccaagtctagaacttgaatctgggtcttccaatgccataaggctgactgcctacaaaataatttccactgacagcagctacataaaattatgtttggctattatggattccagtaaatcaatattatataaaggaacaattgaaaacaaaagaaaaatcgccaagtctgttccatgtattatcagtcgctgcatagtaccaatatcattctttgaaatatgatctaaaataatactacctctctgtggtgagctgagaaatacctccctagactttgtaaattttagatagtgaatacactaacagctttctggtttctaagaatatccattaatatcagcctcccccaaaataatgggccgaatgaatactctttttgttatcacatagttcatcatttttaaattctcccagctgctgtttatattagtaggatgtctttcctctcatcctctttcacatttctaataaaaaatactggcatttcctttcccagtggagaagccccacccgaagcccaatcacattgccgggcttctaggctytaatgattaaataagtgattgctctgcctagctttaaaaatgtgtcttatataaggcagtcaagacacaatatccatcactgtaaaggaagccaagcatttatttaaaatgatgaaatatcctcattttcatttttccctgagaggattgtagtgatgttaaaaaattctctgaattctagaactagggcaacacattgatttgaagaaagctataatcttcccttctaatttgaagtatactttctcctcagtgaaataaagtgtggctttcagaatagcaagagccctaggcccacacacacaaagacatcctcatcccaaccactcctctttcaggtcggccccattcttcccaaggcagggatttataaagaccttttcaataaatgtcaaggtatattaaactaaaaaagagaaaggttcaaatcatttcttccagatttgggagggaaatgatttcaactgccaagtcatgatgaatattacctcttgctttacaccactgcctcattgcaaatgagtaagttgggtaagttcaattatggggtctcttagaaaagattcataattaaatttttaaaaggaacaaattagctctttatctatctaaggcagaggagtcagaacacttattcctatgagcgttcagggatttcaacatctatgggtagatttccttaaatagccaaggaggctgacttaaaggctaggagagccagccctctgtgatttggagagataataagttagcaaactggatagcataatggtttatgaaattcttccttcaaggaccattatctagtgctaatagtgttttatgtcttcctctcctgtgcttatttacagcataattataagagtgagaaaaaggggaggagttgggtatcaaaataaccatatgccaaattaatgcagccaactagaatctctggcccttggggcttgtttatcaattagttctgttgcaatttgagtttctgtttttccccacagaatgaagatactttttgatttcactcatatgccatctccaaggaaagtcatttgagatcaaaacatttttcagaaaggatctcttttccccttttcaatatcatgatgtactgcacagccagctcctcactcatttcaagaccatttcatagcacaaatagttaaccctttctctctgtctctctcgtgtgctctctttctttccctgtcttgcctcccttttagctggttaatgttgggtttattttttttcaactgctttatctttcttcaccatgtttttaaagctactatgcaaatctctatgttaaagccacttgtgtgtgccatatgtgatctgtaaatatttaacagaagttattcagagtcaattaataacagaagttattcagagtcaattttaacagaagttattctgagtactagtttgagatagtataagatgtagtagtattttgcagtgagacaggagaattgtttgtattctccaaaaccaagccagtacatcaggaactgctggtttgggaaatgtgcctcaatcccagcttgagtttctcaactaatctgagtttttaaagggatcagagaaaacaagttggcaggagcaaggaattgccttaaactatgatatattcttcacctggtcttaggaaaagaatctcaactggcttttctttttttttttttcatctaaaaataaaacaaattttgcatcccttttcacactcgtgcttcattcttctttgaatgctaattacaaatttttcaacctttgaaagttggtttaccgaaacccaagaaattacttgctcaaatcaggaaaattaaaatgtaaaggagtgaagtcttgcggagcaaagtacagacagttctccactttgatgagctgacttaggattttttgacattaccatgatgccaaaccatcatgatttcaagtaatgtacagcattcartaaattatgtgagttgttcaacacgttattaagaaataggctttgtgttagataattttgtccaaccaggcagcacatttaagttaggcttggctaatctatgatgtttggtaggttaagtgtattaaatgaattttcaacttaggatattttcaatctacaatgtgtttattgggatgtaacccaatcataaatagagaagcatttgtgctttgttactgtagctatagcaaactaatacagtggataacctgtggctctggaggccggaggaatttgcaggagtgggcagaatggccacagctgggaaacacaaagataacagagccaaaaaacagtaggggtagaagtcaaaaaccacaaagatgctctcctaatatagcatgaatcaaaaaaagccaagcaaaggagacaaaaacttagtaaaagattcaaagactgaaccagagatagcaagtcattctgttctcagctcagatgtcacctccttagagagtgactaatttaaggtagcccttctcccccatcccacctttgtttagtctctatccgattatcccccttaccactacctgaaactgtttttgcatttgtttatcttctgcctctgtctcctagaaagtaagagagaggagacatttgcattccctttgcatttccaaatctacttcatttgtagatttgttttcaacatttttcagatgtcttaccagctcactgcctggcacctagtagtattcagtgcatccttcatgaacaaatgaagtagatttagaaatgcaaaggaaataagaaactggagacattccttgagacaccagaggatggaagcaagctgcttggtgaggctcctgcaaccttgcccatggtgaagggaagctcaaatgattgccaagccaattcggtgtaactggcaaccaagacataagaaatcagtgttgacttgtatttgcctatagttaggattctccagagaaacagaaccaataggatatatttagatatagagaaagagatttattatgaggcattgtctcatgagattatgagggctgagaagtcccatgatctgctctctgcaggctgaaggcccaagaagaaaccagtggaatagtttcagtccaaacccaaaaacttgagaatcgggggagccaatgttgtaaatcgcagtctgagcccaaaggctcgagaaccagaagcactggtgtctgagctcaggaggagatgcatgtcacagcttaagcagagagagcaaattagcccttcctctaagttttcgtcctatttaggccttcagtgaattaggtgatgctcatttacattggtgagggcagtcttccttactcagcctaccgattcaaatgctaatctttgccagaaacaccctcacagacacacccagaagtaatgtttcagcagctatctgggcaccccttagcccagtgaagttaacacatgaaattaaccatcacactgcctgaaccatgaagatggacatgaagctggcaccccaaacaatgcacaggtcaccagagacacactacccacccgctcctaggccttacctctggctgtacaaaagaatttcagcaattctgtgggtttcttgaaataaattattcagaataacagacaatctaccatgcagtttctaggagaaatacgtgcttcttaaattgaaaattctgccccactaacttcctgaaagatgaaggtggatagttactgaagagttctgtgaatgaggtaatctgaaatacagtaaggcccctggggaaaaagtctttcgagtgttccagttgaatgtgtctatttagagggatttgtatttaatggatgacaagttaatgtgtcatcagtgtctgtggctgtggtgaagctgctaggaaaatgacaagtgttacacgtgcaactttctattttactgatacactaactggtctgttaaaaaagatttttttttaatcttgtaaaactgaaagaactttccagaggtttctgcttttgtggtattctctcttttttttttcttttcagtgggcttttggctttgagttttccaggaaggagacagatttcttaagcagaaaaacctgtactcacgaagctggatgaacaaaccaaaacactaacagcaatactatttctttagaagaatggatcaatatatgtcctcaggatctaaaaccataaactgatgaactgacataatcccctcactcacaatagatcctgcactttgtatcataataccatctgcctggacagaaccctttccccggaagctcagatgatttggcaatggttgttaatacctgtgatgtatttggagataaaacagatttatttgtgccctctctttatgtttaaggctactgagacacagaaaatccacaccacaagtcagaattactcaaggagtaaccacagacatactgacccattaccaactactttatccaacttacatgaaatgaatctttagagttccgtgcatcatgctactctttcttgtctttagttacattactatttctggcccatgggcatatttttgtactgttttgccacctgagaaatctgtttggttataagcaaaaaggctattttttaataccccttgctatgagttcttattgtccttagccactctttaggttttcagcaagtttcttttcagacttcaaattctctgttttttcaacagaggatttactagattctaacttgcattcagtattgtctaagatgtaatactgtgcctacttttgttctcacgtctgaagacaacaggaaaaaaggtcagtagaaatagtgattctgtgtgcatgcatgtatgtatgtgtgtgtgtgtgtgtgtgtgtgtgtgtgtgtgtgkatgtttcaggtcttcatagaaaagaacctgcaatgtgtttctaaacttctttaacagtttcagcttccccaccctgctctcagcatcttcaagctttaatgtgctctttgcaaatcatccctttttgcactttttgattatcaagaatccctacagaattgatatagcacagtgtgtaggaaactagaatgaactagaaaaaatccaagcaatggaaccacatctaagaaaataaatgcatgaggacaggagtggtggctcacacctgtaatcccagcactttggatggccaaggccagaggatcacttgagcccagccaaggttgagaccagcctggccaacacagtgagaccttgtctctactaaaaatagaaatttttaaaaaattagccaggcatggtggcatgtgcctgtaatctcagctactggggcagctgaggcaggaaaatcacttgagcccaggaggtcaaggctacagtgagctgtgattgtgccactgcactccagcctaggtgacagagtgagaccctgtattaacttgttaataaaaaataaatgcatatatcactgggcgaatagcagcctgagatgctccctgacaccctgggctttcccatccaagatattgcctatgtctcaacaggccttaggaagcttggaagtggctatttatgtagtcactcactagctgtgtgatcttgagcaagctactgaatgtttctgagtttccattctctcatctgtcaaatggagaaaattgtacctctcttataacactgtcaggaatgaaactctaaaatataaacagaatagaatggcatggaatgcaccacacagcacagtgcttcctacaggccttttaaaatgagagctacagtaataatgataagaagtattatatttattacctgtccagaaaagaatgctcattcttctgttaaaaaaaaaaaggtgtttataaacttttttcatgttctcctctgtttctgttatatttctccttttttagctccttctaaacctcccagctacctatgtttatgcagtcccttcccccagaaaatcacgcggaaaagtatcagataaaacaaactctcagctgggcaaggtggctcacagcctgtaatcccagcacttcaggaggccgaggcaggaagatcacctgaggtcaggagttggagaccagcctggccaacatggtgaaaccccatctctactaaaaatacaaaaattagccagacatggtggtgcacgcctgtaatcccagctactcaggaagctgaggcaggagaatcgcttgaacccaggaggtttcagtgagccaagatcgcattgtcgcactccagcctgggtgacagagtgagactccatctcaaaaaacaaaacaaaacaaaaacaaattctcactcttctaagaaatagaactatgcaagaggagaaatccttaatatgaatgagtgaactgctattgaaataaatggggccgggcacagtggctcacgcctgtaatcccagcattctgggaggccgaggcgggcagatcacaagatcaggagatcgagaccctcctggctaacaccgtgaaaccccgtctctactaaaaaatacaaaaaattagccaggcgtggtggcgggtgcctgtagtcccagctacttgggaggctgaggcaggagaatggcgtgaacccgggaggcggagtttgcagtgagccgagattgcaccactgcactccagcctaggcaacagagcgagactccgtctcaaaaacaataaataaataaaaaataaaataaataaataaataaatggaacaggatttggggaagataagatcctccttcacaccctttagatttcacagatgggtaactagctactcagctcaggacggtgtctgagaaccactcaccatctgacccctgctaatctctcaacccaccctcccccatcctcctccccatcatcctatcctcttcttttactcaactagtcctggtacacaccatcctctctctcattttatgcccttgcatatgctgtttcctttgcccagaatgcctgaccctcatccagataacttctagccatccttaaagattcaacttggttcccctttagtgaacttgccatagcatcttccccaggactccctcattgtttgactctggcatgggtggaggagtgagattcacgttacggctagtgtgaatggcaccctctggagtggtactgtggacagtctgcaggacttaaccttgttctcccacattctgcccagcattcttcccctgtgtattccagtagcctcctaatgtaaatttttattccaccattttatccatttacttgaaacctttcctcctagtctagcagtttcttaagggaggagtatggattctgtttctgtttgtccaatacttcacatacaaccggcactcaataaacatttgattaattggttgattgatggatgcatggattaacaaatgaatgaataaattcaagagttgaatgaaggcttaaccatagagatagaggataataacttgtgaaatgaactctgtagacatgaggaaggaacaataaaaaggagatcaaaatgtaaagtggaaaaatcctccattaacagcctgattactggctcccaaatattacctgacaggagcctcttccaggagaggcttttggggaggcccttaacatcttactaataggtggctcacaatggagtaggaaagtatgcaagaggacagagcaatataatgacaaaagtagactaagaatcagatacatagcctaggacaatggcagagaaagtttgctttctagtaccatcttgggactcacttacaaccttttgtaattgaaatggagtccatgtctgtatatcccaagttgagaagctctttttttttgagacggagtctcactttgtcgcccaggctggagtgcagtggcgcaatctcagctcactgcaagctccacctcctggattcaggccattctcctgcctcagcctcccgagtagctgggactacaggcacccgccactacgcctggctaattttttgtatttttagtagagacggggtttcaccgywttagccaggatggtctcgatctcctgacctcgtgatccgccccccttggcctcccaaagtgctgggattacaggcgtgagccaccgcrcccggccgagaagctctttttttctattcctagtttctctcacttccttttgcttactgtttaaagtttcaaaacttgctgcacatcacatccttctttttatcagctttggtgcaccttagaacagaaatttctcccgggaggacaggatacaggagcctrtatttagaaagtacttattatgggttggatgaaggcctaactatgcctagagtcaagctgcttgaagccattctaatattcatttagttagaacggtaaccacactgagttattgctggtctcatatggatcatatattcacagtcagctcttggcttagacaagaagatatatattgtctctgctgttcacatcgtgtatttttatttcattatgactattgtgcttagaagcatgattttcaatctatattcccaattaaattatttctacacagtctgtacatgtaagcacatggttttctttgaagcagactttgttaaaattgatacctattctctactatctctgccttccaggactaccacattctgccctaacgagacaggaagaaacaattttttacatgaatggacttcataaccaggcatataggaactggcgcgaagttttaaaagttctagaaagcagtagaagttctagaaagaatgagagttccagaggaaaattaaatttgaacaccagctgaagtctccatcacatcttcattggatctgtggcccccaaactcaattgtccctctcattatactcatattgggtttataggcaaatgtaactaggtaaaaaaaaattaaaagggccagtataatttcatcaagggaacacatgggtgaatggttgaaaaccataaaaagtgacaccgtttagatcaactccaaaataaatgctgccagctgtctgaaaggtcacttgggtgatgggttccatgcttgagaggtcagcatatcctctgcatgaagtttcatagaaaattagaattagagctaagagttgtggaagccaaagtaaggagaaaaggaggaacagttgggaattacttctaagtctgaaccaagagagacacagcattagcagagattttccagtgtgataaacacatattcaaatagagagttagagaaagcaaggaaatgttgagaatcaattccttcaccagaatcaagcaaacaaaaactcagactcggaaactggaaaagagatatgaggccatgggtgagatttcctatcttgaaagaagactttagtgccagaaagtatgtcactgttaaaaaaaaaaaaaaaaaatacstcatgtgaagagggggaattcttatttaaaaatgactaatgttccgcttacttcaccttcatctagaatttataatctatgtatttcttaattgggtattaatatacatacacagcttctatcaaggagagaggaaaaggggagatggttatgacaggaagtttttggtactgatggaaatgaatgatcatgtgtattttaatccttgagggcaattcttatacccttgttatgtttatttcagtatgtagaacgatgacataaatctaagtgacaactgtactttattgattttgcagagttaagaggaagatttatgagtcatggaaccctccatcagatttggaagaaagtagaatgagcgcagaggtgacagacagccactgaggcccayggacaatctccacctcasgcttctctatcaaacttgaagatttattagtaatatgctgcctttsgaagatgaaaacaaactagtgccaaggaggcgtattcttcaatatttggaatagacgtgttctcaagacaatggcttcaaaggtctcctgtttgtatgttttgacagttgtgtgctgggccagcgctctctggtacttgagtataactcgccctacttcttcttacactggctccaaaccattcagccacctaacagttgccaggaaaaacttcacctttggcaacataagaactcgacctatcaacccacattcttttgaatttcttatcaacgagcccaataaatgtgagaaaaacattccttttcttgttatcctcatcagcaccactcacaaggaatttgatgcccgtcaggcaatcagagagacgtggggggatgagaacaactttaaggggatcaagatagccaccctgttcctcctgggcaagaatgctgatcctgttctcaatcagatggtggagcaagagagccaaatcttccatgatatcatcgtggaggactttattgactcctaccataaccttaccctcaaaacattaatggggatgagatgggtggccactttttgttcaaaagccaagtatgtcatgaaaacagacagcgacatttttgtaaacatggacaatcttatttataaattactgaaaccctccaccaagccacgaagaaggtattttactggctatgtcattaayggaggaccgattcgggatgtccgcagtaagtggtatatgcccagggatttgtacccagacagtaactacccacctttctgttcggggactggctacatcttttcagccgatgtagctgaactcatttacaagacctcactccacacaaggctgcttcaccttgaagacgtatatgtgggactgtgtcttcgaaagctgggcatacatcctttccagaacagtggcttcaatcactggaaaatggcctacagtttgtgtaggtatcgccgagttatcactgtgcatcagatctctccagaagaaatgcacagaatctggaatgacatgtcaagcaagaaacatctcagatgttaggatttttaccaaygtaaatatgtttcttttctttttttaagaaatgggacctaaggtgttggtattttccaggtgtcgggggaaatgaactggtgaaggggttttgtaaagtttttgcttcctgctatmagttcttttcttggattaccaatttatgaatgttagactctggtcatagaaacaataaatgagttagaagggccagatttcattctcagtcccagagcattgctatttatctcaaaaagtgacttccaaacaactcttaggattgacgtaccgtgcatctgagataaaaatttggttctgggaaactgaaactcacagtaatgtgtcatatcatccctgcaaaaattaatacacaaatagaaaccattttcaaaagcaattcagaaaggatgcacagtcaggaagacacactggatgtgattattaatatcgtgtgtgttgttacattatatttttacatatattcccatgtaatgtgtacagtctttgcagttccaccaagaaatgaacttggtacctgcagagtggctgcagttaaatagatgggagtttaaatttgagaatcaaacattctatgtgtttggaagacaactctgcttgctcatccaaggattaaatctggtcagcaggtggaatgtgtataaaatgctacttaacaaagtaaacaaaagattttttttttctttttttttctttcttttttgktttgctctttcagaacaaacattaaatggtgcctccaaggaaactttgccaaatataatctcacctgcttccttccagacagtgtcgctaagtgcatttcacagtttttggatctggcaggcatatgtctctatgtagaaaataagttggttggaggccagagaacaataaatcacattgagaaaatacaaatttaagtatgcattataattaacataagcttagcaatagtataagatgcccccacacacagacatttgcaaagcacatgagaaaatctttaagggtgtcaatattattgaaagacttggccctacttgctaacatctgaaaacaccagagcatgttcagcagcaatgctgttatgaggtattctgggggctctgtgattgaggaaggatggggaaggccaggttcgggtcccgttgatgccaccatacttattgggccatatgagtaggcatcgtaatcttgtgcttcaatgtgttcatttataaaaatggctgtaaaaaacacctacctcacaggtgctgtgagagcaaattgcatttgctaagtattttgagatccttagcttaaaaggtgctacgtaatgcaatgtatcatgtattatgctaaatgctaaaataattgcataattacaatgatggtcatcagtagcagtaatatcatcttaatataaaatctgctgaaataaagatcagctgtgaactatcactgcacctaattctaccaaggcttgacttttccttggctgtaatttagrtgtttgggaaggcttccatttctctgagatttcttctggtttcaatgaataagtgactaggtcagtgtgttgccttgatatcccaaggtgctgaaagtagaggcagctgcctttctttgggaaggaacctctggttggggtatattacagtaaatgaagcatatactttgcaaaatgcatcacgacaacttagatctcaggaaccactgaatctgaattctctctaagaaatttgagcgcaggtaaagctagttcacctctttcagaagcagcagaataggcagtcagcaaacctgcacattgcacatcttctaccatttattagaaaacacctgtttgttctcaaagaaagccccacagctgaaagagtgtaccttttttatttatttacttttttttttttttttttttttttttttgagacggagtctagctctgtggcccaggcgggagtgcagtggcacaatctcggctcactgcaagctccgcctcccgggttcacgccattctcctgcctcagcctcccgagtagctgggactacaggcgcccgccatcacgcccggctaatttttttgtatttttagtagagacggggtttcaccgtgttagccaggatggtctcgatctcctgacctcgtgatccgcccgcctcggcctcccaaagtgctgggattacaagcgtgagccaccgcgcccggccctatttacttattttttaacctgacccctggagccccccgtaggagttgatagcaaacagatagacacaatgaataagtggaagtcatggcttgtttctgcaaaacacgatctctcatcccccaccckaaaggacctgatatgagacaagacttcccatcccttaacacatcttcatcttatggtcagcaggactgctggttttgattagacaatagcaattaggtaacctggggagagatggatcagcacaaggtgaaccaccctccaacctgcagcctcaactgctgtgagttccaatcactgggaaagtctcacgacttcttacttggtttaccttcgagttgtgcagctgaatcaagcctctgtctcatactattgccttgcatctaccccatgctcagtcaaaccacctctggtgtcaagaaattacacattataaacatcatatatgtacacctatgaatcgttttatatgtgtgtgcatacattatgatacagccctgatctttaaaaggagcaaaaatcagagaatcgtatgtcttaaagaactrtttccttacttttttatgctaggtaatgcccatgtgacaaacatgtaaatattcatcaaagaccacatgtatatattttaaaggcattttttcttctccccaactgtatgtatagctagaatctgcttgctgtgtaaccttttcttctgcatggagcttttggtgaagcaaggccatttgtccagtgtttcatagccttaagcatgtttgcccttcgttttttgaatgttcaaaaaatgtttaagtgatcaagaaaaagctctaactttcgacttttgttaattttatgacatgacactggccaaaatattgtttcaattactgttgagccattcttatcatttccctgacataaaatatgcaatgttttagacagtattctaccaagagtctctcagacaatttttacaaaaactctttttttccattatgcactggataataacagtatcagtgtctatgttcttaaagttcctttttttaatttactttttggaaaaacgtttctctttggtggctagtttcggtggcttggtgtcttcttatattggaacaagtgtccatttcaatatrtaatattgtatttttaaataaccagaatcaacaaagcgaagatcacttttaatttggattcaattcagaagaataaaacccctttgcgtgacacgatatggggaaaataaactatttacagaggagccaaggaagaagtttttcratcaaatctcttctatcaaaagacaatggaatatttacctaaagcatctgggattcattttttacctttcctaatatgtgggtttagtgggagaattgattatgtcatttcttctgtaaaggtgaaaatcgtttttataaacaacaaagtaacttgtgaatgaaagaagtaatttactagaacaacgcttgttgatgataattgacatttaggtataacgtcatatatgaatgattgtatttatgtatttatttgtcaaaattgtacatactgtttcgccaaaagtaattgtctgtaaaagtgcactctccaggtttgtagtactatttagggttacatgggttgccaatcaagctgctaatcagaatactatttttttgtatcaatgttataaaactaaaaatgacagacactgaagatatcattacactttcttcaccttcctcttgaaatgtaaactgttgactgaaagcgcaatgcttatgtacaggcccatctgtcatgaggaagattatggttccataaagctgatttttttaaaccattgggacaaataaacagaaggagaacaaatgtgtcacttctcttcttttagaaggaatctctttggtgagacgtggttgttaaaagctgatgccctgccgtttaccattaaccttttccacaatctcaatgtaggtaatagttcatgccattcagagctcatccccaagagcccagtgcgacagtcaacacggagactattccatctagtaagtagaccagtggctactctgggatttaggaaacagggattcacttgccccttggcagcctcaaggaatcattttaaccagcctctgtattaaagtctatgggttaaacatgccaacaaactccaactcaggggggcattctattaataatgtgtttggcaaattaggacatgttaaatctaaggcaaaaatgtcattctcctgtttcatctgcatgtatcctttggaatactgcatgttactttagaagtttaattggatcagaaaagatttattcagacatccttcacagcagccaagtagatgttgattgctgatccctgattgtgtaagcaagagactgagagctatttaagagacaaaagttcattttattatcaatcctgatctagctaaacagatactcacttttttctttgttttcttcaacttattttaagttcaggggtacatgtgcaggatgtgcaggtttattataaaggaaatcgtgtgccatggtagtgtgctgcacagatcatcccatcacctaggtattaagcccagcctccattagctattcttcctgatgcaccctcccctgaacccctccagacaggctgcagtatgtcgttccccgccatgtgcccatgtgttctcctcattcagctcccacttatgagaacacgtggtgtttggttttctgttcctgtgttagtttgctgaggataatggctgccaacttcatttatgtcccggcaaaggacatgatctcattcctttttatggctgcatagtattccagatattcacttcttaatagaaatttaacttttgatttactccccatataccttggagttcaaaaaggtaaagtttatcaggtgagtggaactatgtgaataaacaacaaaatcataaaatatacagatttgtattccacataactttttcaaaggaccaacatcaagagcagtgatctaaaaatatagtctccaggttgggcacgatggctcatgcctgtaatcccaccactatgggagaccgaggtggtgggtcacctgagggctaggcgttcaaaaccagcctggccaacttggtgaaaccccgtctctactaaatgtacaaaacttagccgggcagggtggtacactcctgtaatcccagctacttgggaggctgaggcaggaaaatcgcttgaaccgggagaggggggttgcagtgagccaagattgcaccaccgcactccagcctgggtgacagaccacaactctgtctcaaaaataaataaataaataaacaaataaataaataaaagtatagtctccagaccaagagcactagactcatcagggaacttgctagaaaggcaaattctcaagtccctccagaaacttcaccgtgtggctcagcagtccattttaatgagccctctaggtaactccaatgcccgctggagctgagaacactgacccagagcagagattggcaaactacagtctgtgaactccatctggcctgctgtccataagctaggagtggttcccatgaacagctgcaatgacttaatgacagcagatgctaacatggaactccaactaagcaggacgttagtccaacacgaagaatgccattcctctcattagtagatgtgtatgagcaataaacaaaattgtactcagttattattttattttgaattccatcaatacaaaaacaggaaatttattttttcttttgttatgtaatgtactattttatatatatatatatatacacgtatatatatatatatatatatatatatatgtatatatatatatacgtatatatatatgtatatatatatatatatatacatatatatatatatatttatttttttttttttttgagatggagtctcgctgtgttacccaggctggagtgcagtggcgcgatctcggctcactgcaagctccgcctcccgggttcacgccattctcctgcctcagcctcccgagtagctgggactacacgccccgccaccacgcccggctaattttttgtatttttagtacagacggggtttcactgtgttagccaggatggtcttgatctcctgacctcgtgatccacccgcctcggcctcccaaagtgctgggattacaggcgtgagccgctgcgcccggccagtactatcatatattttcaagtttgcttcttgacctgaaaagcttaaaatatttattgcactttataggaaaagtttgtcaacctctgacctagagaaacaggaaaacatctgaaaaaggtgctatacacaaaacgtttccagttacggatgaaaatcacatcagcattggaactgtcttcccatgcagccaggaaaatgacgatgtagtcatgataatgaattgcattaaaaaccaacagctgcatatatttttgaamtatttccttgttttctctgagtaattttttaaaattataaaagcttgattctaattgtcacaattacccacatcttaattaatatattgcttaaagatgtgtgcatattagacctaaaagggtgggtttcatatagcttgattatcataattgcaagtattctattttctcatttacttaattgattgtcatagatttccagatgaattcacactgctm

SEQ ID NO: 93535 - DNA, 26154 bp, Homo sapiens
tgtaccattcattattagtcaatgcaagaagattgtaacatgtctcgtagcaagggaggagcaaaatctctgttagcaggaagccagcgttatgaattttataagaatatgatcaattttatgtttatgaatgtaatattaatttctcaagtagatgagagttttttaaagaaaatcaatcattaaactggtagaatggatttaactccagatactcatggaagctaagaggagaacagctatagtacaaatttagaacccaccgtatccataaaaaggtagctcactcttcccacctccccaggaacagtaacagacagtgaagccaggctatgttttccttcacaaagaagctacagctgagtggaggagaaaagccatcaatttctagtaatgaatagaagctacaaattgttcaagatacagtcagacagaagatgctaaaagttaactttatttctagggagtagcttgtgatccagggaaaatagggagtggggcaagagctattatgtttggcaggataataagttagaaaaccttcaaaaggcagacttctgagccacacgaagcatttactcaccatgatctatccagagaaaagcaaggtccatcttccctgaattgtgcccctctgtccagtatagtagagacacatggaaatgaaagaaggggtttgactacagggtgcagataaaaaacctggtaaaaaggccttcagtttgttgtctcttagtgaacaaaatagaaatgtataaacaaaggattatttaatataaagccattataaccaaagagaagtagcttaacttcaaattaagcctgggcgctaacttaagtgtagaagtaaatttacaaccactaatccatggaacacagagaattgctgctgccagtggtgggaaaccttggtctgcttagcaagctcaacgtacatgagaaacaaccaaggattccaccaaaatgaatgccaaagtgggggagatgctgaaaatagaggaacacaatgcaatagaaaactccagattttgaagcaatacttgcccccccaaaaaaaagatatattgtcacacatacatgtgcacacacacacacacaaatttttttgtgctgctcttccttgcttaatctctcgtttctgccatcctgtttcccatagatgcgcccactcattccacctctaaaagctcagtcctgccctgtgtgcagacggcctcacgtgcagcctcacaagccctcatgcctcagtgggagccgggcctggtgcctgggcattggatgctgggtcctctcagtcactgctcttttcatcgaggaacgtgatcccagacttatctgggatcacagctcctccctagatatgtaagtaacttccagttctcttagtcctgacgatgcctcgaaaattttagagcttctactctccactaaaaattgatgatttggaaattaagaacccatttctaatccccattctctagtgaattaatgtgactagtactctctttttttaaattccctttgggaaatggagctttttttcagaatctcctcctgactgctaggccccgttaccatgagctgactttcaaaattgaacagatctaagttcctagagagctgggaccatatctggttggttatggctgaatccccagagcatcatgcacagctcatgttcagcaaatatatcattttcaaatgtgtgaaaggatggctactcccttaccctgtattcccaatcactctgctctacccaagggttgagacggtccctgagttatgtcagatcttctgctgcccattgtgtccccaggatttggatagactcaggcatagtccttgggcaaatgtcttttctgtgagcctgggcctcagaacctcctatgcaccactaggaattctgctctatctctcccagaataaatggccttcttggggatggtacccaagctactgaaatttggaagcatttattcattcactcattcattcaacaaacacttacagaatgttagccgttgtgagagcacatgcagcagaagttgctctgtcaacaatgttgaggaaattcacagaggagtgttggggatgacgataaggaaaacaaagctctttcctgacactaagatcctatgcttttaaagaaaaaggtgagaaaaagaaagggtaaataacataatctgatgatcaacatataaccaagcaaccagatactataataaagcaattgctttaataactattattgcaaaaggtattgaaacaatagatgcaaatgtctcctgagaatggtaaaacttctccctgtgatttccctgccagaactgcataatctgaatctaattaccaggaaataatgtgcaagccccagttgacagacattccacaaaataactggccaatgcttctcaaacctgccaaggtcaaaaggcacaataaacactgaggaagtattgcagcttaaagagactacagagacttgacaactaagtgcaaattgtgatcctgggacgagacataaaggacattataggaacagttaataaatttgactatgaactatggattagataacgatattatataaatgatatttgtaattaactgtggttatataagagaatgtccctgttttatgaaataaatgctgaggtatttaagggtaaaagagcatgatatttgcaatttattctcaagttgtttaaaaaaagagagaatgatagagcaattggggtaaaatattaacaactgattaatttggagagtgtatcgaaattccttctactcttgcaccttttgtgtaagcatgaaatgttatctaaataaaaagttataaaaatgtgaaataactgagggagctttgctcacttctgtaagagtgttaagagttaagaaggaactgataagttaaaacgtagataactcaaacccattctgcctaccaaattatggggtcactatcaaacaactttcctgtgactaacaagtacttctggcaataaaacactcctattaaatttagacacagatctgaaggagttcaacaagatccaaacaggaactactaaaggtcattgccaaacctcaaggacggtaacagaagataagtttcctccctgggaaaggccctctagtgagtactgcaacccattctctgaaagaaggtttagaatagtctagaatatctagaatttattccagaaaatagatctggaaaattagcgaaacctcttcttaaacagctgcttaaaaaaaaaaataaagttaactttcactgtgttggacaccctatgagttgttggtctttcatttcattgtcaacagaaccctgcaagactggtgttaccatgtctacttttacatatgaagaaaatgcaactgagaattagtgtaatttgttccaactcacaaaggtaggaagtgatggaagtaaaattccaacacaaggtctgtgctacttcaaaacttatatcccaacccatcaagacagcacaaataggctgcattttgaagaactgggtatcattaaatgataactgaatgcaccccaaactctaaattaactaatattaaattattacatgagaatcttaataagatagcccttaaggcaaaagatgactttttattgactccaaacaatcagaaaacttaacttttcattttaattcaaatatgttcacatatacaccagaacttgagcttttccctaccccagttgttttcactgatggttctctctctctgtctctctctttctctctctctccccaccttctctctctctccctaccttctctctctcccctcccctccccactctctcgctccccttctcttttgctctccccctcactctctctccctctctccctctatctttctccctctctctctctctttctatcccccttcctgctccctgccccattcccttttctgttctccctcttttagactgagtggtataaaatgttacaaagttttctgctgccctccagtggtcttatcctggaagtggcagtcacgataggaaaaatagcaaaacctttatagaagataataataaaatgacacactcttttagagtgttttaagatcgtgggcttcaggagacagaaaagcacctgtgattactaaaaagttattaaacttcacagggcctcaacaaccacatttataaaggaaaggttaaaatatctcttcatggtcgtcccatgggttgagataacatgcaaaaaggtcttgaagtacagtacttgctcaataaaagaaaagtttcaccttatttaagcctgacaactttctataaggttaaggaaactgaggctaagcacaaattacttattttttaaagttacctcagccagcattgtgggtagaactcaaactataattcaaattttcatattctaagtctagttctcttcatgacatctcaatattccaaagtaacagttgctaataaggaaccttaagaattgttaaagtcttaaagggatattttcacacactgctagtggttgccattaaatctgaaaaatatgcattccatggatcagtagtcacatctctagaactgcatcttaaaaattgtgagaaacacacaaaaatttatgtagttgaaaacaagctaaatataagatatttattaaataaactttggtgcaaataataataattggttttatttgttggaaaatttctaggtgccagatgctattctaaggagtatgaatgtatcaacactaaaatgaagttggtactattattatctccattcaacacatgaggaaacagagagacagagaggttaagtagcttgtccaagatcacacatttaggaagaaggagcaccaggaattgaactgagatgtcttattcaagagtccatgttctagtcacttatcaatcttcttctgagactgtccatggatccacccatgctgtcccattgtgtggcagcacctatgtaatggaatatagtgaacctttgtttaaaaaatgtttcaataggtattaaattatatagggacatgcttacattaaaatattaaggggaataaacagtatgcaaaactgcatactatattatttcagttctagaaacctgtgtgtgtgtatgtctaagggtgtataaatcaaaatccagacctaattagtggctgtctccaagtgacgggttatgtgtcatttttttctcctttgtgctttctaaatattctgaatatttgttaatgagacagaactgctgtgatcatcagaaaatttagattaaaaaaattcagggtgccaaaaaattctagaatacttaagaacagcacttagtttaccttaaaagttaaaaattgaatccagaagtaaatatttgcaagaaaaacaattatcaaggattgctaacttttagtttcttaaataatgaatccagaagtataaatacaaaatatttgcaagaaaatataattatatcaagggttgggaggagaagaaggatgtttagactagaaagggtagtacctacctaaaagagagtgcttaatagaactgtgctggattaagtttgcacagtggaccctattttaacttatgtcagctctacataagcagtctcctgacagtcgtcattaggattcactggagactggaactgtgcggacagagggcctgtcttcagaagagaaaatgggggaagagctttgaacccagaggtacaatctctggattggagagtttcaaaggtgccagggaaaagcagtacaaagagccttctttttgacaataactctaaaacacactttgctctgtgaacgcccgtcctgggcagggcctatcagcagggccagatgagcctatagacacccagggtggcgcgttcccagccgccctgcrcatgccaatcttatcagttttgatggaagcctggggctccagataatgctacttggccccaaacgctggacagagcatgctttttcctgtttggctgggaaagggaaggctgaactgctgagtctgacacttaacaggacttcggcattcccctgaatacagactagatcagagattttatttttttaattgaaaagtaacttgggttctctttagaaacccttatttggtgtgcgcatctggctatttcacagagatttcagttttgcaaagaagtcggagttgatttcttccctcagacaagctattggttgttggtgggcaacagaagttgctcagcatagacaggggaaaaaacggttacggatgagactgaaagaaaacctcaaaggagaactctgagaattcatctcaggatgaagctgcaagggcaaaggagaagtacttgtgacacaagcaaatgggtccattgatcaacagatgcaagaagattcttctcccaactactgtacctcctgcaacgatgagaatctggctccttggaggcctgctgccattcctgctgctcctctctggcctgcagagacccacagagggttctgaggtagggggacaattgagggggtgatctctttatgatcagtgctccaacagagcattcacccggccacagcctttaaatggccgaaaacttaggcattcagaatctagtttcattcagacattttaacaaatcatgttagtaaagagtgttgaaaacagttatgaaaaattgtagaatccttcactgttagtacacttgacattatggatgctagtggcataaagttattttcctgatccactgtaaaaattaagtaaaatattgcttccatagtacaaacaatgcaaaataaaccaagtctatttggctttaaactctagcatacagattgacttaagttttaagtgaatattttaataaagatctgtgtaacaaaaaacaacctaatgttaagagatgacagagtacatatttgagatctagtaacatattaacaaagtttcagagttcatcatgacagttgacagaacattgtattattggtttggtttggctcggcttggcttaaatagataccgtagacctattttaatacctgatgtgaagagttattggttaaaatcatttaatcagtcttaaaaatgtgttctagttcacaaacaactagctgacgtctcatcataaataacatagtaaaaataccaaatgggatgttctttaagttccagttccaacatccttaacattgactggatggaatgtgatcctttaacatgtccctcaatgagtactgtttattacgaaaacatcatttctttgccaagaaaggaatgttttagaatttatataatttatatatggctctaaatgatagtctgatgatattttgtggacttctattcaaatctgtcatttcagtttagcatgcactagacgtgaataaacaacattctgttggctacccattagaaaggaatgtccttttccaggaggggagggactttcctaggcacattcctgaccactgtccaacccttgactcactctgctgtccctgagggggacaaatgtacttgactggtaacatgggaaaaaacaactgggtgtgctgagtttggctctgctcttcatcctcctgggagttagcctgatggcaaagggcatcagttctctgtttccccatgacaagaatcttacctgggcaggccccagttcagtactgcctgcaaacgagtcggtcccattctggaatttgctcttaacaagccacttgctatcagacctaacaatgtgactgctgtagcrtgccctttttcagtaagaaaacagatattttggctttcatattttgctatttttattatcaatgttttcagaacccaggtagacaagaaggttgttacttatgagagcccccttagtactattcatagcttaaggataaagttcaasgatttaatttggttttgggcattcataaaagtgatatttttgaaaacaccagtgagagactagaaagaggggggaaagtagaggaaacagaaagtgtaattaaactacaagattttgaattttttcttcaaagtacttactatgcaaacatgctgtgattttagtgatattaaaagagttacttcctctctggggagatgagtttttcaagctttcagtaatttatttatcaaaccaaattcaatctctagcacaggtcattgatgcagtaaggattggaacagtgtaatgattttcagtgtaacttacttcagtaaatattggtttccaggagaagacttacccttatagagtacagcaaatctgcaaccacattcaccatctgatttgaaaaattaaactcaagatttttctttttttacaggttgcaattaaaatcgacttcgacttcgcaccaggttcttttgatgatcagtaccaaggctgtagcaaacaggttatggagaaactaactcaaggggattatttcacaaaagacatagaagcccagaagaattattttaggatgtggcaaaaagcccacttagcctggcttaaccaagkaaaagttctaccccagaacatgactaycacacacgctgtggctattttgttttayacattgaacagcaatgttcattctgactttactagagccatggcctctgttgccaggactccayagcagtatgaacgttcattccacttcaaatatttacactactacctcacctcagcaatccagctgctgaggaaagacagcatcatggagaatggcactctgtgctatgaggtgcattataggacraaggatgtccactttaatgcctacacaggggccaccattckatttggccaattcctytccacatccctcctgaaagaagaggcacaggagtttgggaaccagacactatttaccatattcacctgcctgggtgcacctgtacagtacttctccctcaagaaggaagtcttgatccctccctatgagctgtttaaagttataaatatgagctaccacccaagaggaractggttgcagttgaggtcaactgggaacctgagcacatataactgtcagctgctaaaaggtattctttatctaaattgaggccactcaggatcacagaccactgctcttttataaaagttattttttctcagtgggtttttggggaaagatcaaaaacatgaaaactagccttcggtaatgatggaactgatagattagagaaaatccactttatttattgacttctcttttcttcctactccattacctccaggacaataagttctgcagtgaaattattatgtaaaawattgcagacagacagagtaaagcttgactggaaggtggagcataaagatagcacttttaccttctccctcaaactcaytgcttttctcattgtcattacatggataaggagttctaaaagtaaagcaagaggcaagatatttattcattaattttctgttcattaatcatcttctattgtgatgggggcccyggaaatacagaatgaataaagcaaaattataacctaggaggatttttagtctaacgagaaatggaaatatgaacaaatgtatacactcaaaagtactaagtgatataccaaatatttaagcaaacagctgtggctgctcagtgcagggagctactcattctctccaggaaaagtgaggaaggcttcataatagccatatggaacttgtcgtgagaatgggggttttcaatgaaagaaaagtcattttaagcaaagaataccttgctgtggtttgaatgtgtcttccaataagttcctgtgttggaagcttaatctccaatgcaacagtggtatgaaatgggctctaataagagttgattggacctttcctaataagagatgattggataaatggattaatgttgttgtcatgtgagcaggttagttattgtgagagtgtgtcattgtaaagagaatctgatcactggagcctctctctgtcttgtgtaccaacttctcttccaccatgctatggtatagcataaaggccctcaccagatgctggagccatgctcttggacttcccatcctccagaattgtgagaaataaatttattttctttacagattacgcagtctgtgatactctgttattgcaacagaaaacagactaagacacagcatatgttaatcacaaggatttcaaacagcctggtgtcttcagggactctgaaattctggrtggctggtrtgtaggatgtgtaggatatgggaaaagaataggagtaggaagggaggaggggatttatccaggtaggagaattctgatggggcttcattataaaaggtcttgtatttcatgctaaggaccttttaattttatgctgtaggtaataagaagtaattagaagtttttaaggagtagaaatcaatttggtcaacatcttagaaagggctctgatgacactgtgaaaaatgaactgaagcaggaaaatttagagatatcaaaatacaaaaaaaagttaaacwttttttaagaaaaacatggctgattgaattttatgttgccacctagccatttcatggaggggtagttgtgtagcaaatcctgtgccctttttgattcagaaaaaaaaaaaaaaaagactgttcatatgtaaatttattcacactcacagtcagctggaacccagttgcagggtctaccttcaatatatccccaaatttgtcttcgctttatcattattgctatgatttataattcaggctctcagcatttctcaacatttcagggcagtagtgttgcaaaagtgttcaaactggcatccacactgaggtctagaatctgctcactctgtcctagccataaatacagaccagggagaggagacctatcaatactttcatctcctcacatgtcaccttggaaacatggcagcaaaacgagtgaaatgagtatctgccccacagacacaggagattagtgtttgtagaggatgaaaaactatagtagaatatgaagaaaacagtgagattttgataataaatgaaaacattcatagccaggttccaggattctttggaactacacctgactaggatatgattacttcattctcatcatgaatttggaacatataattcttcactaggatagtaagcacagtaaaatatattcaatgaaaaattacagaagatttatattaagcattgagtgggaaactgagggaaaggagtatataatataaaccattactcacattctgccactctataaacctcaaagaaaaatatttcaggacacccccacccaaattaatgatctttgctttcctatggcgaaactacccaaatgcaactttaacttagttttgagttaaggtttagctggggtagccacatagatcactaaattctgacagttcggttggtcttaatgaaatatttggaatcaccaatcacacttaagggaatcaataatcttgtgtcgctctataagctccctgggggcaggaactcgactagtatttgaggaactagtatttgagaactaggcaggcaggcagtttgagcccagacccactctgtttgaatttatatcccactgtaccacttaatagctatgtgttcttggtcaagttgcttaaactcttttttcatctacctaataatyatcgtaacagaacctcagaagacttttgtgaaaatgaaataaaatgtaaaattattggccaagtgcggtggctcacacccgtaatcccagcattttgggaggccgaggygggtggatcaattgaggccaggagtttgagaccagcctggccaacatggtgaaacctcgtctctacaaaaagatacaaaaagtagccrggtatcayggcacatacatgyagtcccagctactgaggaggctgaggtaggagaatcgcttgaatccaggaggcggaggtttcagtaagctgaaatcatgccactgcactccagcctgggcgatagagtgagactccatcttaaaagaaaaataaataaataaaattatttatatattctatagcatataataatggtaaattagtgttagctattactaacttcagtcctctggcacatagaagtgcccagcctattttgttgaatgagtgaatgaatgatggtgaatatacctctaagcaatctgagccttagactacatgaccatctaacacaattaattaaaaacagttccaatatttgaagaagggaagatattctagaagcttcaacccctagtcaaaagtaagctgttgtcacaatgtaaatgatcaacatggtcacttgcaatgtgagttaccgtaactaaatttttcccagaaatttatcaattagaagcttgtgtggccatgcagaaaagcttgtaaacggcagaataaaaataccactggtcatgatgtgaatcatcccgttgtttgggggatccacagtctacactgtgagtcacttagtagccctctcagtgatcagatctgctgtctcggtattgcagtgtttgttttcaagtgaccctcattttatttcataatggccccaaagtgcaagaatagtgatcttggtgattcagatatgcccaagagaaagtgcctcctttgaatgaaaagtttaaagttctcaacttaatattttctttataaattgaagtgaagagggaagagataggtcagaggcatcatataatcagccaagagctggaattggagcattttctcaccctccacagctacgaaactatctgggaaggtaaaagaaggagaggaataagctcacattgcagggatgcctttcttcctttgatcccagactctgactaagggttgcagagaaggctggtccatcctctggttctacctgacctacctaagcctcatctgccattggctagttagcatcacagtcatttagttgagggcaaaaaattgcagtaatgcccccttacctatggttttgctttctctggtttcagttacccgcagaatatattaaatggacaattccagagataaagaattcctaagttttaaatggtatgccattctgagtggtgtgatgaaatcttgtgccttccctcttgggatgtgaatcatccacagtctacactgtgagtcacttagtagccctctcggttatcagatctgctgtctcggtaytgcagtgtttgttttcaagtgaccctcattttatttcataatggccccaaagtgaaagaatagtgatcttggagattcagatatgcccaagagaaagcgcctcctttgaatgaaaagtttaaagttctcaacttaatagaaagaaagaaaaaattgtatgctgaggttgctaagatctactgtaaaaatgaatcttctacctgtggaattgtgaagaaggaaaaagaaattcatgctagttttgctgccacacttcaaactttatcattgatgatatatatatatatgtatatacatacatacacatatgaaaataacatagggttcactactacctgtagtttcaggaatccactgaatgtcttggaatgtatccactaaggataaagggacactaytgaawacagtcttggacaggacacaatatctatctyttatgatttaaaaaatgtttgattgccagccaggtgcagtggctcacacctataatctcagcactttgggaggtcgaggcaggtggatcacaaggtcaggagatcgagaccagcctgaccaacatggtgaaagccgtctctactaaaaatacaaaaattagccaggagtggtggcacgagcctgtaatcccagctactcaggaggctgaggcagtagaatcacttgaacccaggaggcaraggtggcagtgagccaagatcgcgccactgcactccagcctgggcaacagaatgagactccgtcaaaaaaaaaaaaaaagtttgattgccttcagaatgttttcagttattcgctacagtgttgtttgtttgtttctttgtttctttgtttttctctcaatcagtaagygaaggaacatcagaaaggtccttaaagtgatttattttaactgataagtagtacttaccccaacattctggagcagtattggactgagccatacatgaacaataagaggaaggaggtagtgtgtctttcttatctgggatccttaacagggaggaagtaagatcagtggactctccccagacccaactttctagatagctaccatttcccacttcactgctccactaaccccagcctagggaattcacagatggtgttctggaacactgatatctaactcctcacgaaactgtaatcttctctggacactatttctcattctttcagcttcgttttgtttcatgagcaggagccacaagctattctgtgtccccagaagtccctataagccaagtgaattatgttttctctcctgttccctctcaatctgacagacgtgatactggaaagaccacttgaagacctttaaaattacccagcagcatactgtaattctcccaaagaagagacagtatatttaagagcatagcttctccagtccttcaatttatgctaaaatcagtcctgttagcatgtaactcaagtttaaagagtttccaggaatctgttgcttttagagagacaagagatcaaattaatagaattatactatttaaggaagtaaatttgcaaaaggaaaaattgtcattctaaactaacagctttcctctctaattattccatcacccctcacatgacctgtactggttgccatagaaacaggtgtcttcatgcccattggaagactcaaaatatgttaacagaatgttagttatttgcccttaaatcttgcttctttcagcaaaataacctatgccaaaaatctgtagacacacaaatacatgctctgttctatatcattggattcacaaagaacagggatttatttgttaaaatgtttcacataatcaaaattcttaacatgtttctagagaaatataggcaattgtttgtagtcagcctggttttacatgtaaacttcactttttaaaaacctgtacgattctrgtggggagaaaatgaatgaatgcatgtaaaatctcttagaatagtatctgacaaatgttaagtactcaaaacttttaagatactattatcattattattatttattttattagctttctattttgcctgttttcttttactctgggcttcaattatctaaaattagtttaccctayttgtggcatcacaatgaccttgaagtagagtgtctgtctcagataaatggatgaaagaatgagtcattgaataaatctgggagaccacacggcatggtggaaagtgaataaactttggagccagaaagatttgggyatatgttagtagctaggtgaccttgtgcaaatgacttaacctctgagcctgtttcttcatttataaaatggaagtgatactcatcttgtgggaatgttgtgatagcattggtgtctctgcctcctttcaaacacaactgagaaactctgggaaagtactttgcacatggaagtgggataatggtttaatggcacaagcatgtgcttcagtgaaattgatagtaagaagagaaacaaaggaagaggcagaaggaataacgcttttcattttcgggtgctaagtttttgctaggtaatattctacaatattaacactcttgctccttgcattttgacagaaasaggctatagatagcatttgcctcaaacactagacttggtatactgcacgtcagctttacctttttctgtttaaggactatttacttctgaacagtctgataaaattcagattcagacttcatgaaataaaagttataatcattatgtatttcttccagactttataccctaaggcagagatgaccaaaatcaggttataatacactgataaaatgatatttgtttggcagtttagtttacaaaacgcttggacacccattatctgtttagttttcacaatcaccctgtaagtcaggttattgactccgctgtactgatgtgaatgctgagattcagagagcttaagggatttgcgtaaaattattcatagtttacaaatgacaaaaataggatccttccccatgttttctaataagaattccaggacaatattctccatagactggtttcaggggattcatccattcttcaacaaatatagctgagaaactaccgttagttttaagcttcttgactatgactgtttacattataaatcagttcacacacacataaatatgcaaatacacacatattcataaaatacaacagttacccttttcataggcagtgttaatgctagtgtttctattctaacttattttattacattattaaacaatgatggctatgacctcctaagctgatgtcacaacccatcaatkgatcacattctccaattttaaaaatcctgtaaaaaggtaaagagaaaattaaaaactttgaagagatagttgaatagaaaactaaagacaactacaaaagtaaaaaaaatgtgaggtatcctcaaataaaactttagtttgtaattaatgcacagctgtctttcatttattttcctaaatatatggtccatgtaacaacaataataataataatgccaggtagaaatgataatggccataaaagaggtagagaaaaagtatcaacagagttagttactttaacctgacataataaaatcaaaaggaagctatttttaacatcctaattattataaagaggacttatgaatttttttgaagaatgactatgattgcaagacagtagtgtctatgtgtttgtctcttatttgggtatcatcataatagcagctattattcattcattcaacaaatcagtatttattggtcacttgttatttgctaggcactatcctaggtgcagggaaggaaataggtgaaaatccctgcccttggggatttacattctattgatgtgaggcagaaataaacaaaataaataagtaaattatgtcgtagttagtaggtggtacatactaagatgaaaaataaagcagagtaaggagacagtgaacactatgggaaggagtggcaatattaaactgggtgatcaggggaaacttcactgagagggtgacatttgagccaaggttgaaaggagatgagagagccagtcccatgtatatctgaggaaagagcattccaggaagaaagcacagcaagtgcaaatgtctcaagtaagaagcaacagcaaggatgccagtgtaygggaatgagagaaaaataatagaaagcgaagacagaagatgatgtagattcgatcacataggaccttgaaggcagttgtaaggactttggcttttcctcttagataggataccactgagaggttttgggcagaaaacatagaagattgtgtcaaaactgacctagcagcccagtagaggataaactgtaatgaggtaagcagagaaaccaagtagggggctatttcaatcattcagttgagagatgaaggtggtagagtggaggcagtaaggtttgaccagattcagagccaaaaggaggtcctgacacactggaagtgaaaagtgagggaaaaagaagagtgaagaatgactccaaggtttggctagagtaamtgaaaggatggaggtggcactcactgagatggagaagcctggggatggagtagatttaagagcaggagtttggtatttgacatgttatatctgagctgtgcaatagtaacccaagcagagatgttgagtggacagttgatgcacaagtgtagaattccgagtgacccaggatggaaagataaatttgaggtcagtgggttatgggtggtatttaaagccaagagactggatgagctccccacaaaggtgtataaataaaggagagaaaatgtccaaggatcaaacctcaggacactcccattttaaaaggtcaagtacaaagaagatggagaggccaggtgtgatggctcacacctataatcccagcactctgggaggccgaggtaggtggactgcttgagctcaggagttcgagaccagcctgggcaatgtggtaaaaccccgtctctaccaaaaatacaaaaaaaaaatagccaggcatggtggtgtgcacctgtagacccagctacttgggaggctgaggtggaagaatcacttgagctgatgttgcagtgagcagagatcacactgctgtactctagcctgggtgacagagcaagacccatctcaaaaaaaaaaaaaaaaatggagaaggaatggccagtgagggaggagaaaattgatagagttggtgtcctaagagcaaaatgaagagtaagtatcaaggaggatggagtgattcactaccataaatatggttgataggtcaaatacagtgaggactgagaattgacattacattccaggaagctcaacatataatctcttaaatcagactctctaggttaaatactggctctgtcacttactgtgtggcctaacagagacccttaagctctctaaatactgggaaagggtgggactggaaatccttgtgatctttagcctcagtgaagaggaaaaaaaaacaaaaatcgtttgagaaccattctaatgattgacctgctaaagtggtattaaggcttcctaagtctctgtagggattcatataatttgattttaacacaaactttgacaaaagtttagaaagacatatgctcttaattttccttgccaactcttattggtgaaaattgaggtcttgaaaattactgtatctactccagcttggtgacagagtgagaactccaactcaaaaaaataagacagaaattactgtatatatatatatatatatatatatatatatatatatatatatatatacatacatacagtacacacatacacacacagagtaatttctgtcttttctgtcttggaatttctacttgtatacacacacacacacacacacacacacacacacacacacacaytcctatatagaaattccaaaaaactaaaaaatgtatatattgtgtgaaaatagtagaaatgtatttctccctcatctggttatcctatcaaacaatatgagcaaatattgaggcaattagagttgaatctcttcctcccagaaacatcttttctaccttaaacaatagtgaaaactggctgcaaagagattccagtctttatttagactattttttacagggtttccatctcccatctcatttcagtccccaccccattatatggccaattattagttatatctgacaatatttttttttattttccagttttgcttccacacctaactggctgctaacctgtcccacatttcctgtgaaaggtgtatatgtgtagttagaacacacacacacacacacacacacacacacacacamtccaaacaggattgtgtgaatatttcttgctcaccttgtaatgaaaaattctatggatggacatgtaatacacagacaaacaggttagtggttaagaatgcagaattgagacaaactggccaagtttgaatggtgcctatactatttacaagatgtgtgacactggcaagttttttctcatctctgtgtcacaatctcatcaagtaaaaaccaaggatattgagaataaaaatctcataggtttgttgtgaggcttaagttaatatatagcaagggctcgaaatagatcctagcacaaaatcagcattcagtctgtgttaactttcataatggtgatgaagatgatgataattragatggggataatgctaacagtgattatgctgctggtgatgataaagatggaaaattagatctctaccaccagctggctgggttacctgggagtacatcttttaacctcttggtgtctgtttcatcatctgcaaaataagcaagttatgttagaaaaatctaaaataatgtgttttaagtagctaacttcaaatgtttttattaggaattttctaagttaagtaagtggatcaatggatagatgaggtagttttaaaaaaaactctgctacctaaaatatttcctttgttttgttttttacagcttccagcaagaaatgcatccctgatcctatagctattgcatctstctcctttttgaccagtgtcatcatcttttccaaaagcagagtataaagaaatcttgtggctccttttatttaaaaaaaatatttaaataaaatcttttttattggccttttggctagaaatggacatttattttccaggaaggatgatcccatcatacttctgctgaaaccagtgcatggcctcctctttgctaattctcttatgcctttccttgtacccctttgccttatttcaatctgggcaccctaagtactcttggggaaatcactctgcccagctagcaactgatgcagagctggctcagcccactgactgtgattggcctgtaactcaggccttagccaatcagtatatttcttcttcatggacacaaagattcatgctggaatagaaaatgatccaatcagagcctgtgagatacaatcagggtacttttgtggaattgcaattggaaatagaatgggagcttcttttctgaatggatattaatgaaagcagggtaggagcttatagctgccagcaaagatcccgccaccaggagaggagaccccatctccttgagaaaggatctaacacaacaaaggaagagctgataagtgaaaagaaactgagacctgatgagaatgtataagcctctggatccaactttgcctaaagctgaatactacaagatttttcattacataaatcaataatttatgtttttgcttgcataatttgaattagattttctatgtcaagcatcaagcagttgaagttccaacgaatacaagcactcttccttatttttttttaatttagttattctaaataggaacaaatcaaagaagattaaattagaaagcaaaggacaaattcttcaccaaacagaaaagctttgaaccccagagattaaccaaggtgtgaattttcttcagagattttttatgagcattcaagattaagctagtatggcctcagatgagaagacacatggaaacttgagaaataaaagggaaagttaatgaaagatgttagtgaaatttcattcaccagcagtaatgggtgttcatgcatgttcctaagacattacaaaagttaaaatttaaactcatatgttaattcatagagaacttgatggcaaatttaagtcttcatagcaaatttaaatattaggaaaacatgagggtatgtgtgaaggttaacagagagtatgagagaaaaaaacactgattacaaacaaatatcagcaatatagcgaggtctcattacatgtaaactagtacatgcaaagaagtataaattgttgaattgtatagctggaaatgtcctctaacgcttccctcaggtagtaatttaggtagcgacataagggattatttaacccgatcacgatcactgaagaccctggtatcaggctaaatggagtaaagatgagggctagctctataattttggattttgaaagtccatgctccttatcccttttaagatttggataagaaacagcaaaactgaaaatcggtccatctatttactctccataggacttcctgaatggcctgtgtcatgatcaaagaaatggaatggggaataagctacataaaattacctggcagggagttcaggcatctctgtactatcattctttaaattgggatttgaaactaacagggccaaatcacctctgtcacctagttgcagtagcctctacagtcaataaaggaaagaatttctgccaggcatggtggctcacccctgtaatcccagcactttgggaggccgaggaggacggatcacgaggtcaggagttcaagaccagcctggccagcatggtgaaaccccgtctctactacaaatacaaaaattagccaggcatggtggcacgcacctgtaatcccagctacttgggaggctgaggcaggaaaattgcctaaacccaggaggcggaggtagtgcagtgagccaagttcacaccactgcactccagcctgggcaacagagtgagactcgatctcaaaaaaagaaaaaaagaaagaatttctacaaacagacaatttatgtgacttgcataggatagggtctttggcagtttggtggctacctagtagagagtcctggggacatggctctgggagcaagcttttccagtgagcatcgatgagtcagtaatgacatgctatgttggtaaaagccacccaacatcttaagtacatttttcctgtgccatataaatgcatgtattgagccatactgtgtacaaagcactttggggattaaaagttaagaacactaggccagatctctcatgagtttacaatctcttaggagaaattaagaacataaagcaagccacaagtgaaatgccaaaaaaaaaaaaggcaaaaatcaagttttctgttcataacaattcaaaagaaagatttcttccaactgaggcaagaagagacacccggaaggctttaagtaagaggctgcatttgaaccagccgttagggctctaggctgggagaaggggtgagcagaaggagaaaaaaacaagaaagagtatgtgccaagtgcgtagtgcccaaaacaaggccaaatattaaatgcttggagctgagagaaaaatgtgattcctctggcctatggttagataaagctttctatcagagatgatgttttacttagaggaaagcagaaaatagaagcgaatacggaatgatcgatgtatgtacagcataaggtcagggagcagataggtctggcagagagtgaggggtaatgtgggctggagaggaaattggaagccactcagtgaagctaaaaagtcagccaaaagcatttgatttccatgagaagtcataattttctgagtaagacaattctcctaaagcgttgactctctaggcacaagcagcaatagcatcctttaagaactcattagaaatgtgaattttagggcctgatcccagactacagactacagaaattgaacagtctgttttaataagtcctctagatgattctgctatacaccaacatttgagaacactgtgacttacacaattatgatccttaagggaatagccaagtttctaaaaaagataacttagttctaactcctgctgctgttttacagatcaaatctctggagacagaaactattctcttaaaattatgtagattcatgagtttggttaaggataaatgtacatagctcacatcccctcagtctctccctatagtccaaagttgttgagcaaggaatctgtagagtattgatttaaattgattaagttacatgtttatgaaactctaagagactagttttagaaatttcactgtaatttctgctgggataaatttgttagcctgggatatcttccaaagataaggcggatgctcaaatatgtgtaaattcatgcaactgttaacagagactgtgctgtaaggagtacttatgtcctatagtaattttattaaacaaatacatgtatgtctccttttgatgtgtacagaaatatactgtttaatctgaagaagctgattgaaacaggaaaaatttaaaaagtaaaaacactcaacccatgtaatactttatttttataacaaggtgttctctttaatacgcctattagattatcctgaagttctctatttactcttactttaaaaaaaatccaatgaaagaaaatttcagtaaagtttgttttgctagaagaatcaggattcttgtactgagttgtctaataatatgaatcaaattgatttacactgaatgaactagctcttgatttggtaaaattcaacaagcatttattaggtgctttcagaaataccaagatgcagcaaacactggcaactaataaaaaaaattacaagtataatagtatttcattttttttaatagtaaatgatcatgtgttgtgttgtgtggcagttcactttttcctccctactgatgattcattcaaacagctaggccatcccatgctcacagcctagaggaggaatgagaccaggcatagtatagaaacacaccccactttgttcttcaaaaactgaaggatattagagaaaatgagaggaacccaaaaccaaagtatttgagagaaacattaaatgtgagtaataggtttgagaaaaaaatacagcttttcctcagtatttccagaagccaggaggcagcagcagacatgatgtcattagagtggtcagactggtggtacccagtggtgggaaaatgtgaaacactgtaagtgatcaccagcctaacaacagccaccagcactggaagaccactcatctttattgaagtgggcacttcccatctctaacaccctggttgtcattcccattggcatctggcaaggacttcctgtgaactgccaccagctattcttccagtcacctcacagaaagactatgcaccaagacttttcttggtccttgtctcattcatttccatatgaatccccctagctgttgcatccaacattctgaaacataatcctaaaactaaaaggagattgaaaccctagacacatataggtccagaaaaagtagcaaagtgagagtcctgtctcccttctcctctctctcaccctctgtgtgtgtgtgtgtgtgtgtgtgtgtgtatgtgtatggtagcaaatgaatcaatttaacatcctcttcaaaataatagagttcttaatagaaacctattacaaataagcaaggtttcagctttgctgtggagagaaaatgagagttaatgtattgaaactcatcgttttttccagaacctccaagctctggtaatggtcaaaatccacttgaccctccctaccaaacattttgaaattatatgaggatggagaagggactccttattttaaatgacaatgggaattacaatgatggctttggcttggagttattattgcttttcctattctcaacagagttctatcaggtatcatgtgaaatagttaacttcaacaccaatcttaggagtacatactcatttacaatgcatgagaaccaaagacttatggtagacaaagagactgccctatctcatttctttaaataaagcacatctcagatatcctacttctgcaagtgttttccttgtgaaagtcttttctttgtgaaaggctagagtacttccatttttccacctctagtattttctaatcataagacctcaggagacaagtgagaatgaactatctgttctggtcttactcacataagcaagaaaagtctattattgctcattcactgttctcacttacttatgaatcatatttaaaatatttagtgatggcttctgatcgtcaaggtactgaagtatatagaaattggtatatgagtgacaaaaatggagtttattttgtttcccaggcctagattttctatctaatgataatatttacagtttacctggatttctcactggaaatagaatagttaagagtgggaactactttagggttgttttaattatgctttaagatgaaacacaatatttagaaacatcctcaaatgtaataccactttgtttttttcaacaatatattcttcttagtgactgacatttcaaacaggctttcttaattatttctttttattttaataaagcaaaactacaggtaaatgttttgccagatgacttttgtgtacttatgttctaacatagcacatgtttggcaccaaaagatcttagaaactactatgaaaaaccataagattttaagtagttttctgacagaaatgaacatttctgttgcatccctacttgtcactggctttcttaaacacagaaatattcatttccatagtctttatcgctttttggaggatctctaagattggtcccatagccttgacaatttgttccaacaaatctgctgctgactttgtgggatttttggaatcctcagtttttagtacatcctgcagttttttcaaggtgtctatcagtggttttggaagaacctggaggacttctggttctctcagatgtggtgacatctgattgctctttggtgtcttctgtatagaagtcacttaattgaagattcatgatggggaatttcatcaagtgtgaaagagaagattccagactcccaaggatgttactgctgtttagca

SEQ ID NO: 93536 - DNA, 12779 bp, Homo sapiens
caaactccccatgagaaggggtattattagtatgatgcctggttttcaaataatgaaatagacccatattacttaagttaagtaatttgccaaggatcacacagttaatcagtggatgcaaacttggtaagtctagatcctggagtctctgatcttaactactgggctggtgagtccaatgtctgaaaatgcttggagacgtcagtctagcttcagaatttgcactctcagcctcagaacatagcatggagtgagcactcagtgaatggctgtgctcagtctaggctgcatgttaactattgttattgtttctgtgaggaccccagaggctgacctgcattcaaaagtggctgtgctccaggaattcaaggttgcagtgagccatcatcgcaccactgcattccagtctgggcaacagagtgagaccctaactctttcaaaagagaaactgggctgttcttagcaaagcaccaggaccaggagagtgcagtggggacagggcgagtgagttggagagtgtctcataaacatttggggctgtgagagcagatgtgtgatcttgcggaatgattctcgcttcaggactgtgtgttgacgctgatgtcacggctgctctgagcgcccaagatactgttaacgagctgtgccaagcccagatgcagtgttttctcaccatatggttcacgctgaagtgcatggtctttcagacagggatgggaggaaagtcagaaacgctgaaccccatgcatggaacacctacttagatgagccatgtcctgcatgtcccagttctcctgacttccagagaccatgtattcattggaatgtcgtttgtttttcatccagtaaccacaaatagtaatggggcagctagtacatgtcagacactgtgtttggcrctggggatacaaaggtgattaaaactttgcctacagccccaaggaactgagactagccatgaaagacatgggaacaaatcatattatgacattattctaagccctgtaacgcaggtagttaacaaggactctgggaattagaagaagttcatgaacatctttgtaatgaaataaaacacaattttttttgcacacctagcatctgaacacctttcagttttgagagaactcccagcataggcagaggacagtcgtgtcttcttctaacaaaggtaaagagggcagacattcttctccctactccctggcaggtggaacttgaacacaggacatagatgtccacttcttatctggatctcccttggatttcagcctcctgtgtcaacatgattactcaatccctccacctgggtatgtaggacatatctcatattacaagtctgaaattgacttggtatcttcccctaaaacctgccctgttcccagtagtgtccacatcagtaaatcatgctaccatgtagccactggcacaggccaacaatgttggtgtcacctgtgatgcttctctttctcttgcacatacatcccacccatcattaaggacttctggccttattttaaaatctactcctattctgagcacttctttctgtgttgccctctccacctacacccaggccccccaccatttctctctttctctcctaaaattgtctcttagcaggttactttccttctatctctgccacactcctatcttttctcagcaaagttaccagaaaaataaaattaagtgtaaattttatcacattcttctgtgagatattcttcagtggcttctcatcacatgaggaaaacaattccagtaccttttccatggcccataaggccctccatagtctattccctgtctgtcttcctggccctattttctgactctcttacctttgctcactgccctccagcgttactggtcttccttctgtttctcaagcacaccaaaatgtgagaacatgagtatattgaagtgtcagatgcagttaaaatgaacttacttaaaacctagaagagagaagagaaattgagagaaaaagtgcctgaaaggttggaagagaataagatccaaagcccaggttagcagggggttttgtcctatccacaggagggatgcctcctctaatcttacaggaagagggagaccagcatggtttggaagtagttactggatcggagccccaggtgagagatgaaagtggggaaaaggaagattaaggcatcaaaacctttcacaacaaaaacctagcattaggactggcctacacttaggagtggagattaatggcttgtcattcacccatctattcactcaacagataggcactgagaacctgttatttgccaggacctgtcaccgatcctggtgttgaattactcttgctcagccactcaacttagaaacaaaatacatacttagtgagaccttggaacaaatctttagcttctggtcctgtttccttctctgtaaaactggagtaataatgatgcctgctctgttgatttaaatacttcattatatgatgctataaagagctctttatgtatcagctgtgggagctagactggtagcttagtggaggaagggactgcatccgttttgtttactgttacattacccatagtgatcatttatggaatgaatgaaagaatgaatgaatgactataactgattcagaatcagtttgaggaaagggagctttgtcctttatagatttcaagcaactactggatatcttctcactgacaaaataactggataactcatgccacattggttgaatcatggctcaatgagatagtctccccatgtgtgccccaaatgcaaaaactctcctaaagtatatacttttcacattcatgggtagcatgaaggtcaaagctatttagtctcctctgctcccctctactgtctccaaagccttctgcaatgccttctcttatttccttttgcaacaagcagtaagttaggcacacatctactctgctaaatctaccagcttatatgttgggtaccattttgtcccagatacttcagataaaagactcaagatccacaaagatcttgacagatcgtcaatcagctgaagtaaaggagatgaatttgaatggggctcagtgcaaagagaagcattgaggtctaagaaggcaaaggtgaagaatggatgaaaagaaaagttgagcagctgctcctacactaaagaaaaatgcaacaaaataatgtgtttagttttgtgtgtcaaaagtacatcagrggaactaaaatctggaaaaggccgtataaaaatagctattttcaggtgatgtgtttttgcatcaagatttatctaatatttttataatatgatatgagttgcataatgaaacaagggaatatatctctccacttgaaataaaaataagatggtcagtatatttcctatactcaggctgagctaatggtagctcccttgttggacaccagcctccagatccggaagtgcaattgatgatattggcatgaattagagtatacttttttctagatcagttccttagataccatgtttttctgccttttccatttggtcaaatgaagtattttttttttccttgcccttctgtaagaattactgtaagaataatcctgattttggccagctggcttaagttaaaaaaattctgacattgaaccggcatgatcccaagtgatttacctgcattatgacatttaatcttcattaaaatcctatgaggcatggccttttattaaccctattttctttgatgaaacattaagggtcaaaatgggttaagtaacttcatcaaggtagcatgggtaatcagaactcttaattcaggcaaatctgattcccaggggctgcattccttagccctgttcctccaaattagacaaattgatctgttgagaaccaaacagacacacacaaaggcattcaaactactttggagaatatgtcactccaagatgagcatggttgtttatggccagggctattgctttgatctgaaaacaccacgctgcccaaccattatactaacaacatccagctctttgtgaatttctctacgaggcaaattcctcttgcctcataaaagtgyttgccgagatagctcaaaacccagttgcaattaattattgacagagcatgtgaattagagataaaagaaaagtcattctttctccacacacgcgatagtaaataaatttaattatggtaggagaagctaggggatctttgtctgtattaagttttattagctaagacatttaaaagcatgtcatcataacaaagaggtcttgtgtaatcctaaatgcaccactttggtgcaaggctcagaagtgaatagatttaatggagcacatggtggcagatggcctgctgtactgacaggtattgaacaggtttatcttcaattaactttggtctacatatgcctgtagcaaattgactgtataatggcattctaagcttaattttatcattgataagcctgccacattgagattaggggaaaatggcatcaaacccctttaatattaatatcttggagctcccaaataagataaggctactctggaggcaaactcggatggaggaatgggagtggaggagcagccttagcaaaggaaccaagagatactgaccctggtatgggatctgtcagtggctttctgggcaattttgggagcaaagaaagaataaaatcccatatattgagccatacctatgctagatctttcatcttatatgtcattttcctctcaactgaattttcttttcttttcttttcttttcttttcttttcttttttttttttttgattgagatggagtctcactctgtcacccagactggagtgcagtggcacaatctcagctcactgcaacctctgcctcctgggtccaagtgattttcctgcctcagcctcccaagtagctgggactgcaggcgcgtgccaccatgcccggctaatttttgtattttagtagtgatggggtttcaccatattggccaggctggtcttgaactcctgaccttgtgatctgccttcctcagcctcccaaagtgctgggatttgaggtaggttttaggattttacaaatgaggataataaggctcgaagatataattcaatttgctgaggtcacaaagcctgtctgatttccatgtttattccctgtccctgggcttcggttttctcatttgcacaataatacctttggaccaagtcagggatcagcagactctttcttaaaggaataaggagtaaatacattaggctttgggccatatggcctctgtcttacctcctcagctctgctgttttactgtaaaagcagcctagatgaatatgtaaatgaatgaatgtggctgtgttccaatggaagtttatttataaacattgaaatttgaattctatataattttcatgcatcacaaaatattattattatctttttggtttttttttcaacaacaattcagtgattacaaatcattcttatctgtgagttagacgaaaataggaggcaggaggtagtttgccaatcctggactagataagctttgaggtcttgttgagctcaaagattttctaaaaactactataacaataataatttctttaatttattgaactcttacacatgccagcttcattgctcaatgctttttgagcattatctcccttaatccttatactacagtgtgaagtcagtgctatcattatctctgtttcagggattatacaactaatacgtagagaaatcaagggtgtatctagkttaaacataactggtaagaggtagaatagccatttaaacctagggatatataagggagagaatgtatatgccttgtgttgccttttctgataatacgtagccagggtaagactatagtcaggagatataggtaagaagaacttgcaagagtttatcaattttatttggtggttccaaactaggttgtttatatcacacattttgtgcaaagaagttcagatatttctggacaggaataaccattctcttcctttttcctccctctcctagaaatgtgatgcccaagactttggatgggcaaataaccatggagaagactccaagttactttgtgacaaatgaggctcccaagcgcattcactccatggccaaggacatcaaactgattgtggtggtgagaaaccccgtgaccagggccatctctgactacacgcagacactgtcaaagaaacccgagatccccacctttgaggtgctggccttcaaaaaccggaccctcgggctgatcgatgcttcctggagtgccattcgaatagggatctatgcgctgcatctggaaaactggctccagtatttccccctctcccagatcctctttgtcagtggtgagcgactcattgtggaccccgccggggaaatggccaaagtacaggattttctaggcctcaaacgtgttgtgactgagaagcatttctatttcaacaaaaccaaggggttcccttgcctaaagaagccagaagacagcagtgccccgaggtgcttaggcaagagcaaaggtcggactcatcctckcattgacccagatgtcatccacagactgaggaaattctacaaacccttcaacttgatgttttaccaaatgactggtcaagattttcagtgggaacaggaagagggtgataaatgargctagagaggcagaggaaggctagtcaataagctaaggaggctccttgcctgagtccttgaataccccagcttctgcagcttcacttgctggagtgccaagtagatctcctcctccttcatgcagccaggattgcctccagtgctgttagcttaggcaaacaggtggatcccatggcatccccatggaggaaccaggcccatctgggcagcagcatctggttgaccagatggccaccagaacccactgttcattcttatcttctgctagttaatatagcctgaagacagaggataaatagttgtcaatgtcagagacagtgctattaatgtatatgtgagcgacaaaaaaggtctgctttataggggttctcactctagcttggggagccagggttctagccctgtatctgtcatgggcacctgctgtctaaacctctgcttgggcttctccccagaatgcactttgtggctgagtgctccaggactcctagggagcaaggtcctccctctaaggtgtttctagtcttctctttaaaggtctcatcccacaacccctgacttcctccctccccacatcatgaaggcagaggcatgcacattcctcactgaaaaagaaaacacacacccacccacacacacacacacagaagaaaatgaaagctgacacacctcgaagccttctttccaagagccctctaaatggggttgggtctcactcttcatgagtatcctgggttgtgcagaagcttagcatatgcccttgtgttcggatcaggcccacagggctgctcaaagagtagagtaattgtaaccgaggtcagagctctggggttggcagagatgagtggccatatctgggggtaaaagaagaaatcctgtcctcttggtgggaggttaccttacctgaagaccatctctcccaagcactgtagttctgagcatgtttttggggtggactctgtcccctagggtccctagaagggcaaagaccagagagttgacaagtctgttattaggaataatccttagccatgtaatggagaaaggagcagtcagcattcttccaatttgccccaccaccacctcctcgggcttcattttctctatttagagatggcagagagtgaggtagtggcgagaaagctgactccattcatcagatccagtttatgagggttgggggtgagcaagggctgtctgcagaaacccccatcaagagctgctgaatgaagtgtcccttcccatcagtttgattcaattaaaatgcatcatttgacataaagcacttgttcacagatctccaaaaccaggaattgttctagtaaaactggaaatttgtatgagtggggggagttaaatctgttcagctgttattaaactgtcatttctcccgctaaatgaaaaccgtgttgttataaagcttaatgcaacctgattaatgagtttcgatggtgtgtttgtgttgatcatctccatcttcccgcctcccctggaatgccaggagcatcatctctctgagatggctagaaagtcccagaggcaagaatcttcagaaggttctgtctgcagggcacagtgaatcttgcaatagtacaaagcaagtgggtcctaaaaggagtgcagctttttcctatcttaaccatttccaacaaggaatggactgatatgccagattcaaaagcaaccttacaaataatttttccagatagtaaagcagttattgagctgaaagcaacagatatacctgcactatcaatgtaaaagaagaaacagatcaaaatgcgtgcatgtacatttgaaggaagaaaatgcacccatatttagaagggcaaactgtgggactcatgcggggtttggtttcataagcagagcaaggagtgagtgagtttcagccctccctacccatcagagtcagccatggagtttgttcaagcctactgcttcctgagctctgtttcagacctgttaatgagtcagaaactctaaggtgaggctcaggaattcatcctttcaaaaatattcttagggaagctggaactgagagcaactggaggaaaaggcttgtctgtatatttctttgcctccactccctccctcctacctccttttatgcttttgcttttctcggaattatttccaacagaggtgacctccacagtgttatggcttccctgcagaaacatgtgctcttttggagttcagtggcaatagggttaagtgttacccttataacttagacagtcaaaggagaatctggttgtagcaatgctttaaagaaataaatgacctattaatctagcttgctctcatcacctccgttctgggcaggcacatattcatttggaccctcagtcacacctactatccattttccatctgcctggttgtctatgtgtctttaaaagcccagaacattaagacttgcctccaaaacatgtgtcctcacataaatatgtccccaaaatatgacaagcaaatccattttgtaatgtggtagccaatggtgaataagccacttcacctgggaaataaaagtggagaagcccccttaaattatttatacatccttgcatacaacaggaggttaaaatttcctggagaaagagggcagagggctaagccttgggacctaggggatttttatatttaatagtgtttggtgttatagttgaaaactcgtggttctgaagagaaatgcaaatttgatatgtttaaggtccattttcttcagtgtctactctagcttgatccttgtcactctgggagtgaaccacttagccacgtccctttctgcaatgtggagacttgatgaaggaattattttctatccagaaaagctaagtcaacttgctgaaatagagkcaggttaataataattccgccctatttaaacgtgagcattgcaactcacgggagattgaattttgtatttgatttcaattagcaaagcataaattatgtttaattttctatccccctcctttccctcaaatggatgattcatggctctgggaaggctgctgcgtgtggttcagagatgggaaaaggaaaattcatcctcccaaatagtgcagctgtcattgctcccgtattcatctctttctgtcagtatcattctgtacctgaaaggtgtgaaagccttgacattgcgacttagacctaccagctcaaaacacaataataatcaaaagcacccagcagcccatttatcttttagactgtgtatgaaaaccacgactttagaatagtaaatatgtgacccttctttgggattccttgcaaactttaggagcccctcagatcaaattttaagttcaggagagtgtggcctgctcaatcccttagcactaggagtccagtctaagcctcacttttttacgaccccaaatcttttcccctctcattcacccacctgtttatttaacaaagaaaacttctgcattgcctcactatggtcagaaaaggggtcactgggtcttatccttgcctctgtctgtgtcttggacaactagatttatcaatatgaacattagttttcatatctgtaacataagtatacttaattcctgctggcctaccacccagagtttttctgatgatcaaaatgagttaatagataggaaagtatttgaaaagaataaagtacttcattgacacaagaatagtgatgatgatgatgatgatgatgcagagctgatggtaataacgatgatgatggtgatggtgatggtgatgatactgcagagtgataggatgatgatggtgatgacaatgatgatgatggtgttgatgatgcagagctgatggtgatgatggtggtgatggtgatggtagtgatggtgatgatgatctgtggagctaatggtgataaggatgataatgatgatgatgatgactcagagctgatggagataaagatgatgatagtagtgatgatgatggtgataatgatggtaatgacaatgatggtgatgcagagctgatggtgatgattatggttgtgatggtgatgatgatgatgttgatatgatctgtggaggtaatggtgataaggatgatgatggtgttgcaatgatgatgataatgatgcagagctgatgatgataaagataatgataatgatggtgatggccatcatactgcaggactgatggtgataaagatgaccatggtgatgatgatggtgaagaagataattgtgaagaagattaagaaggaagaagaggaggagaaaaaacggttcccaaaaccccttccagaacaacatgcctttatagcattccagggagtatgttcaggtgaaagtgctgttttactcagaccaaacaatgatgagagtgcaaagagaaagtgaagcaccattgatttgcttaaagccaaggccagaagaagagctccctataaatggcactgaatgggctgaatttcagacactcaaatgcaaaaccttctcccctacccaaagacagggtctcaccgaattcatagatgggttctcctcactgtggcctttcccttgctacatactcaaggttctttcagatataacaaggcttcaagattaattcatacagagccaaatacattctcttgaaatgaaggtgagggcaatgtttttgagcttgcaggctatgtattcggtgcttgaagctctgaatcctaaaaggttacatggaagacaaagatgtttgggaagcagggcacatccttgggagtagctctcgtagttttctggaaataagttgggattggtggatctcctcaggttcttcctgtaacaacttagggtggaaagagatgagttcatgcatttcccagtttctcaaaagaatgtagacttgtcattttcagacataagagatacatggaaccactgtctcaaattgtgaaatgtcttacatgatgaggtaataatagtacattttctgtcatcaaggcaggaaatcaaggctaagaaaatatatgtccatgaatggaagataagcaagaatctctagtgtccctgggctatgggaaaacaatgctgctgtggaaaacaacgctgctctagaagctgtcatgttttattcagtctttaattcacacacacacatctgtagagtgaccaagtggcaacaggaagagatatggggaagagcaaagctgactcaccttgacacttgacacttggtactcccagcccagtggggaagatggacatggatttaggctaaatgaggagggacatacggagtgcacatgaaatgaagcagggtagggggaggtaatatggaggataaccaactagggggaagggaagaccaccaagtacttgttgcaatagagaccacactcagcagcatttagtcttatcccaaattataagacaattcttacaaagcacaaagtggtagacactaacaaaagaaaagataacaattataagattgggtaattaagaagacaaatatttggggggtggggaagagagagagagcgcgatgcataaagaatgtgattaacaagaaaagtatttgcccagaagggaagatgctatcttttttttaagtgaccacagccaagccattaatagagaacataaatccttccaggctccttctaccacctatggtttccttggtattgcccttggtccaaggtcaagggatgtctttgatgccaccctcaggtgtcagctacttgttgactaatacatcaagaaggaaacaccaaactactagaaattcatcttttctgaaaatgtgctaaaatcagcaatagttcaaattaaagcacacttgcacaatacacagcttgaattaaattaaaatataaggtagacttgtcctctagctcaggcataatgaggtcttttgaccgtattttaaaagatggggtctgtaaggacttgggtttgcaagagacttttccaaacttccaaagcagggtagtgactgaagtaaaaccacgaagtggctggctcagaataatgggagaaggaagtgacagtacagcctgccctaataatagcagtcaacatgatttgaaagggtgttttcctaagcccaggaaaggtcagtttggatagctgtgatcctgtctaatcattccggaccacgtggaaaagaattattttgaaataggcagga

SEQ ID NO: 93537 - DNA, 15436 bp, Homo sapiens
tgcttaaatggtgtcacagataactataagaacaaatgaatcgatagtcattggtgacaggatacgggacaggagtaaccaatggcagagtccctcaggatgagcttgctctcttttccttgaattgattctacgggctggaagactgactaacctcttcattagctcattgatcagtctcagcctctgactgcagagacagaatgtgattcctcacccagcattcctccaggctcattctccatggaaatcatctcttaaacagggtggaagatctcctcgaccatgtttgggatccattcctgttcctgttctaggacatttagagaagacatagtaatgagaaaatttagtcaagtgctaaaactgttgcgggaaatatggagaattttttctttatattctgagagacactattgcataaagggttaaaagtgcaagtctggagcaagactctctgagttcaggttccatttaaagcactttctagaactgtaaccttgggcatttatttagttgtcttacagtgcctcagtttcctttcttataatagagggataacagtagtacctacctcatcgatctcttgaggggattgaattacatctagagtacttagaatagtgcacctagtgacaactcttgattgagtgattctacattattaataactacagtatggcccttgaacaacacaggtttgaacttcagggggtccaattatacacaggttttttttttttcaagtaaatacaagttgaaaatgtagtatttgcagaatgcaaatcctacatgtatggagggccaacttttcccatacctggttcctcaggactgactgtgggacttgagtgtgcatagattttgttatggacgggggccctggaatgaatcctctgcatatactgagggatgaatatacataaaattaataaagagcattacatggaggccttcgtgcactaattctaaaatactgaatttgttaagactttgtggagaaataggaggtagattgaaaaacaggacaataagccacaggtctgggcaggatctttaaagaagccatgaagtccctaatcatctcagattttccagtacctgcaggtatcaacagtcaagttgcaaaacagcaaagatggcggcctgcccatccctctgggagctgcatcccagggaggtttgaaacctctgtcagtcagaaagcgccagcgttggggtagctggagaccccggttgggaggtcacacccggtgaggaggaacaggatcatagagctgctttaaaaagcaatctggccacattttcctagagtagtccagccccatttttaacaagaaaactggccttcagagagcttaaatagtttgatcaaagtcttagagctactaagagttcgtccagggactcaggcccaaggtctgtggcatcctgaagcgcagctcctttcttcctctctccccagtgccccacaacctgttcctgaaaaaagctcaggcattcttggtccctaaactcagccttactctgtccttttttcctcagtcttcctctcattcttgacttaccattcccctttcttccctgggaaaggaagcatctgtacttctttgaaagtcctgggtttttaaattgccaaggtaagaagagttagttgaagagctgctaatggttgtagccatttagccctgaatgcagtcgtgcctacctagctggggtgtccctgaatgcggtcgtgtccacttagctgaggtgtccctgaatgcagtcgtgtccgcttagctggggtgtccctgaatgcggtcgtgtccgcttagctggggtgtccctgaatgcggtcgtgtccgcttagctggggtgtccctgaatgcggtcgtgtccgcttagctggggtgtccctgaatgcggtcgtgtccgcttagctggggtgtccctgaatgcggtcgtgtccgcttagctggggtgtccctgaatgcggtcgtgtccgcttagctggggtgcacctctgtgttcttgctgcttccttgaaggctccaacaatgcctggatgggttgggagaagaacatggtttgagggaaatgcctcattcaacatccctattgggactttagtgaggagtaggtttttactgaattattatagaccatatttcacctgagttatagccaccaaaccttgcaacagctttttcagttctgtcatcactaggaacttgtgcctatgtggcaataaactccacaacaggtcagacctccttgtctacccgggcaggtagaaggggaaataccgcttctcccgtgggtggggcattatttgtaatgtaattgtaagaccacttcctggcagcaaaacacttgcctgcttcctgcccataagcctttaagagggaaagtgctgggtgcagtgcttgcagaaggtgacattgctagcctggtctcttaggaaccatgtggccaacatgacagccagccttagcccagctgactctggtcagacctaaggagctggttcccattcctccaggcccggggcctctaccagcccacctccaccccctgcaacttgtgtcccctggggctgtgctgctctgggggtgtaccccctgcagagcccaatgggagggtcccaagggtgttatgcagatgttcttttcagaggaagccaaagccagctgaaccaaggttggggaccggtggtcctctccaacctcctgccagcattcccctcactattagtgcccaccgcagctgggaagaggccaacatccccttttaggatttgacagaaactccataccaagtggctttgcacctacgcacctctttggggaaaggaatgcttttcagttaaaggtatttctgtgcggccataaaaaagaatgagttcatgtcctttgcaggaacatggatgaagtgggaagccatcattctcagcaaactaacacaggaacagaaagccaaatacctcatgttctcactcataagtgggagttgaacagtgagaacacatggacacagggaggggaacatcacacactggggcctatcggggggtgaggagcaaggggagggagagcattaggacaaatacctaatgcattcggggcttaaaacctagatgacgggttgataggtgcagcaaaccaccatggcacgtgtatacctatgtaagaaacctgcttgttctgcacatgtatcccagaacttaaagtaaaaaaaaaaaaataaataaataaataaataaagggatttctggccgtggtaagcaggtgaaggggttttattttgatttgggacagggtaatattggagagggctgctcctttcaaaggatatcaaaggctgaccccaagacaaacaaactctcccccttaaagatgccttgggcgaaggtatatcagaaagcgaggtgcctgggctgtcccattttcctacccttctttctttgaaattcactctcattcctggctctcagatgtgggcccctgagccagtttccaaaggacttctcactgggtgcctcccacctcttccttccctggatgtcctgtgagcttctatgtctgggcaggcaaccatgacctcctgcccagctcagactctcccatcccaggctagagtcagtatgtgtgtgccccaggccttctcaggaagggcaaggatgcctggatgcagaagaggccctggaaatgagtgacaaggcagggagctggcctttgtcttttttatttaagtgtgaagatgatagttaaatgacatgacaactctgggagacttggtaaatctctttagaatgtgaggtcttttctttttaccactgtggtgtcagggggaagtgctaacattaattagagactccatggactaatacagtgagaaaagaaatagccaaaatttactttgagttagaccccttccaattctagccatttctgtaagctacatactatttatacctaataaccatgaattaatcacacacacacacacacacacacacacacacacacacacacacacacacccacccctatttgggattgattagtcttctactgtaccacaacacccaattctacacatgtgcccaggcttctggagttgcagtgagttgccttgtgtgtcaggcaagggagtggggacagttttccacagctttagaacaactggcaagaaccctggccttgagcctgagtgatgggaccctgttcagtgtgctttggaggagcaaaaagctgagaccagtcaacagaccctgggctatgagcctgaccaggagtctcttaacctgggtgctgatgcagcaaagatgctgtctggacttggcagcggggatggagaagaaaggatggatttgaggcacatttatgaggtgataggttgacatgggtatgagtgaaatggacaagttgggtaactctagtttcaaacatgggccatgagtggatggtcttgccataagttgagacagaagacgcaggcgaggtgatgatgtcgagttcagttttggactcgtggaggctgagtgcctgtgggatatcaggaagcaatgtccatccagcaactgcaggtccacctctgaggcttgggcaagaggtgaaggctggagggaaaggtgttggaatatggaaaggcatcagtgtggaaggtggaatctggagatgggggcaagtatgcaggagaagagaagtgagcagaggataggagcctggggcagtccacagaggagagacgagatgtggctggagaggtgggattctgcagtacagttgatggtggtgaaggtgtggttctttaaacagagggatttaagcggaggtgaatgaggaaggtgggatctcattcccaggggagagttttgtcaatgggtctgtatagatgaaatctacaaaattaaactgggttccaagttcttggcaattctcttgaatgaaattggatacaatgattgtcttccatttaaggtttattgagatatgttaggaaattgcacaggggtgctcagaccccaccaggtctcagtatctgagcctcctgaagcagccctaggagctctgccagctttcctgtcctggagccttgggctagtacttcctgggccgcccttcttgctgctccctataagtacatctgtaccctcctcctagtcagcctgttttcatctgaaaaagtaatataatcatttttaaatgcaaatgatactaaaagatattcagtgataagtaaatcctcctcctacctaggccccattcctcagtcctttcccactctaccctgcaaagcaattcccgttaccagtgttgtgtgtatacaatatccttttggaaacactacagctgtgggctgaatccagccagctgcctgtttttgtaaataaagtattattggaactcagccacacccactcattgaaatataatctctggctgctttcctaccataacgggcggaattgagtagttgtgactgagacaatatggcccacagagccaaaaatatttactatctggtcctttaagaaaaagtttaggctgagggtggtggctcatgcctgtaatcccagcactttgggaggctgaagtaggaggatcacttgagaccaggtgttcacgaccagcctgggcagcacagtgagactccgtccctactaaagaaaaaattagccgggcatggtggcacacacctgtggttctagctactcaggagtctgaggcaggaggatcgcttgagcccaggagttcaaggctgcattgagccatgattgtaccactgcactctggcctgggtaacacagcaagaccttgtctcaaaaaaaaaaaaagagagaaaaagtttgctaatgtatgttctttgtatgtatagacatgtaagcatactagacatgcttctgcattttgcttatttttatttcacagtatatcttagagattgttccccattggcatgtacatgcagagtggtctcaggccttttcacatattatagcatggatgtaatttaatcaatgcactgttcaaggatgtttgagagattttctgtcttgcctgaatacaaaacactgtagggaacctctttgtgcttgactttgcacacacacgggatcttcagggtgggtacatttaaaactgacaagtattgccaaattgccccccaacgtagtttttacaccccacctactactctcagtgaaaaatcaggccctttttattttaagggctaaattgctaatccctgtgtgaaaatgggtgttaacaaaataaaaaataaggaaaatatgcaggcttacccaattttgttatctatacattttacagtctctaatacttagcatagctcctttgggtgtctgcccaccacccttctttctgaacgtggggttccctgggctttccttgtttgacttcagacctggatctaatagggatctggaggtagaatcaagacgaatgttccctttggccttaggtgagtcctttgcatctctgaggccctgttgatgacatccagttctctagacctctgcccaaaccagagcaatccctcctcaaatatgctaagcagaaatgcagacaatataagacacactmtatttatattttaggagtttacattaccttcccttctgtttggaaaccaacatctctcaaaattaggtatagttaacacagaataccccaaaataccaccattcttcataattccatttccttatttctggattctttcaagggtaaaaaccttgtttcattcatctttggggcagcatttgcctagtatgtggtaggcgcccagtagattttggataaactgacctgattttctgttaatattccaactggattatttctttctcctcttacagaatgaagatattcaaatgttattttaaacataccctacagcagaaagttttcatcctgtttttaaccctatggctgctctctttgttaaagcttctaaatgtgagacgactctttccgcaaaaagacatttacttggttgagtactccctaagtacctcgccttttgtaagaaacagatacactcatgttaaggatgaagtcaggtatgaagttaactgttcgggtatctatgaacaggagcctttggaaattggaaagagtctggaaataagaagaagggacatcattgacttggaggatgatgatgttgtggcaatgaccagtgattgtgacatttatcagactctaagaggttatgctcaaaagcttgtctcaaaggaggagaaaagcttcccaatagcctattctttggttgtccacaaagatgcaattatggttgaaaggcttatccatgctatatacaaccagcacaatatttactgcatccattatgatcgtaaggcacctgataccttcaaagttgccatgaacaatttagctaagtgcttctccaatattttcattgcttccaaattagaggctgtggaatatgcccacatttccagactccaggctgatttaaattgcttgtcggaccttctgaagtcttcaatccagtggaaatatgttatcaacttgtgtgggcaagattttcccctgaagtcaaattttgaattggtgtcagagttgaaaaaactcaatggagcaaatatgttggagacggtgaaacccccaaacagtaaattggaaagattcacttaccatcatgaacttagacgggtgccttatgaatatgtgaagctaccaataaggacaaacatctccaaggaagcacccccccataacattcagatatttgttggcagtgcttattttgttttaagtcaagcatttgttaaatatattttcaacaactccatcvttcaagacttttttgcctggtctaaagacacatactctcctgatgagcacttttgggctaccttgattcgggttccaggaatacctggggagatttccagatcagcccaggatgtgtctgatctgcagagtaagactcgccttgtcaagtggaattactatgaaggctttttctatcccagttgtactggatctcaccttcgaagcgtgtgtatttatggagctgcagaattaaggtggcttatcaaagatggacattggtttgctaataaatttgattctaaggtggaccctatcttgattaaatgcttggcagaaaagcttgaagaacagcagagagactggatcactttgycctcagaaaagttatttatggatagaaatctcactaccacatcatgatagtaaaatcaggatggaaataagagggtgcctgataaatggagtcagtrtggaattgaatacyatactatgcccaatactgtttaaactcagtcctcccatattttaaaaggtgtccaaaattccatacacaagggaaagtgatctagcctttgatgttattagcctgcagttggctaggtttttttaatatttgtttttgcttgtaatctcactgagccaaatcagagatcttaaacattcagtcagtcatcaaacattattgagcacctaactatatgacaggcacttttttagagactgcggcttatcctcatcatagcaacctcggtatctttaagttctccacataacagtcaggattctactgaagaagcttttgaagtttgtggtaatcgtctgatcatataaaccacccatttcagagtagtgtttaagtactgtgaccaacactccacttgtctcttaactcagctttcaagacatttcttaaccatcagagcagaggaggaaagactcactacctcagaaaaatctcaaagaatagtccaatttcctgcttgccaaagcataatctgccttttggtgcattacttggtcaattcagggttgaggagactgttggggggcatttataatgtatgaaagttaaggaagggggtgaggatgtgggttgggacaggtagtacctaaagaggagcgaagggatttatacaacatttttatcatgttacaaaacagtatcatgaatggcctcctttttagttcaactgtttctttaaaatgcatttactgattaaaaataagaactgaccaatagctccaagtgtcacacaccagaacattaagcctaagtcctcaattcataagttatcattctagataagtttctttacaatggaatactttctatggaatcattataattctgttgtatggaactatcaagctaagagtcactaaactttcttcaaaaggttgtgtgaaatatgacagctttctaaattaatttgtatagtcatttaaaattttttcttctctggcaactgtccaactggaatccagatttaaagtgataaaagctctaagtttcttgcagtctttttctcagcttagttccagagagaaaaaagctaattttcctaaggacacagcaagaatattcattaaggatattttctaaaacccacacttgagaaaaccacccaatgagtcaaaaatatatatatataatatatattttatatatatgtaatatatatttatgttatatattatatatagaacaattccattacatatataatatatataaatatatatattatatatacatatattgtatatgaatatatattatatatacatataattatatatatataaatatatattatataacatataatgaatatatattatatatataatggaattgttctggaagtaaaatggggtaggaatggggttctgagaataggcaataacattttcaccagtctcttgggaaattgtagaactcatgtaaaaatttcttggtcatgatatgtctcaatggcagcctcagtaaataaaaatgtagcctcagatattatatttaaagatgtagtaaatctagcccaaaataggacaatttggaagatttaagtattacatattttttaaatgtctgtgttctaaatgtgaaatgcactttgctcattttaaagttcataatactaactgccaactgacaccacttctcgctccctttcttctcttgaactcatttttctccctttttatttacccccttcaaattacttcattctttggaaataactattaccaagccccattcttcaaaataagtaaacattgtatagagccaagttctgcaaaagatccataccagttcactcgtgtgcgactgtggacaggtaagtcactttggtctctatgaacctcagttttccagatctttgaaatgagcacttggatgcctatccttgcttccacacaagtgtttttttttttttttttttttttttgggagaatcgattgaaatagtatatgaagtggtttgaaaataggtacaaactattgacatttcaatgtcagagagtgatacctgtagtagtataggcaaaggtccaaccccatcgaaaggcttaaacatttaccttttctgaaaaactattgaaatataaagagagtccccagtcacaggggcaacttctgtaaccaaatccagatctgaggaaactcctgtaaccccatttggggtttctttctaagccaatagggttacaggttggtacagtgacacattgagaatggggctacaaatacttttcccaccatctaggatgaaatacacgaaatcctgttgaaatcttggtttttatgcctttgctcatcagaataaacgtaaatgctgaaaaacaaataacctcctgatccactgtcttgcctcctggtgagaaatgattctatcccctgtttattgggaaatttccaaagttgttcatcacttaaatgccgtattcaaagggaacatggaaggatgaagcggagaaagtgccttcgagacattcacacatttctctggactcagtctgttaacatatcagggagcttgtcagatcacacctttttgccttggaaatcctacagatttcctgtacgccttcatatctgattcttccctaaaacctttgggtatgatttcctccctggtcttgataatgtcctgcagtctgtgttttataattattctttgtatttattgaatctagactttaagttattcagagatcagaccagaaccttagagtttctaaactgtatgtggatattaaataatattaataatgaaagagctaccaaaatagtctatattgtgtgaacaatctcttgggatattagacgtgtttaaagaccagtgttgctgctatttttaatattttggttaatttaagtgaaatgtacatattttaatttgaagatttatcttgcccatcagaatgtgaagatatacttgcatatattttgacatatttcatggaaaataaaaatgataatccactttgtgagtgtaagtgaatgtattcatatgtatgttattataaatgatttttgtttgcactgatgatgaaatgagagttttgggggctttttatacatttatatcgactggtctctaaatctcctattttgttttcttatcatttttgaaatacagttcccattacatgagttttaaatagattggtgtttcattttgtattatgctactactagatgttgattctctggtattgtaaaataaaatgtgctccaaaaacccaaacccttggactttatgagctttcctttctctggttttgctgattccccacaaagattctttcagtttatggcacttgccccttatttaaagagcagagtttatttcacttcagtgtaaaagaaattcagcatgtgtattatacacaatataggcacatgaacttaagccatttaatttggtaaagtctcaaagagtcttccaggatttacctgtcttcctcctacttcaggttggtttctcctgtaagattaataagataaatactcttgtttgcttgattactttatggaagtagttttcaatagggtaggttgaactttttatctcaggtccctcacttcctggaaaatcaatattcttccctttctaccttttttttttttttttttttttttgagatggagtctcgcactgtcacccagactagagtgcagtggtgcgatctcggctcactgcaacctccgcctcccgggatcaagcaattctcctgcctcagcctcccaagtaactgggattacaggtgcccgccaccatgcccaactaattttttgtatttttagtagagacagggtttcactatgttggccaggctggtctcaaactcctgacctcgtgatcctcccaaagtgctgggattacaggcataagccaaggcacccagccaagattcttccctttctttgaaggactcctgccttggttgtgagcacgcagacacccccagtgtccccaggccttgctggtggaggattcctgatgagcttctgctctgttctcccagctctactgagctgagtatttgttatcatcaacccccacccgctgagaagctccctggccatttttctttcaccatttctaaacccataacagtcaccagcctacccagtatgtagatatgccaggggtttgcatatttcactcacaaatctcaatccatctcaaggaatttggggcatttggggaatcttcaacctaaaaaaataaacactatactcaacctaaggttaattctagctcttaccaagctggacaactgtgcaaattcacagtaatttcaggaacaggggactattttttggtgccagtggtggtgaggcaggtctatacacagcatcatattaaagactgatttgattcctacataagtttcatatttttttgttcccattggcacctacaaatctacacctaaattgggacaattggcttctagttacatgaaactgattatgaggaaactgtggcaagagagaatgaatagatgattgtaaatttgttctcagtactggaaaaaaaatctggtgatgcaaaacaaacggcttcagagacagatgatcagggtgttaacccacgtggacacaccaaagccacaggaagactcttcatcgggccttacatacaaccttcccacagagcagcaaakcacrccctcctggagcaccctcggttgaatcatgcataagacaaacagccagaaaagaatctcagggaaaatcatggccaggaacctgggtaaatttatttttttgttcttcttgtttcttgttttgttctttgttgtttctcatagaacaataaaggaaattaaacagaaaccacgtatattcataattctaacatcctgacaaaagcattatagttctctgaatgctcttatctacatacacgtgttttgacatttgcccgcactgccaatatttttacaatcactctgccatgttgctacatggtctttatggctatgtaatggtcataccacaattcactcagcctctactttactgtaggacatttgaattgtaaactacwttttttttttgctgtcataaataacagtgctatgaacagtgttgttcgtacagcttctccttgaattacttccttatgatgcatttccatgagagaaattataatcctgaagagaatggagtttttaattgattgtttttcatgtatgtttgttataaatcaacttctcagaaactgtgcaggatgcttggttgatgtatacaactacagcctctacttatgtgaaattgtattcatttattctgataaatggctcttcagattctcaaagtaagccaagacttttgcctaaaacaaggaagtagtttttcctctagcagataaaagatggtgttttaatgcatgggtagtaaagagctatttcagaataatgttcttaaaggcttaactttgatgactgactccattccaggaaggatctagaagttgctagttccttctaatatccattctttctggcatccctggttatattctgagcaacaatgtgaccagctgttaattcccagcttccctttcaactatggggtggtgggcaaatgagtttaaagcctaagtcactgggtgggacatctgagagtgcgcttggaaggtaatttacctagcttgccttctccccatctctcttgctttttcctgtgcctagaatgtttgttatagctgaaatttcagcaaccattttaaaaccatgaggatgggagttatatggcagggacagagtgaaaatatgacatctgaatcatccaagactacctacctgcagtctccttttatgtaaggaaaaacttggtatgtgctttaagccactgtcatctcaagtctctattactaacagctggacatgatccctaacttacacaatgtttgtctaggacactggttttcaaactccagtctgcatcagaatcatctggaggccttctaaaacacagattgctccccgcctttccctctttctcattaaaggggagggagatttgcatttctaacaagttcctaagtgagattgatgctgttctaaactatgctttgagaaccactgttaggatatctttcctgaacattatttcaacattgcaagcattaggctgattttaatatttagaaaccaccaaattttgcaataagcatacatacctcttgatcctaagacactatagttaaaagttcagaaatattttatatgctgttttatatgctttctctacattgttgaagaggtagctatctatatttttaaaataatgaccaaatttgatgcatttctgtaactataggtcctcctaaaattgttttcaaccgcatggctgccatacttgtaactattttataaaatacaatgaaaaacaaatgaattttggagggtgtgagtaacctgaaatcatgggggtgaaatctcgagttcagacgtatgtgtaattctataaaacaaagatgtatgctagtgagatggcctctacccagctaagaaaaaatttccatgggaaaaaaattatgaactctaaggagaatacaaagtggtgcaggtgtagcttggctagagatagagtttacatactcaggatcgtgtaaatgttaaatattgacctaatcaatgctactgatataatttacaggcaacatgaggggatagaaaggatgaatatgttgggtaggagtgtgggtgggtgtgaaagacatcaaaatcatctcaatgatcggactaggtagacaatgcctgtaactgaaaaaccaaatagaggaatagaaagatgtcactccaatttgtggaagcaaaaccaaaagaaccacttcagagagttactagtcacctccaaggaaaggaaagggggaatgctgattctgttttgcaacaagccttgcaaccaggtctttaaactttgaaataaaaactggggaaacaaataattaactggtaaggaaaaagacatgatctgtgatcagactgcttgtaatctaatagctagtgcaaagaaccagaaaccttataagggtggctagtgtttctgtctactcagcccttcttccatcccagaatcttcagagcacaaagagccctcctggcta

SEQ ID NO: 93538 - DNA, 17299 bp, Homo sapiens
gttcattacgttccattttcatttctacaaggacttggctggatggtcattttctctcttggccaataagtcatcgcagctgcttttagtcctgcaggaatggcctgctgtatctcgagaactacctgcaaccgcagctgtgcctgctttgttgcaacagaggtgctgagttgagggatggggatttgacccagggctgccccaagtcagcagatgaaaatacatgccctgactttcctctggcaaccctgatttgacatggatcccgggagtgaatttgctggcaagttccaggggcagtagcctgcggtaggtcagttagtcctgaagaagaggcctttctgtcggagagaaaagtttgcaggtgggtgcatctaccatcttgagaggctgaggagggagggagagccgtgctcggtggtcagtctggtgaaggaagtgggttcagtctgcagcccacatcctgggctgtcatcaagaattaacatggcaaacggcgactccataaagtaaactgtagctacttaactaaatgatttcgtgtggctgagatcctactgtttgctgggtttcctggaaaagtcctctagatgaactgcaggaatctcctggcactctggttacagctggagaaactgatttctgtgctgtccaggtgctcccagacccccaaggcatctccaggacacagtcaccaaacccccatcctggtattmctggcatygagtgccacgtaggcacacagcactccataatttggaaatgtggatttcattgctattgctcttcatgagggaacaaataatatccatgatgtattggcaggaagccacgccccccctcccccgctgccacccccacagcgcgcacagtgatttcaggaaggaggtttgattggtttgttgtgtgttgccctgcaagggccccaatcagcttcctgctcatcagccccatctcaggcaagtcccacatctgtgatgtcaagccctgagccgggtaattggacttggatacctgcttgactcatctttccagtgaggttcctaaggagcatccccaaccccacctcccagggggagctctcgatgtcacctgaagaacaaacaaacaaaaactgtgttgatggtacagtcccagggctccgtgactggacaggctccctgcgtgatacacctgtgtatgtcactacagaaatacagctggtgcaggcctgtccgcctctctcacaggtcagagtgttctaaaatccatcctggcccttgttgtctgtctgcttggggttagggcaggtgctcctttatcatttgtaaagtttatgtgatgtctggtatgtgttccacacccttgcagagtgtaaattcctagagagagttcagacttcggagtcaaatgcacaggtgcaaattccagcttgtctaatttgctgctgtgtgaacgtggacagtctttcaactttgctagtttcccatctgtaaaatgaggctgttcagtacctgagcacatagcattgttgagaagattaaatgagacaatatgtgtaaaacacttagcattttacccagagcttggtaagcatcaatacatgctaattatcatcatcatcagaagatgaatatatttattagatgcctaaaactccaagatatttcccttggctcataaattctttatcactagggatttctctatggaagtgaaggaagaatctggaacgtaacaggcctgaataaccaggggcagtggctcacacctgtaatcccagcacattgggaggccaaggctggaggatcgcttgaggccaggagttcaagatcagcctgggcaacatagcgagaccccatctctacaaaaaaaaaaaaaaagaaaaaagaaaagaaaaaattagcgggcattgtggcacatacctgtagtcccagctacttgggaggctgatgtgggaggactgcttgagctcaggagttcaaggctgcagtgagctatgattgtatcactgcactccagcttggtcaacagagcaagaccctgtctcaaaaaagaaaaataaaaatcctgaataatatgtctatgtcttcatcgagcccacgtattgaaaactacccaaaccaccaacaatgcaaagaaacattatttaactaagagtcgagtaaccaaatttcagggttatccaaactgaatatggcctctgcaggagaaaagaatatgtgtgatgtggcagccacaatctgataccatattaacactgtcttttatttttttttttttgagacggtctcactctgttgcacaggttggagtgtagtggcacaatcttggctcactgcaacctctgccttcaaggttcaagagattctcctgcctcagcctctgaggagctgggattacaggcatgcaccacacatacctggctaatatttgtaattttttttttaggagagacagggtttcaccatgttggccaggctggtctcaaactccagacctcaggtgatccagccaccttggcctcccaaagtgttgagattacaggcgtgagccaccatgcccagtcaacagtgtctttaaatgacatcagatcgcagaactttgctgagcttggcccagacacaggtctggctaaaacaggtggtgctgggaccaggcatggccaggacatagggaagcacatccctgcatagaaaaggttctgtggattttaatccaggtcagcaattagcaaactttttctgtcaaggaccaggcagtaaatatggcggcttcgtgggccatactgtctgttatgctgactcacctctgctgttaaagaacagaagcggctgtaggcaacacgcaagcaaacaggcatgtccaaaaaatggctaataaaaacaggctgtggggctgggcacggtggctcacgcctgtaatcccagcactttgggaggctgaggcgggtggatcacttgaggccaggagttcgagaccagcctggtcaacatggcgaaacccagtttctactaaaaatacaaaaattagccaggtgtggtggtgggcccctgaaatcccagctactcagaagactgaggcaggagaattgcttgaaccagggaggcggagggtgcagtcagctgagatccagcccactgtactccagcctgggtgacagagtgagattccatcttaagcaaaacaaaacaaaacaaaacaagcaagaaaacaacaacaacaacaaaaaccaggctgtgggcccattttgactgaggaccttggtttgcatatccctgatctagagaaatgagtgatttaacatatatgcctcctaggacatatcacattgaaattagcagcccttgcaatataacgggtcatgagcagagggtgcatttcactttgggctttggggtcttcccgggccctggaacccccaccggctcccagccccaggacgttggaagctgagaggcctggcttccaatcccagccctgtcccttgctcgctgcatgacttgggcccattgcttggcctttctgagcctcagtttccctagctgggagagtgaagatggcaatttcttgcctcgtagggttgtgaggacaaaagaagaaaactcgggtggattgtgtagcctggcccccattctcagaaggtctccaagcggtgccgtcttcctcttatcccagcgtggcctcagccttcgagaggcctagaactctgggaaaggagcagtcaggactggacacgactccaggcttttcttatttcttgtgtggggtctggaaaaggagaagtgcaattatatccaaggcccctcttgggcaggggtctcagatccaggccaggctgatatgagcaaggggaggcgggtcaggccaggcagcactgtcaattttgatgttgggagggaggaggggcatgactgtgtatcagcaaattcctaaatttccaccctggctcgggagatgcagcttgtgctgaagtgagtcacttattcctgggcccctcatctgcctgcttgcttccatgtcccctagagccaaaaacaactataggagcaacttaggggaaaagttacctatatttatatataagcgtatgtatttatatataaatatgataactatagatataatctaatatattgtgtataatataaattaaatatatttaatgtaatgtatataacttaagtatattatatattcataactatataaaatatataaatatactaaatattattcactaggttttcatcattggcaacctaagttctatataaatatataaatattatctatgaaaatttatacacaaatatgtatataaaatgttataaatatatacatacatatttaagtaaaaataatatatacataaaatatattatatgtttatatagatttaggttggcaatgataaaaacttaatgaagaatttttagtgtaataaaaactagtctcgtggtagctctttgtgtttcagaatccagctatttggctctgggcccgccctctgttactccgagaaagcactgctttggaggtaacacaacgctaggtggcccctgaggctccctgagcaccgtccgatacccctctcagaagcacctctgccccctcctctgtacagcccgctttgctcgcctgcctcttcctttggattccaggttggtcggggaagcaatgggccatgtgtgtgcaccgtctgtgcctgccttcacccacacgagcctgttggaagacgacagccatacggaagaccgctgagctaccccggccccccagcccaggctagttggggttacccaactaccagccaatccccagacgtgaatgtgaataagcccagccagcatcacagagctgcctcgtcaatgtctagctgaccccagatgccacctaaacaatttgggtttctcacggcagttctcttcccaacctctgttcccctgggttcctaagaactaagggttgtgcccaccaatcaaagcaagagggaaacgggccttggattttaaggcgttgcactgctgtgacttgaaaagggatatggtttaaaatcattcatttaggccgggcatggtggctcacgcctgtaatcccagcactttgggaggccgaggcaggtggatcatgaggtcaagagatcgagaccatcctggccaacatggtgaaaccctgtctctactaaaaatacgaaaattagctgggtgtggtggctggtgcctgtagtcccggctactcaggaggctgaggcaggagaatcgcttgaacccgggaggcggaggttgcagtgagccgagatcgtgccattgcactccagcctggcgactgagcgagactccatctcaataaataaataaacaaacaaataagtaaatgattaaaaatcagtcacttaaagacgtattctaagatgagaccctcttgctctataaaactgaaggtcgtgtccactaagaagagtggatctgacctcagccctgcactgtgacgccacattccattagggcagaggaacagcatctggcaagagaggtcgtcccagaattctaaagaggcaggatggccctagtattcaaacttggaccacacagatctgcacgtctctcatcccagaaaggagaacccaaagtatgtgtctcggttcatgattctgaggatgagggaattatggaaggcaccaagtccattcataaaacacaccaccccctccctgtcccggttaatgacagtgggtggtggcttgagcatcaaagtggcccatgatgtcttggttttgctatctggttatgccatctggctttcttggtcttcgtccattcatttccctggagtcctggccatgctttgcttcttactaaccttatgcagaagccaaggcaagcgaggacgaggcatacttggagtattcccactggagtaacttctgcaactagaagctttagagctgtgactgccatacagagccaaagaaatgtaaggtgcagggcgagtgagggtcttgggaattgctggagataatggtgctctgtgcttgcggcgagagcagtgaagtggtgagaccagtttctgaatgtaaacwttttatgacaayggctgcgaagatgcccaaagtgggcccctgttgcctatcaytgaggttttgaggccactttttagggagtaatgctaggcgatacagcccctccctaaccaggcttgcaatggattgcatgcctgttacattttgagtgcccaggtttctggtggattctatttgccagtcactgttggtttcaaatgtgaagcatctttgctataaatagactctactgagagctgcatgatttgaagaaacattatacctgtaattacattattttacttgaaatattagtaaacacaacatgaactatgtctatttgaatcagtgtggtacagtttgtacgttcaaaacctgagccttaatacataaagttaacttcatttataaaatgctcaaaaataggcaaaaataaactgctgtttagagatgcaaatataggtggtaaaactattaaaaatcaaggttctgtttataattacaaaatgcaagatattggctatcaacagaatagaaacgtagaggatgtgtatatcccatgggcagtgctgacctccttgggggcagggagtgggtgtcctccaacatatttatgtgtcctcagagcttccccagtgctgagccttttccttaacaggtggatgggtacgtggcagttttgtgctgattcgttttgaatgcatactggctacatgtgtaagctttcctaagacaagtgaccacagcactgagagggtattactgacctcttctagcaagaaccacacaaaacagactcctgacagtggggtgggactggggtccctttaactggaacaatcacctgcagccctttttcttgcactacaaaactccgtggctccatcacaccaagcgatcatgctctgtctccagagtatcagctcacttggtgtctggagaggaggaggatcaacatgattctcatgctgaggaaagttatattaaactaggaattctgcatctttggagttgtattaaacccacctgcacatttaaatcaattacgcggtgatttttctcttggaaacagtctcactctgcctctcaggctggagtgcagtggtgcggtctccactcactgcaacctctgcctcccaggttcaagcaattctcatgcctcagtctccagagtagctgggattagaagctcttgcaaccatgcccagttaatttttgtatttttagtagagacaaggttttgccgtgtttcccagtctggtctcgaactcctgacctgcccagctctgccttccaaagttctgggattacaggcgtgagccaccgtgcctggccttctcaagtatttttaacgtgccacactgttgtttaataacagctcaaagggcaaggtatgcagagtggctgaatttagaggggccacagcagcataggggtgttctgggttggaattctgtctcttctgctacctccaacctaactttggtctagtttcatatcctccggaagcttctgtttctcagcccttgaggggatattgtgcagataatacccatataaagggcccagcacataggtgctcatggaacgagaactatctgtgtatatggctcactttataaacctgaaatacatattttgaaaataagaaaagagaaacgaagtgaatatgttgattgttactatcatagttgttctgggctagttgttataatgtgctcattatgctttcatcttaatagtgattactgagaaagcactgggattttccatgctcattcagatatcctctttaatcacaagcattagtgctcaccacacaagggccccaaagaactggtgttgygtttgttggcctctgttctgaatggcatctgtttgcatccttgagggaggttttgctcaggaaagggttatcagtgagggcgggatgccctaggcaaccttggacaggattcagtggttgggaaaggagcggcagcctaatacctcagccacatgctggccgctcagtgacacaaacctccaggtgcacggtcattggcagacactcctgtaggtggcaatgcaggcaccatcaggatgacatcactttcatccatggggcttttcagtttatttggaaacaaaattgctggctgataatattaccatggacagagtgggggtgtgttactttcagaaggagggcactgtcatgtaacctcagcatccagagcagagccaaatgtgaagctcacacctcggtccagcctccgctggggccgctgagtgcttatagcaaaggctgctggtccatatgcaagagggaaacaggtcttggtttctaaggcacagacgggctcctttagcctagaattctggaggggaacctgatcctgtgaagtgtttcttgaaacttcgtctgattcctggaagaagcccagagtcttatttgagatgagactagtatgttgccacaatgtgctgggtgacaggtgtcgaggcatcacatgtgctgcttcctggaaagtgcattaaacaggcttcagagacactctgataaaggaacagaaggggcatagttataataggaaagacaaagggttagtacccgtgttttcaaaagattgacaataaacaaacaaaataataataataaaaaaagattgacaataaaccaacgaggaaaactcagttggtgcaatgaggaaaatggatgaaactatgaatgatgcttcactgatgaaacacaacccacttgtgaaaacatgctcarcccaatagaactctgggacatgcaaattaacatgaagtctgatttttttttttttttttttttgcctctcaggtgtgcaacgtcccgggtgagtgacttctagggagacagcgccatcatgccctattggtgagttggtgcccgggaaggtcctttggaggtgacaatttggtggtttctacttaaatttaaaatgtgccctttgacctagaaacttcacttctagggaattctcccatagaactagtttgcacgttagcaaacatacacacatgcaggagtattcattatacagttgaattatagaattgcagcatgtggaaagaagttaatgtctgtcactggggaggtggaggtgactctccagacttygttatgtttatactgtggaatgccaagcagccattaaacagaagtaggaagctgtgtacgtgctgacatgtccaggcagaatgttgaccaaagagggccatctgcaaaactgcccatatgtggcagatttagtcacttctaagacacagtactttcacatattaacctccctaacatcaggattatcacaaaattggtgggatcttacaggaataaatggcagtatttttgctttcttagcagagcataaagtgattttgacaatggtagtcctggatttgatgatataccaggagtttgactgttgttcataaaagcaaacaatgtatatgtttctgtaactatacagatttaaattgcagagtgttgtctgtttggagatgtactccaaagttaccaatggattgagatggggagaggaattaggaaaagggctaaatgctcttggtgtgtttctgtttggtttgaatgtttgtaacaaacatgtctccctatattgctggtattgccccgtcctttgagacgaggggcagttggctctgttagaccctgggccaagtgggagaccagctgtgggcactgaatgtggaagtggcaatgtgagccctggctggggcatggctgtcttgggccctgaagctgccctcccagcaaaccagcagatggcctgagggcccccagggatgaacattgctcccgactgacacacagctgccacgcccaatatgcaagctgttagaggccaagcttgggagcttggtgaccacagcagatgccttgatgttgtgcgccactgtccctgggtgttcctctgattttggcaacagtaggcccacacgtgggacatgcatgtgccagggagctgacagccctggaacaaactttccacctggtgggcgagagctgtgggtcagtgctgcagcatcctgctccttcatgcagaagatgtggggaggcccctcgcacatctctgcagagtagagttcccagtgtggtctcagtaatgctcctctgagtggcttgctcagacacacacactaatcggtgcccctggctacctgtctgtctctcctgaggtccctcagcactcagcgtcctatctgtgtatttctgttgatagtagctgcctttgaggctggtctggcaagcgtacttttgcagacctcagctccttcagaggcgttgggctcaggcagggctatttgggttcattggcccctggtggaggcccagttggtgacttcctttatgcctcttccatacctccttttccttggatccctctgcccctccccactgtgtccagctgtgcctgcaccttcatgtatccaggtctgcttaccccaggggaagggccaagaccacatccacagcagagtggatgctgcttgtctaggatggaacattgggacccacagacccatagagagaaactggtaacaaaagggcccacaacagcaaacaccatctcacagcaggcgattttttttttttttttttttttttttttgcagaggaatgaaattaagagatttaaagacaaaaacacaggctggtagtcaaagtaaaggtttatccttgcatcagaatggtttaaatcttgcaatttgcatatacaaagagttcagcaacattcactggcattataatcagagcaagatcaaattataaatgtaatcaaagaaaatatgatagttgaaactgtaataacatacatacattataaagactgcacataarttaaacacaacttagttaaacaaacaaacaaaaaagtatcagtaattatacacttaaaagaataacatggggatgtctccaaatgctgaaacacaggtgtcaggctcatttaaaaaagtgtttaaaaacacataaaaataccttttaaaacaytggtatgcattcttcattcatatagcacatggagagaaaccrtaaaggcagtcacatagtgaccagatcacacacagatcagaatggtcgtcttctaatcactatttggcatttgaacccaactgcatgcaacaaaggaaagtgtgaaaggaacaatggtgtcggcactgggctgtttgggggctgttttgttatgtacaatggactttctttgactgaaggaaacaagagatgaactttccaggttgcacggagaagattctgagtccctcagggattgattcccccagcgtgaggtgctccaaggcccaggagatcctgtgatctggggccttggtagaggccatgaggctgtaatgacctccccgctaaagggcgaacgctgtcccggacagtggaggggagagtcttgcgtcctggggaaagtggcttctcctttgttcctggaatggaaaaagtttgggaacaggcagaacccctgcagtggacacctggggttggtctaaggggacaggaaaaaaacatgagcagggccctttcctgagggcaccctgaaaaggtctaccttaaaggtacttcttgatacaagagatgccagttagaccattaaagggcttcaaggattctgacagagggctcctagacatgaaccaaagcctgtgcccctcggctttgacttcgaactctcaaatgaccagagaaatgtcaccttcatcgtagcaaactggctctttttctagggttcaggtgctgaacagaagcttacttccctctcttctccttcagtcaaacaaaggctttgggtttggaattttaatggtgaaaacaaaagggacctggcgagcctcaaaaagctccattttcctcttccgccgagatgctgaatcattgtacagagaaggagagaggagcacgttcagcagtgtgcagcccaggcatgcagctggtgaggatggcggtcacaaagtgtgctttcgtccttccagctgggcaccaagtcttgcccttggatggggctcagagccgtggagtgggcgagaagcttgattccctgtgagcatctatcagaacaataacgtgtcctggggttgcatttgcacacactgttaatgaataggggacgaacactgcaacacgagggtgcgatcagttatcagtgaaaatgtcaaataaggcctttatgtagcttttagaaaacaaaaaaaagtaccaaaaatgcatgtgttaaatgcttttagtagtaaggtaggccagatatctttttgtttatattgtgcacatctgctaggtacctaatggccatagaaagataactgctgtaagattcagtgttggtacattcacaccccattcttttttttttttttccccgtcagtcaatcttatctggtaatgggatcattactgttatccagtgtcaatggtctcagtagtatttccattcaaaaataatttagcttttagattaaggatttctctttttgttttattaaacattgaaaggtgggactttaaaaaatggtataaatctagattttaaggattcttttcttacaaactgtctcagctttttacaagaaatgtttaaataccaaaatgctgctcagaaaatttaaagtttaattgcccgtggttattctactgtttctatcccaatgtgtgctcctctgtactgcgtgtgtaagacgctcagttcatctgaatgtttggatgggaagttttgtgttgagcctccaggcatagcactggaccagcccaggccgctgtggcagaacgggaggggagaatgggagaggcagctggtttttttctgagggtggtctgggccaaacgacaggcagctggacagcaaatggtgctttggggtgtaactccgatggctggttttgttgtacccaacgccgtgggtcaacgggaccacccagcatttacatctcttctcgttcagccaagatagtgtagacacagtcttgatggtgtagacacagcatttttaaatattatttatagtcaccagctactctagtgtgttttagacctggattcaggttgtaaagacttctttgatcttcaaaatgtaaagataaaccacatggaccgaaactgagaactttacagaagtccccatttacattgtaccatcacgaacagtttgccttccaaaaatgctgctgttcagggttgtgaattcactgttaggaaagtgcattttcaactgacttctgagtcctcaactgttttcttaacatgagctttgtgttagtatcttgcagaggcacacttcgcatattaagattacaacatttaaaggtgttgaatatgtgaaattaaatgatatgaatctaatgaaaaattaagatatttactaatattagcagaaatatatattttatgggatattatttgaccttaatacattattccaatttttaaaaagcatatttaagatttaacaactgtatagcaggtggcctttaaggcataacaaaatatatacaaagaaattagggaagatattaatgtcaactatgaaataaattaacatgatttttacaaaatatactgaccattaaattaaaaaatattttaaggcaggaatcttcatttgaaattagcataatcagaaaatatatcaataaaatcttgtaccactttgtagcagaattcatactgttcctgaaaagacaaacaaggacacattaaaatgatattcccaaaaatatatttgattaatcaggagaaatactcaaaaacaagacataaataagtgtgactattcattaaaataccatatacctttatgcacatcgtaatttagtttttaggcacatgcagaattccaaataaagctgtttttctacgtagaatgtgtcagttagtgtattaacatttcaacttagtgtatttaatgggctgagttaaatgtctgtggctttcacattgaaactggaaaacaactatttttgaatttaaaaaaaaaaacaaaaaaccaggccaggtgcaatggctcaacgtctgtaataagagcactttgagaggctgaggcaggaggatcacttgagcccaggagttccagaccagcctgggcaacatggtgaaaccccatctctatcaaaaaagatacaaaaattagctgggcatagtggtgcacacccatagtcccagctacttgggaagcggagacaggaggattccttgagcccaggaggcagattgcagtgagccaagattgtgccactgcaccactgcactccagcctaggtgacagagtgagaccctgtctcaaaaaaaaaaaaaaaaaaaaaaaaaaaagagagaaagagaaaaaaatcagagtactaacattgccagataaatttcataaagcgatctataaaagttaaataaaatgcatatctagattattttaaagcctacatttactgtacaaaagggacattgttttatatataggctggtcctcccagacccctgggtgggatatgtgagtttggggccgggacaggggcttggaaagccggagaggccaagagctgtcctcagcacctccctgcttctttccaacacattgcacttgggctcttctcagcacacagtgaacaaatatctaaatgcttttgggtggaaagatgccraacagctagcttagcccttcctgagtcccggtctggccaggatgggaaggagctgagttttccagagaaggaaaaggtgagcctgaaactttgcttctgaatttgcatgaagttgttggaagagccaagaccacattgtagggtcctcacttctggctactaagacacgcagctgatcacccagccttcagaaggaaagggaattgaattcttagaaggaattctcaataaatatacaggctctctttaaagaggcaaacagcttaaagcaacattgacttttccaacttaaagcaacattgactgaatatcaaagctggctcagtctgggatggaaatggagacgatcactaattactctgttttcatagctaacacagcagctaactgctgaccatcccacgtagtctcgagtacaagtgattggggccagtgatggatgaagtgtactttggagtgtgctcggatgatacaagccacacctcaggtcacagacagacatttctggtcaatccacagactccaggagaacagatgtacttgtggcctttgaaatgtcagttccaaccaaagcctacctaggatgctggaagcaagtcttccctgagtgctcagcaattggaaactggttcttgggccactgtgctcacctgcagggctaaatcaacctgcaggtcagcaatcatctctttactcaataatatttttgtgcctgtgttttttttttgccaaaatctccctgccaaatgttagatctggcagcatacagtactagttaagcctttcccttctggaatcagatagagtttgaatctcattctgacacttaatacctgaagatctcaggcaggcccctcaaccgtcctaactggaggcacctgcagaacactccttgtgaacagaagcaggcacaagggcaagcagatggtgaagatgaaatgagaaagacatctgtaaggcacctggttgcactgcgcccaacgcctgatggttatttagtgactcttctccctcattcgtttgctgattcaccacttgctctggagccctcgccacgggccaggcattggactagaccctttactctaaaagtcaggctacaaagtgctctgtcaagctgttaccaggcaagagagcacagatgacagccacacaacatctgagggcagcttctcagtcagggagcatggaggggcaagctgcggtcaggaagagcacagctgagacgggaggacacctggatgacagatgctctcgaagatagaatatattggccagaccaggcagattaatgagagctgtgagtccctaaaaagactaggggaagctctgtatgctactgcttagagagatggtctttgctgtaggtcgttgggtgtggatggacagacccgccctcagctcaggtgtcctcgctcctgctgcgccttgctgtgagggggacgtagaagggcctccttcctgcctctctatgcacagggcgctgcgtgagccaggattgtcagcgtggagagtgagcaggcagggaggacaggtgcgaagtgggaagctttggtaaaaaggatgcattgtaacaggctttaaaattgtactcgctgggttagcagcacgagccatagtatttggtgaggaggaatcgcttctgaaaaccagaaagcaggagtccttgaaatgaaagaatgtacggggaaaactactaatacattagggattcctgcagcccgtggacggtatcttgaggctgagtgagaccccgccagggaaaacaagccacatggacgagtataacattgaaatgagaaggaccaggattttaaatttcagtgctgcttttgaacttgataagagtatgtttttcagtgcacacaggactctcgtagaatagttcactttgacacaaaagctcctatcctcagtgcgtctctccgagtggtctcagacattgaaactggcggacaggcccctcctcccgggtcttgcccagaagacacccacgtcacagacccaaggaaggagggctctgcagaggtttactgcgaaacattgcagctggctcttttccttgggaattttaccttcccacctcccccatgtacttaaggtcctttaatgaaacrtacatcaaatacaacatgaaataattctccactcttctggtaacatccttattcagattcttaccagggtttgcaccatatgtggtctctgaagtcgtaaactcttcacagcttgaaatacatctaaaagtccctcggcttttactcgctccaaaatgttgctgagggctatgaatgtacctgttcgcccagctccggcactgcagagaaaaagcgcttaatgcagatcatccgacttgcacttggggatgagaaatggagagctgacagccaacccctgcatatcagcactgaagcaacaatcgctgaaaatgatctgagtttgactgaatttttttttgatcatttgtatgtagtgtaacttatgagcaagatttagcaaatgtaaaattcctaaaacacctccctaattacaggagaccgatattttataaaatgagacaggaccagtgacaagtttttaagcaagtatcaccatttcccc

SEQ ID NO: 93539 - DNA, 18235 bp, Homo sapiens
gtcactgggtggccccttgatcatcatgagggtgtgccacagttcaaagagaaacaagagaggagaagaccccaagggagggcagttctaatatccactgactccacacccgcaccccttaattcagaaatccaacagacatgacaaattagaaactgattctgctggtatgcaattcagaaagtctacatttgaggaaagatatgaacattgactaacggcttttttatctagggatcatttcattgcttttctaaattatgtaaatatccaaacgtcaaacactataatttttttttgccttttcaactgcatttgatatcaaaatctatttccttaatacctctgggttacttgccataacttacacttgtaataagtagtagaaaaaaattaataagaaagcactgtgagtgtaagttgcttgcataaactggatacatctggagctaccaatttagagaaacttgtgaatggttccccagagcacagatgtgcagtggatggtagaggaaagaggaagaagataacagagcaggctgtattgcagcagaccttgtgaatcccaaagtgctccaatgtggaagtgagatctagaccccaggatttatgagatggatgtgtccccaggtgttgtgagagaggagccaagtcacacaggaagagttctaaatggaagggtgtctcacaggacagactcaaagaggactcagcagctgtcttcacattttacactccctttaatttgaagagtctcctctctagctccaaagacaaagtgaaagagacagattttcaatacaaagaaaaacttagaagtcagcctatcagcaagtggaaggtgttttcttacagggcagtgaattctccattgtaggtgctcaaatggagataggaaaaaaccaagagttgggacatcggaaagtcagtcttctatgagactgacttttcagtccatgagattggactgaaaattagaaaattcttcagcttccttgtatatctgagattccaatgtcctgtgaaaataagagaatttggctactttatgaaacagcaaggttaagcagcctaaaaacagtagaaaaaaacaccaacaaggtgggttattttttccttcccaaactctaagcaaggaaacctaagaggaagaactggccagcccagccataataacacctggcacctgggcagtgcttaccgtgggccaggctccggtctaaatgatcttcagacctcagctgggttgattctgaacaattctcagtagtggctcctgagcagtggagctaggacttgaaccctggaaagctgactccatagcccctgctcttaatcactccacccctgccgcagtgctgtaagaatgcagggcattcgtttcctgtggctgctggaacaatggacggcagtctcagtgtcttcaaataacataaacgtgttctctcacagttctggaggcagaaactgaaatcgaggtgttggcagggccatgctgtctacaaagtccagctgttggtaacccagacattccttggcttgtgacagcatcactccaatctctgcccccatcttcacatggccttcttccctctgtgactcttttccttttctttataaggacaccaatcaatcagatgagggtccaccctaatccagaaggacctcatcttaactggattatggctgtaacaaccctctttccaaataaggccacattcacaggtgccaggggttaggacttcaacatatctgtttgggggatgcaattcaaccccttacatactgtaccaaactggaggcacctagaagtgttgactccaattggtagcgcagtccttgaggaaaatgacgacccaagcaaatgtttccttcaatctctgctctaccccgtttcaggtgctatagaaaaattacgggagggcattgttttagagtgagctcctgcactaggtcccaacagaccaaactaaagtggagtcactcatgctaagtgccatttaaccaagctgaaactttaagaaagctggtggtccccaaatagaccagtttttcttgaaaacaagagtcacagcaacccatcagaaagagttcagtctgcctgagtcagagtaataaggaagtcccatttgctttaaccatgacgagaaaagtagtctgaattaagctgacactaaccaatcaacctttaaaataatactgtttccttgttcccaccttacaaaaccactgttctgccattccccagtgggaactctaattctattttatagaatggaggctactggattcatgaatcatgaataaaagccaatttgatctgtaaataattttgtcttttgacaccaggagaacaccacctcccccctcaccagctgtgtttatgacaatgatgccagaggtagcctcttcacatccctttatgattcattcagtatggccaatgaaaatcttttactaaaattgtgcacttgcttcaccctgggctcacacatcttactcctctgctggagggctagaacaccatcccctcaatcctggtacttttttcttccttaccactgagtcagggagctgagaggtttggaagtcagtgggaatccacacagagaaagaactggatttagattgggctgttttccctctgagctttgtcctgttggcttccctatctcctcaacaccacctgcctcccgcacccaccgacacacacatctccagaatgtaactctcctggctgacagggaagcacattatttagggccgtattatcccctctgctcaaaaacaaatgagctcaccgaagtgtacacttgcatttatctgagaccatgtttataaaattcatgaatatggaaatgggcagccatctcccagaatccctcacaccaagagaactggcactgtctgctgtaggtgaaaacctcttcccttgaaggctcaacaacttctacccagaagaagaaaagaacagcatattctttctcatacacacacacaaacacacacacacacacacacgcacacagtatataccaccagtctgtggtcttggaagcaaagtttaataattgaatagctcaagcactaaactcttacatattattaagatactatcctaatatgtctcatttgtcaaagatggaaaagttttgatatgacataagggtttcaatcccaataggaatattaatggtaacaataaaaataacatagcaacacggtttctgttgaatgcctgccacatgccagcaactgctttgataattaaagaattatatcttatgttgattataatccttataatggcttcctgggtaagaaaggtttattactgttttacatttgaggaggagactagggttcagagagggtgccgaagtgagttacacttttgccaaccaggccagaagatgaaagccgctggattgggaaatgcttttgtatcaaaagcacaaaatgaagtggctagtgttacttgttggaaaaaaattaactttggcaagcataaatataattcagtatttgagcaatacttttaggagggtaacagagtggtttatgtgaattctccaaaatgccatcatgaaaattttgatgatgaaaatcacctaaaattgctaattacctgtcttagcctgtctagggctacaaagtaccatatgctgagtggctcataaacaatagaaatttatttctcacagtggaggctggaagtcagagtgccagaatggtcgagttctggtgagggctcttccaggttgctgtcaactctttgcatccttaggtggtggcaagagggctagaaagttctttggagtctcttttattgtattttattttttggagacagtctcactccgtcccccaggctggagtgcagtggcgcgatctcagttcactgcaacctccacctcctgggttcaagcaattctcaggcctcagcctcctaagtagctgggattacaggtgcccaccacaacacctggctaatttttgtatttttagtagagacagggttttgccatgttggccaggctggtctcgaactcctgaccccaggcgatccacctgcctcggcctcccaaagtgctgggattacaggcatgagacactgcacccagcctctggagtctcttttataaggatacttactattctcatccatgaagtctccactctcatgacctaatcacctcacaaaggccccgccccttaaaaccatcacattgggcttaggatttcaacatacaaattttggggggacataaactttccatccctaacattacccaaatagtatctatatagtcatttctaaatatacacgtatttagaaatttctaaatagccagtaaacatacaactgacttggccttgatataactgttttcattttcttttattttcattctacatgacatattttgggtaattataaaataattaaaattagttgataaagtatggaattagaataaaataattttctattactatctaagccatgaaatgaattaggagatgctgttttcagtgaaacgtcttctagtttttaaagtgcattgtccaattcctttttattttgtgaagattttaaaaacttaaaaaaagtcttcaaattgtttgtgccttgcatttctttaaatcttatgtttaaacatcatgtgctgctagttgctagtcattttctctatcccctgccccagaccctctctttctcaggaaaggatatccagggatccgggtcccagttagtcaaggagatataagaggaaggctatgaggctttctgggaaacattttctttttccaagagagaagtgttcagagggaaaaggtcctttctcagtttggctccctctttgtgttttagatctggtcatgtgaggctgcctggcttggattgtgagggcatctctcgacaatgaagtgacaagcctggggaggaaaatccacaggcgagaaggtggcagaatggagagatggtccttcatgacttctttgagtcaccaggtccagatttcccgccaacctccagtcttcttgttatgtgatctgatatcattatttactgcagaggccactgagtggatgctcttacttgtgtctgaaaatccaattcactaaattaatcaaaatacggcactcttcttttgaaaccttgctccagaacaaagtggaaggtaatgatggggtgcttttcaaagttccagggaggtgtccctacacagcagacagctgtccaaaggaatgtagatgttggctgcggggagatctgagttgccagactcagtcagaacaggtgtcctctcccttattttatcttaaacatgcatgtcatttttgcatgctactctatgcggttctttcagccagggaacattgctgagcacccgctcacgtgctgtatggagcgcagactgcagggtgcgaggggcggaggtgatgtgctaggcctgaattcaagagggggcgcagccacaggccccgcgatgccggggtggcctcttgtaacgacgttttaaccgctgacctaagtggatccgctcctctcccgccgcccgctccctgcctgcagcacaggatggcggctggctttcccgagtgggcgcaggtgagccacgctttgctctcccgggtgggcgcaggtgagccattgtttgctctcccgagtgggcgcaggagagccacgctttgctctcccaggtgagccgccgctcgctgtcccggtgaggggaagtgagccacgctctatgggaatccttcgaatcttcattcaatttccatcgcctccttgtatttatttgggagtacttttaaaaatgaagcctatgcacaatgatgtaataagcgtttatagaacaccactggtcggagctagggcctaggtggcggtgcccgggcccaggtgccgcgcccacgccccgcgcgccgaacgcacgcacgcacgcactcacgcactcacgcacgcacgtacggcgcgagtccgagggcgacagcagcgcgcaggcgcacgtcagtccccgcgcttttcggaggytgccagcgtcccacaccagccgcaggtaggatgcggtgacgggaggcggggcaggggcgctgctgacccctgtggagcatcagggttgggkcgtaggggagaggcgggcgtgtgcctctggaatgctgggggtcgcggggcggtgacttcgcgggaggccgtgggaggcgggagccaggcagtggctgtgcccttttgcttctgtcttagcgggagggtggctgacccgctagcccagaaccagactcatccaggattaggaagctggggcccggcgtggacggcaggctcggggccaggtctgcgggcggcttcctttggcagagcctgtccgggggcggggccgcttaccgcaggcatttactgggcccagcggggctctgggcgcccacagcgggggtcagtcagttcccctgtgacccaggcaagctcttaatctctgtgatgagaaagaagggctcatacctttcaggggtcatcgtgaggaatcagaagaagcagtattttatagagtattttctaagtgctgagtcctctgtctagtgctttgcagaattaaaataccttgtcagctcagtgatgttgctgcgcttcttttataggtgaaaaccggcagaaagacattaagagattttcctgcagtcactgctggcagatgatagagccaggatttgaaagcaggcagcctggctccagaccctgtgctcttaactcccgttttgcatcaagaacagaatcctatgaaaggcttgyacagtgcttggtactgagtaggcactccgtcagtattttagtagctattattccaaaggacactgtattctaggtactaagacaatgtgaatggaatggaaaacaattcctccctgcagaagccaactgtctaggaagacagataatgacattattaaaataatcagaacattggcaaaataaagaagattgaaatgcagttcatatgacagtgctarttaatcatactttttagatctaggaaaggccataaaggttaaattgacttggaaatggtaaacaagacaatggttgtgtcactgatcggtgatggccagtttttggttatccttatttgccatttaaatgattgaattgaaaggaagaagtaagacttggaagatgaatattgaaggaaaggtgaagatggaaaagagaagggggtttattctgagaacagtgactagaactctgaggtatggtagaaatttcaggataacagatgataaaggggaatgaagccatggagaggaagagaatgataatattaattgtgaaagtttgtgtcaagtgttttctgagtcacctttctttcagtttctcatttctagtattgtataaatgagtttaacatcaaaatggtatagtgaaaaaaaggatgaactgcttgacagaagaggtcagatctagttttgactctagcttatttagctttacagctttaaataaattacagtgtctttaaagctctggatcttaagttttctaattgttttttaaacaaagatttgtgaacacctacttacaatgtgacaaatgtctttgtaaggcattatgggagataaaagctgcattaaacctggctgttgtacttacaagtaatttggaaggcaaaatttcaaatacttgaacctaaagtagggtttcttggttttcatttaattgaaatactgttaggaaacaaaaatttttcataaatttttcttgtggatatgtaagtaaattctatatatctagcaatatgatacatctatagttctgtttaaaggtaacaatgtgaggaagcttatgcgaataacttgacagaagaaatctaaagtaaaagcattttcctagtaggctagcttgttctcttatttcatttattgtaacagtttcactttttaataattatgtgaaattaggaaacagatattctagggcattctgtttagggtgatgaacttattcatgaatgttattaaaaccatttaaatatgccatagtttaaatttgtgatccatgctgttcaatctgtgacctaggatagcagcatcaaggagcattgtgtacatgcagaagtgcacagtacctggagtgaaactgcttgtgttcgatttctgataccattcataactggctgtgtgatctcaagtaagttctttaagtctctcagcctcggtttgtacatttgtgtgataaggataatgatagttttcagattattttcatagtcattgcktgatttgattcttccaatggttcctctcactttgcagataagaaaactgaagaaccagctgggcgcggtagctcacgcctgtaatcccagcactttgggaggctgaggcgggtggattacctgaggtcaggagttcaagaccagcctgactaacatggcgaaaycccatctctactaaaaatataaaaattatccaggggtggtggcaggtgcctgtaatcccagctacttggraagctggggcaggagaagcacttgaacccgcgaggtggaggttgcagtgagctgagagcgccactgccctccagcagcctgggtgacagagcgagacactgtctcaaaaaaaaataataataaaataaaaataaaccatcagtgatagtaaaaagctcacttaagctcattcacctagttttatagatcagacttaaacctcttgtttattttgttttgctttatgtatctatagttccattgtttttaaaatttaaaattaattttaaaccttatgaatgctttccctacagataaaattatgtaactagaacaatttaactcatataaattattatttaatcaagtccttaattttgaagacttcatattgatatgtcttgaatacttgaaatctatagttaactagatatttctcttataacctgtccttataaatctacattataaataaaaagtccagtgtcccttccttcagattagcagaagtttcaaaattacatttaaagtattttctttgttttccttcatactgattttcatttttattgtttgttatagaacctctaaaatgcagacctccagctctagatctgtgcacctgagtgaatggcagaagaattacttcgcaattacatctggcatatgtaccggaccgaaggcagatgcataccgtgcacagatattacgcattcagtatgcatgggcaaactctgagatttcmcaggtctgtgctaccaaactgttcaaaaaatatgcagagaaatattctgcaattattgattctgacaatgttgaatctgggttgaataattatgcagaaaacattttaactttggcaggatctcaacaaacagatagtgacaagtggcagtctggattgtcaataaataatgttttcaaaatgagtagtgtacagaagatgatgcaagctggcaaaaaattcaaagactctctgttggaacctgctcttgcatcartggtaatccataaggaggccactgtctttgatcttcctaaatttagtgtttgtggtagttctcaagagagtgactcattacctaactcagctcatgatcgagaccggacccaagacttcccggagagcaatcgtttgaaactccttcagaatgcccagccacctatggtgactaacactgctaggacttgtcctacattctcagcacctgtaggtgagtcagctactgcaaaattcyatgtcacaccattgtttggaaatgtcaaaaaggaaaatcacagctctgcaaaagaaaacataggacttaatgtgttcttatctaaccagtcttgttttcctgctgcctgtgaaaatccacagaggaagtctttttatggttctggcaccattgatgcactttccaatccaatactgaataaggcttgtagtaaaacagaagataatggcccaaaggaggatagcagcctgcctacatttaaaactgcaaaagaacaattatgggtagatcagcaaaaaaagtaccaccaacctcagcgtgcatcagggtcttcatatggtggtgtaaaaaagtctctaggagctagtagatcccgagggatacttggaaagtttgttcctcctatacccaagcaagatgggggagagcagaatggaggaatgcaatgtaagccttatggggcaggacctacagaaccagcacatccagttgatgagcgtctgaagaacttggagccaaagatgattgaacttattatgaatgagattatggatcatggacctccagtaaattgggaagatattgcaggagtagaatttgctaaagccaccataaaggaaatagttgtgtggcccatgttgaggccagacatctttactggtttaaggggaccccctaaaggaattttgctctttggtcctcctgggactggtaaaactctaattggcaagtgcattgctagtcagtctggggcaacattctttagcatctctgcttcatccttaacttctaaatgggtaggtgagggggagaaaatggtccgtgcattgtttgcygttgcaaggtgtcagcaaccagctgtgatatttattgacgaaattgattccttgttatctcaacggggagatggtgagcatgaatcttctagaaggataaaaacagaatttttagttcaattagatggagcaacaacatcttctgaagatcgtatcctagtggtgggagcaacaaatcggccacaagaaattgatgaggctgcccggagaagattggtgaaaaggctttatattcccctcccagaagcttcagccaggaaacagatagtaattaatctaatgtccaaagagcagtgttgcctcagtgaagaagaaattgaacagattgtacagcagtctgatgcgttttcaggagcagacatgacacagctttgcagggaggcttctcttggtcctattcgcagtttacaaactgctgacattgctaccataacaccggatcaagttcgacccatagcttacattgattttgaaaatgcttttagaactgtgcgacctagtgtttctccaaaagatttagagctttatgaaaactggaacaaaacttttggttgtggaaagtaagtgggatacttggaatcaaggcatctctgtaktacagtcttctttattttttagcatagaaagttggggatgtgttaattgtatttttaagaatatattctaarttctgtacttcaaataatagcacagattttacatctgattgacatagtgtatgttaatgtaagttttgctttccagtgattacctgatacgtaagcctatttgaacaaagtgagaatgaacttttgtttctaagaagtctttatcttgaagctatataacatgaaaagtgagctcaaattttttttagttgaagattacatataaagttgtgtctgattaatattcatcttttattgaagaaagtgccttctgatggccacataattcttaatgtcagctagtataatggtttacatttggacaaagtattgcttagtgttatttaagtagatttaagatctyaaagctaaagtgccaatttttactttcttcagccaatttgttacctcttttatggtttttaatttttatcaggactaacattttcagaaatagcaaggtgtgatctagtattagattcacagaactgaaaggttaattaagaatgttggttattttcacgggagcgtgtgatatttaacattaatattttatttgacactacagcctgtaatactgctctctttcaaaarcaagttttcagatttttataacagacccattttgttttatgaaacatgttcattacagaaacatgagaaaatagagataagtaaaaagaataaaagtcactattatcctaccactttgcgggacacactattaatatttaagcatagattcttccagatgttttgttttatacagcrgtaggattgtgtaatgtattctctcttgtagcctattcttcaaagcgtatcttmactttccatgttaacataaatgtccttttatgattgtctaggattccatggatggatggaatataattgagtcatctggtagagcgcatataggacaggacgctaggttgtttatcttttgtttattgtaaaggaactatgtgggatgcatttggtgatctttttaaaaaatgtataaatttcttgagtaattcctggattaaagaatatgcactttttaaagcttttggcttgcattctaaattgtcctcttgaaaaagtagttcctgtgtaaaactccatctgcactgaatcagagctatggcagcattgggcagtaggcagttttggtatttgttggcattctttttgcatttattcaaaaaactgaaggtagtgaacgtagagcaatgaacaacacaaatatccttggtctcgtggaggttatatttaagttctaatgttttctcttgtgaacagtgcaatttgaaatgacaaattgaaacacttttagttgttgaatttagacagtttgtgtatatagtttaaatttttattcttggtttgccttctgtttttatgttaaaagattgttgcaatttttagtttttccctttgtaatatgtgattgtctttcattagaattcattttttgttttgttttggttattttgaaacagtctcgctgtgttgcctaggctggagtgcagtggtgtgatctcagctcactgcaacctctgcctcctgggttccagtgattcttgtgcctcagtctcccttgtagctgagaccacaggtttgcaccaccacacccagctaatttttgtatttttaatcgagatggggtttcaccatgttgcccaggctgctctcgaactcctggcctcaaacgatccacccacctcagcctcctgaagtgttgggattacaggcatgagccaccacgcctggccttttttattagaatttggacgttaaacttcttgtcttcagttcttagttatatcttttaacatcctaaaacattccacaatattcattactgtctttatccctttctatttctatataaacagcactataaacttggtttctttggtattgatgtcaaggaattctctagtttttctttcttggtgtttaattgcagatcactcccaccttcttgggtctagctatttagatttatcagcatttgccctctagctgttaatgttttatttagctctgaaatttggtcttaatatttattatcagtttttttcagttacagcttctgccagccctgactttaagctcccttgatcaccagccacagggccacttctttctatggagtttagaaattgtgacaaggagagaaagtctagttggtttagctcatcttggattaagcagagcccatgtctctcttgttagctcaagaaatggtctttcctgaattaaggtctactctgttaaataagaatctaaacctgaaaggaatagtcaggatattttaaagctggaaagaaaatttgagctggggagtcaactgttgtttctacgttataccacagagaagctttctttgtctcaacactttgtgattttgagtgtttctgaagcagttggataggaagcttactgaaactttaagattgcttactctcgccacatgcgattgtcttcatcgaatataataatcttggattaaattatctcaagtgtggcactgccctgtctttagctattgtttcagaaacatgaatgctagcctgatatttaatgtcttcaaaaattacattcccttagtagaaatacatattttactaaacatgtcacttggttatggtattaatgcttaacaattttgatatgaatatggtaattctaatttatgatttcaggccttcttaaatctttattatacatctaataataatatatgatccttttgatatgtattcattctgtggtaaatttctaattttctgaaattgtaactcattttctcagttctaaaatatctctcaggtgtgcctttcatattgacaagctggtcttaatggaatcatagtctaaagatcatgggctgtggagccaaatagacctgttgaattctggctctgtcatttactggtgactgttggttacttaattattcaatctcaattctaaagtgagaatagtttatacctgtcttgttggagagtgaggattaaatagtaaaatacagatttaaaaggcctggttcatgttttatgattgtgcctcttctttgaatctgccttgattttgctcttgttgctgtgaaggatcttttcagctattttgtgtggttgtcctagctcattctgcttagtgtttgtggtatttgcatcatattattagagatcatatgccatctatctttagttttgtggaaaaattctaattccaaagaaatatctcttagttatgtttctccttttctacactttagaacttttttaaaggtctgtcccagattattatttttctctactcatgcttatatgttatttattggtctccatttttactctcccagtgtttttttaagggacactttacagcccacctttagggatctgattaaaagaaaggattctatcaaggtccatggcaaaaggacaggttggataaagataacatctttttacttccttcttatattcctagttcttgaccttagttggggagctggtggtgagggagcacattttaaacagtttaagcaggtgaggccatcttgaaggtttgccccagcagcctgggtgaatggagggagtcttgggagartagataagatgcagtcaccacttttaactcttgcccttaaaaaatacttttacaacacggcttataatggaaagagcattaaaatggacattagaaaactgccagtgattctaaccttagagagtttgtacagactccgtaagatttgtttttttagtgataaagggaaattgtactggtcattccttaataacacatccagatttctgttatcacttaccaaaaatttatgaatttgagaattgcttacacagtatcaggtgctgggtactgggaggtacaaaacaaagtatagtcaggtaagggctaactttattactaatttggctcattataaaaacaacgggaaaacatgaagagagggctttattaaggagttaagtcagcataatggaccacttaatatataataaccacttaagagaaaaagaaaaattaggaagtccacataaggtggcgttttataaaggcaacatgctgttgttaagggcacttgggccattggtgttttgtgacagctgggctcaggcatctcaacaagcagcggtgtgcctgctgaccaacagggcctgccacggccagtgaaacacagctattagagctctctcaatccatttctgctcagaaatgtagagatggcaggggaaacgtagctaagtcccaggttcctcggatatggcgagggcaagcactcccatattataacaacctgtgcagtcagtgagtccagagcagaggccttgtctcctcctttgctcaccttcactcactgccctggactgtcaggccccagttctcatccccatgtgtgatgaagccatgcagtcccagagagggagccatcagcgcttggtagtctcatgctttagtgtcagagttgcaccttacctttgtatccaagaaatgcatgcagctcaactttcccttaaaaggcttctaggaaaaaactaccccagcattttttttcccccagaagaatatattagcttaataataaaaggtatagtaacaaactttccatttaaaatagtggcctaagccacaaatttacctttcctgcccgtatgtgcaaaattttcattgaaatgaaaaaatacacactaagaatcaatccagtgtgatgttggaaaagagagaaggttaccattttcaaatatgacaggtgtttctggaggtcacaaggcaaatggtactgggttgttggaatccctgagctaaataatggctgtgaaaatgccagatgagattggttatctcagcagtgcctgggctgtacccctagcttaggcagcaaaataggctgtgggccagtggtctggtatctgaaaggattgccaagacaagccttgcggagctcatgcccaactgttcttgtggagccactgggaagtggagttccctaaatcagagggagtcatttacagtcgcctggcttttgtgggccctgcagcctgagaagtgagtcaggatggcaggtacttggttgccacgttagacagaagcacaagtatttgatgaagcagtggaacttcttgatgtaactcactcctgtctcggtaactttttacctacttccacatttttttaagggtcgacccccacttcctacagtttctctatatccttgccactgacacatgcaggcttacgccaagacatagaggaggtcttgctcacgccacagttaacacatctctatccatggctgggcaatatgaaagacaattgctaaggaagctttctcctgtcagcatactgatcacttttaaagtataacttaacattacttccccttgtaaaaatcctccaatagattcccatctaaatgaaaataaaatccaaattccttcctagagccaaatatcatttctcttcactctcctttcttactttccttcatcccactggatcttaaggtgcaacaaacatgtttctcatataggaagtgtggtaggcagaattctgaagatgttcctccaagagacccatcccctgcttattcagtcaaatctaggtactgctgggaagggactttgcagaggtaatgcggttacagacctgcagatagggaggttatcttgaattatttgtgtagggccaatctaatttcacaagtccttaaaagcagagaatgttctctggctggttagagaagaggagggctaaagaggcagaagaaagatgtggcagagaggatgtccaagattccgagcatgagaaggattttctctgaagttgcagctctgtgaatcaggagcccatgcacgaaggctggagagaagtctctaggagctgacaggagcctccagacaatagccaacaaaaaccagaggtgtcagtcctagaactgcatagaagggaattctgccagcaacctaaataagccaggaagcctcacccagaggttccagatgagaatccaggccggctgacaccttgatttcagtcttatgggacccagagcagagaaactggtagagactcctatacttctgatgtacagaactgtggggtcataactgtgtgtggttctaagctgctaagtttatggtagtttgttacagcagcaatgtggggtagggaacattacactgttctttgagtgtggaaagctcttccttacagctgctgcttcaagttagtaaaatataatttctccagcaagacctcctttgaccactggggagatagcctccactaacttccaacacgtgcatgccatcactatcatattatcctacattttttattggtaactgttactaactgaaaatacttatgcttactgtctttgtctctaatcctatttcacacccattagaaagttctttacagctagggactttatgtgcacttcacaaccatgcaagattcatgagacttctgaaaaacccaacatcatgagaggcacccagagaagaagcagagtgattcccatcaaagaaaaccattgattcaggagactgagtagagctttagaaagtctcgatcccagaagacatggtagccaccaaattaaaataggcagctattgtattagtatattgttacataacaatatcaccacaaacttagtgactttaaacaacacacattaatgaccttgtagtttctttcaggcttagctgggtcctctgcttcagggacccacagggctgcaatgaaggtgttggtcaggactgtggtctcatctgaggcttgttggggaaggatccacttctcagctcacatggtggttgggcaacattcagtttcttacagatggctggacagagggcctcagttcttgccatctgttggctggaggttgccctcagttccttgccatgtaggcattccagtgtggctgcttgcttcctcaaagccggcaggggagagagcctttccagtagcacagatgttactatcttctgtaatgtaatcacacaggcaacactttg

SEQ ID NO: 93540 - DNA, 29953 bp, Homo sapiens
gagctacatgatttttccaatttatactgacagaaatctgggaaatatttgtggggagggattttaagggtgtgggacaatggtggaaggaacttagtgtttgatcaggctgaatttattgaaatgggaccacaaagaagagattctggacttaatatgtggattagggagttagaaagagctcttacagtttatttggttggttgtattaaatggaccaaaaggtggcccagtctaaatgaagataaaatgccagaactgcctcgatatactatatactgtgatccaaaggattagggagattggaatattagattaggtttatcatttaagacctgccaacccaccccaggaggtccagaggatgtacttttctcataactgtgagaaatatatttgtgaggcgagtcccagaatccttgaagaatactgtgattgttcttctctgtagttcagatattgcagtggaaattgctgccactgagttgggaaacctgaatgcagtgggtataattggatcccagagagataagggccaggtggtggcacttgatagccaaaggcaaggtgagcatggtatggtaatagcagagtcaaagcagcaatcagaacagtctgacctgtagagacctgtggtgttgattagttgatcatggtgttcctagaagtgaactagatgggacgtctactgaattcttccttgataggtgtaagcagaagagttctaggtcaagtgagcaaaattctaacctgaaccataggaacagagaatcacaaccagtcaataacttcccagacttgagccagtttacacacagagaacaccttgaatgaaagggaggaccctggcacactgctaaaaatgtatactgttaatctttcagccttctccaaagggatctatagccttttgccagggtgactgtacatttggaaaaagaaaatagtcagaactttcagaaactactggacactggctctgaactgacaccaattccaggagacccaaaacatcactgtggtctacaaatcaaagcaggggcttatggaggtcagatagtcaatggagctttagttcaagttcatttcacagtggactcagtaggtccctaaaaccatcttgtgattattttccaagccctggaatgaataattggaataaacatactcagaaactggtagaatccccacattgcttctctgacctgtggagtgaggaatattatggcaggaaagggccagtggaagccagtagaactgattctacctaggaaaatagtaaaaaagcaaaagcaatactacattcctgaagagattgctgatattaatgcctccatcaaggactttaaggatgaagtgatgttgatatctatcacatcccattcaactcacctatttgacctacacaaaaaagagatggaatttggagaatgacagtggattattgtaagcttcctcagatggtgactctagttgcagctgctataccagatatagtttcattgccttagaaaatcagcacatctcttcatacctgctatgtagctattgatctgggaaatgcttttttctctatacctattaatcaagaacaccaaaagtagtttactttcagctggcagggccaacaatacaccctcactgtcctacctcaggggtgtattaactcttcagccctatgttgtaatttagttctcagggatctcaatcacctttcccttccacaggatattacagaggtttattacattgatgacattgtgctgattggatctagtgaacaagaagtagcaaatgctttagtcttatttgtctgtcagagggtaggagatatatccaacaaaaattcagtggccttctacttcagtgaaatttctagaggtccagtgttgtgggacatgtggagataatcataaggtgaaggataaattgtatctggctcttcctacaagcaaaaaagaggcacaatggctagtgaaccagggcgttttggaggaaacattccttattttgatgtgctactctggtccatttactaagtgatgtgaaaagctgctagttttgagtggggcccaaaacaagagaaggctctgaaacaggatcagtctgccatgcaagcctctctgccacgtgggctgtatgatctagcagatccagtggtgcttgaagtgtcattggcagataaggrtgctgtttggacctttggcagacccctttagatgaatcacagtgcaggcacgtaggattttagagcaaattcctgccaccctctctggactctctttttgagaaacagcttttggcctgctactgggccttggtagagactgcttcatagagaactaagtagagaatgcttaactatgggccaccaagccataaagttgggcatacacagcagcactccaccatcaaatgaaagtggtagatacaacattgggcttgagcagatcctgaaggcacaaataagttacacgaagaagctgcccaaatgctcactgttcccacccctgctacattacctgctctcttcagccagcacctgttgtctcatgaggagttgcctatgatcagctgacagaagaagagaagacttggacctggtctacagaaggttctgcgtgatataaaggtaccagccagaagaggacagctatagcactacagccccttttttgagacatctctgaaggacagtggtgaagagaaataactcccagtgggcagaacattgggtagtgcacttggtgctttttgtttttttgttttttgcttggagaaatggccagacgtataaatgtgtactgattcatgggctatgtttaatggcttagctggatggtcagggaatttgaaggaacatggttggaaaaattggtgacaataaggtctggggaagaggcacgtgaatagatcttgctagataggcacaaacacaaagatatttgtatcccatgtgaatgctcaccaaaggttgatctcagcaggggcagactttaataatcaagtgaatagagtgacatgctctatgaatatcagctagactatacccccagtcacccctgtcattgtgtcattgcccataggtctcatgaacaaagtggccataatggcagggatggaggttatgtatgagctcagcaacatggacttccactcaccaaggctgacctggctacagctgctactgagtgtccaatctgccagcaacagagaccaacactgagtacctgatgggcactattccatgggatgatcagccagctagctgatggcaggttgattacactgggaccacttccataatgcatggagcagtgcttttttcttactagaatagacagtaactctgggtatggatttgccttccctgcacacagtgctcccaccaatttaccatctgtggacctacagaatgccttatccaccatcatggtattccatacagcattgctgtaatcaaagaactcactttgtggcaaataccttgtggcaatggcctcattgccactatgttaccatattccttatcctctcaaagcggctggcttgacagaatggatgaatggccttttgaagactcaattacagtgaaagctaggtggcagtaccttgcagggctggggtaatgttcttcaggagattatacatgccccatgtcagcatccaatatatgatgctgtttctaccatagccaagattcaagaatcaaggggtggaaatgggagtggcaccagttgccattacccctagtcatccattagcataatttttgcttcctgttcctgttcctgtggccttatgctctgctggtctaggggtcttagtggctctcttcattaatgttgtctgacacttaggcctttctgtctgcaaacttgagtcttccttgatggacaacagagcatggaattatttttggaccagagtctagatttacctagtctgtggagtctagaagattgctgcataatatggaacaagttactttgtacagattctttatttgaaaagtatgaatataatagcacctccctcaaaggtttgttttggagttgacaaggtgatacatgtagcgtatcatgctgcttgaacctggtatgcatgtttcactgcattctgttagtactcctgcttctgtttagggagctttcctatgatcacttgaattatttcttttctgcagtgaattccacagtttgcttctgaaattcgttttttacattccccttgtatgcgctgtgtcttttaccattttaatcattattgtaggttttttwaatcttttttttctgagttctgggaaaattttttaagctgattttctaaacataaatttgtttttctgttcaattcctgctttaggagtttgagttgaatgattgtgacttttatatgaaatcaagcttttattattttagattatttaattttcacatatttaatctcatttcaaaatttaaaaaatgctttttttactatgaagtaatttatatggtttagatactgtaataactactgctaacattgtgatgaacacttgccaggcttattattattatatgacatatatcatcatatatctacataaatatgatgaaagatctccctacaaagccattgttatcacctttataatttagtaatataacatatttgttagtaaacataggtataaagtattgttttaaataattaatgctctcttgaattttatttaatatacaaataggagtttttaaggtgttatcatcttttatagaaaggagaatatttgttgtgattttttagaatggtctccctttttgaaataccgggtatctttatatatctagcttttttttttttttttttttttttgagatggagtctcactcattctgtcacccaggctgaagtacagtggcacggtctcagatcactgcagcctccgcctccctggttcaagcgattctcctgcctcagtctcctgagtaactgggattatagatgtgagccaccgcacctggctgtttttttctgttcattcatatttacaagggaaagtttctgtgtgctatgttaaaatttgagaagagttctgccagatattatataaatgcctgttcaggtcttgtcagcatatttactagataagtggtccatgtgattctgagtagtaaggagaggttattggtgagagagctgcatggcagagaagggcctcctttgctgtgtgtgtttctgctctcagtgtggggatggtggtggaaccagagcttcagatgtctgtatcaggtgaagaaggaactcctggagcagtgaaggttagtaggccaaatagctggttttccctctcgtatttgttataacagtccatgttagatgagtcccatattacttggagcaattccccttggtagcatccttttgccacaatatctttgctttgaataacatgtcctatcaccagatgaaggctgagaatggacataaaatatggctgtctagtttggggacagtggtggaattccattaatcctagaatttgtctgcagtcaactatcagattttttttttcccctggcccctgctgctctgggtttgcaggtttcagatttgcaggataatatcactcatttactcccacaaagagtttctcctctgttgtgttcagttgcaaactataggatacttcccttgacttaaccttgcccatgccacttctagcagaaatttccaaaagtacctggatgctaatgatatcattctgcatttattaaaaactgatttgaaaaataaacatcccataattgtatatttcttaggtcatgccaatagttttcagggaggaaataatttaaactcatggactcaaccattttgaaaagaaactcctaggccatcttctctattggtcaaagagatatatggatttacatgtgtgaaatcctttcgtgaagtctgggtgtgatgtatctcccacctttatctaccagatgtttctgtttctgtaatagatgattcaacacgcgttcctcttggaaaaagcaaggactacatcaatgctagttatattagaatagtcaattgtggagaagagtatttttatrtcgctactcaaggaccactgctgagcaccatagatgacttttggcaaatggtgttggaaaataattcraatgttattgccatgataaccagagagatagaaggtggaattatcaaatgctaccattactggcccatttctctgaagaagccattggaattgaaacacttccgtgtattcctggagaactaccagatacttcaatatttcatcattcgaatgtttcaagttrtggagaagtccgtaagtttttaaacatcagtattagatatatgtttcaccacataagcagatgtcttagaactagaagttaggagtaggatggaaaatcgatcratgatacttcttaagtaactttttacttgtccctggtrccagaagccaccaccacttctacttctcctcaaccagattctgtggagaagaaaaaattggaaaagagaggtggggcagggagagtgactgttgaagttgtctgattctgggttatacctgcctctgccaaatgtagcagatacgtattgagtccttaaagtatgctaatcactgggccagrcactatcagtacttaccgaatagtggagaggttggttacactcactgatagatacctaacttaccgtgttcagtgataatgttgagatatgtcttgggcactttggggctcagaaggtaaacacttggctttacttggggttttgagacaggtttactggaggaggtggcatttgttttgagaattatgcaaatgaaaaagatggagggagaaagtagatgatcaaaatataraatagcataaggtgtgtgtagagacaaatataagtagttaagtgtttctgaaatgtaaaagttcagtgccagggagtaataaaagatgagatgakgttctcaaaagtaagcaggggccagctagaatgtgaaatgtcttaaatttcagctaagtagcatgaactttattatgaagataattgggagacattgaagaattttagtaagtgacatgatcaactacggctgttggcatgggggtggaaagcacagacgcaagtgttttgcagataaaattgggagacataygtgacttatgacttatgatttataagtgacagaggaggggttgaaaatatattcaatacagtaaccacatgtggatatttaagtttaaatttaagttatttaaatttatgtaaaataacaaattgagttcctcacctgcaagtagccacattttagggcttatgagtggcatgttgatagtggytaytatattgccactatttaagacatttgcttcagtataggaagttctgttgagaagcattggtctagaataattcatggattccttggtctaatagacttagaaaacagaaaaggaatggtttataggagaaagcaatgagttagattgctctagtggattcagttggcaggtaggtgatacatgtgttaacacgagtgaagggaataggagttgaacaggaaacttgcagagaatggtgagttttggagtcatcaccaaagaagttgattggagcacaatcaccaggaaaagggttgctgagtgatgctgaggtttgacccatacatttgtagtagcaacaaaatatgtgattatgtgtatttttctagcagtataacattgagatccctgaatacaggttatgggactgatccagagagagagattaattttaaggagttggttcaagtgattgtggagggttggcaaatctgcagggtgggaaagtaggctgaagacccagggaagaattggagtttgagtccaaaagcaatctgctggtagaattccttcttgctcatgggaggtcagtttttgttctcttaaggccttcagctgattagatgaagccaacccactttatggagaataacctgctttactcaaattctaccaatttaaatgttaatctcacctaaaaaataccttyacagaggcacaaaataatatttggcctagtatctggataccagggctcagccaagttgacasataaaattaactatcacaaatttcagtcgacactgtggattagaatagagctctgagcactagcatctttattcagraagcttaggaaaaagaggtgcattcgggagaagcataggagaagtgagaaactcattttgagttcttccattagggtcccatgtgtgataaaataagggccccacactgaggaaagggtcatgatccctttggatgagatataggtaaattcaaagtgctttatctgacaatgctgggaagagtttcatgactccacttcaagggggctcagcacaatagtgggacccacaatctactctcatggtcattgactaccctgtcttcatcgctggaagagatcggtgcctctcttgtcagacacctatatgtcttaattaaatttcatatgtcatttctaaactaagatactttgccttttggtcttattcctaacatgacagtccatctctcactctaagcattttgaaatcttggttttcctgtagcctcatggtacagaagaatgatggtagattagaattcaagacacctacattacagttccagctctaaacgtgtgaaccttctgacctagcatacatctctcgtccccctcatccttaaattttcatctgtaaaatggagataaaatggtgcctatctcacatggttgatgtgaagattaaaggagagaattcatgtgaagcccctagcatagtaactgccacatagcaagtgcttaatttttgttrcctgttaatactggtatttttattgttgttactgtgctctcctttgtaaaatggagaaaacctctattcctagcaacttccagaattcttataaacatcaaaaagaggtttgagtactttttgaaagttctatataataccaaggtaataccatatagccattattattatcatttgaatattagaagttggcgtgaggtctctaatataagaaatcaataaatgtctttctcgctctgtttctttctctaacagacgggaactagtcactctgtaaaacagttgcagttcaccaagtggccagaccatggcactcctgcctcagcagatagcttcataaaatatattcgttatgcaaggaagagccaccttacaggacccatggttgttcactgcagtgccggcataggccggacaggggtgttcctatgtgtggatgtcgtgttctgtgccatcgtaaagaactgttcagtaagtgtgtgaatcaagcagatacactgatgctgttggtgtttacacactacatttaatagcctgatcatttggaagactaatatttggtcttcaaaagcaacttagtaaatcaaaagcacatgagctttggatacctgattctcaccgaacttgctgcaggttcctgggggtgtttgtgaggattaaagtatgtattgtaaataatggcttaggacagtgtctggaacataatagatacacagaaaatgtgagttccatttccttttccttccctgtatcttacacggggtgtttagactcttactagagaatgttgatggaatgtgcctgtttttaatgaatataagtgacaagcacataagaatgtgagaaaaaatgtagacttctgagttaatgaggggtccctgtttgactgcctgttttgccacatactttagattttggtgactttgggtaaattgctcatcctctctcaaatctagttttctcatttgcaaaataaacataataatataattgagtttgagtcaataattcacaatcctttacttttgtttttaatttggaaccagctaagagatagacacaggaatcagatgtgatgattacaatatttcctttatgattatttttattctcaagttttatctgttaaaatgattccatctatgttgtttttccttttatttttagttgacatgtaataattgtacatatttgtggggtacagagagtgrtatttagatatatgtatacaatgtgtagtgatcagatcaaggtagttaacatatgcatcacctcaaacatttgtcatttctttgtgttgtgaacatcaaaaatcttctttcctagctctttaaatatatacaataaattataattaaccatatttgccctacagtgatgcagaacaccagagctcattcctcctatctagcttaattttgtatttgttagccaacctttccttatcatctttaatacccacagttctactcttgacttccatgagtttgattttttagctctcatatataaatgagaacatgcagtatttatctttctgtgcctgccttgttttgcttaatgcaatgttctccagacttgtccatattgctgtgaatgacaggatgtcactctttttttatggctgcatagtattccattttccaattcattagcataggattatttccatttgtttctgtcctcttcgtttctttcatcagtgttttatagttttcctcatagaagtcttttacttttttggttaaatttatcctaggtgttttttttttttaatrgctattgtaaataagatcaccttctttatttcctttcagctagtttgttattggmgtctagaaatatcactgatttttgtatgtcgactttgtatcctgcaactgtactgaattagtttattagttcttagagtgttttggtagagtcattagttttgggggatatatatatatatacatatatatatgaatatatgaatatatagtcatgttacwtgcaaagaaggacaatttaatttcctttttttccaatttggatgccccttatttctttctcttgactaattgcaatggctaggacatccaacattatactgaataagagtggtaaaagtgggcattcttgacctgttttccagttcttagaagaaaggctttgagcttttccccattcagtatgatcttagctgtgtgtttgtcatatatcgtctttattgtgtttagatmtgttccttctatgcctcatttgtttagagtttttttttttatcatgaaagcatgttgaattttatcaaatgcttcttccacatctattaagattctcatatggtttttgtcattcattctgttgatatatcacatttattgatttgcatatgtcaaattatacttgcattctggggataaatcccacttggtcatagtgcattatctttttgatgtgttgttacatttgttttgctagtattttgttgaggatttttttttttttttgcctctatgttcatcrgggatattggcttgaacttttttttcattgtgtctctgtcagattttggtatcaagttgataatggcttcatagaatgagttagagaggagtccctcctccttgaattttttggaatggtttcagtaggattggtagcagttcttctttgtacatgtggtagactttagctgtgaatccgtctggtccagggctttttttggttggtaggatttttattactgattcacttttggaattcattattggtctgttcaggttttcttgaacaggaatttcttcctggttgaatcttgggagttttcaggaatttactcatttcctctagattttctatttttcgtgtgcatagatatttataataatctctgaagatcttttatatttctgtgggattagttgtaatgtcatctttgtcatttctgattgggcttagattttcctttttttgttgtttagctagcagtctatcaattttgtttattctttcaaaaaacagaccaggcrcggtggctcatgcctgtgatcccagcactttgggaggccgaggcgggtggatcacctgaggtcaggagttcgagaccagcctgatcaatatggcgaaaccccgtctctactaaaaatacaaaaattagccaggtgtgatggcatgcacctgcagtcccagctacttgggaagctgagacaggagaattgcttgaacccaagaggcagaggttgcagtgagctgagattgtgtcactgcactccagcctgggagacagagcgagactccatctcaaaaaaaaaaattgtttgttgatctttcgtatgcatttttccatcttaatttcattcagttctgctctgattttggttatttgttttcttctgctagtttgggattgattcgttctttttttctagtttctctaggtgagacatcaggttgttcatttaagatcttcctaacttctttgatgtaggcatttagcactataaactatactcttagcactgctttagctgcatcscaaagattttgatttgttttgtctctgttttcattaatttcaaagaatttttttgatttctgaattcatttgtttacccaaaagtcatttaggagcaagttgtttaatttccaagtaattgtgtagttttgggagatcttcttggtagtaatttctgtttttattgtactgtggtctgagagtatgcttgagatgatttcagtgtttttaatctttttcagatttgctttatggctgagcatatagtcgatcttagagtatattccatgtgcagataagaagactgtatatcctatggttttggagtggactagtctgtagatatttattgagtccaattggtcaagtgttgaatttaagaccagaatttctttattaatttttcgctttgatgatctctctaatcctgccagttgggtgttgaaggctcccaatattattgtgtgactaagtcttttcataggtccagaagaacttgttttatgaatccgggtgctccaatgttagctgtgtgtatatttaagatagttaactcttctttttgaatttttccctttgtcactgtgtaatgccctactttgtccttttagatcattgttggtttaaagtctgttttatctgatataagaatagtgacccctgctttcsttttgttttccatttgcatgatagatctttctccatccctttactttgagcctgtgggtgttcttacatgtgagatgggtctcttgaagacagaatatggttgggccttatttttttaatccattttgccatcctaagccttttaagttgggtatttagaccatttgccttcaaggtttatatcaatatgtgagattttgatgctgtcatcacattgttggctggttgctttgtagatttgattgtgtatctcctttatggtgtctgtgggccatgtacttgtgtttttgtggtgccaggtactgttctttcatttccacatttagcacttccttaaggacttcttgtaagactggtctagtgctcatgaatttccttagctttgattgtctgaaaaggattttatttctcctttgcttatgaagctttctttggaagaatatcaaattattgtttggagtttattttatttaataatgctgaaaataggtccacagtttcttctcacttgtaagtttctgctgagaggtctactcctagcctgatgggatttcctttgtaagtaagctgacctttctctctagctgcctttaagattttttcttttgcattgaccttggtgaatctgttaactatatgtcttgaggatggtcatcttgtatggtatctcacaggactttgctgaatttcttaaatttgcctwttgacttctctagtgagattgggaaaagttttgcgcactatattttcaaatatgttttccaagttgtttactcttcttctctttcagaaatgccagtgagtcataggtttggtctctttacataatctcttatttcttggaggttttgttcattttcaatttttttttttttttttttgagacagagtcttggtctgtcgcccaggctggagtgcagtggcgtgatctcagctcactacatcctccacctctcaggttcaagcaattttcatgcctcagcctcctgagtaactgggactacaagcgcgtgccaccaagcctcactagtttttgtatttttagtagagatggggtttcaccatgttggccaggcaggtctcaaactcctggccccaagagatcctcccacctcagcctcccaaagtgctgggatcataggcatgagccaccacccctggcccgaaattcttttttctttatttttgtctgactgaattgatttgaaggaccaatctttgagctctgagattctttcctcatcttggtctattccgttgttaatgcttccaactgtattatgaaatttctgtagtgaatttttcaattccagaaggtcagtttgtttgtttcttaaaatggctttgtcaactttttaactcttggatcattttaccaaattccttggattaggtttcagctgtctcctgaatctcattaagcttccttaccacccagattctgagttctatgtttgtcatttcagccatctcaatttagttaagaacaatttctggcgagctagtacaattgtttggagataaggaggcactgactttttgaattgccaaagttcttgcattaaatctttctcttctgagagggcacgtgttcttttatcttgttgaatttgctatcatttcgatgaggctttttgtttttatattctttgtatcccttgtgggtttgactgtagcataagctgagtatagtcagttggctttatttctgggtgctttcagagggccaacactctgtatgggatatttattaatacttgtggctagattctggcactggatttcacaggcagtgtatactggaagagtttggggtgttgtaatttaggcttcaatccagtagatggtgcttgagaataatggccggcaaatagactctcagtcacatggctcttttgtattccagcacatttgcagcagtgggggtggtgggaaggggtagcgatgatcccctgccaggtccatttccaggccttaggggagccccctccagtcactggcaccatgcccacatctctttaaccccaaggggaaccctggcagcctgtgctctctcctcccttggggcagctcgagccaaagattaggtcaccaggagatccacagcacactggaggcctgctgatcctctgtgcttgggagtcagagctaattgtgcagtagacctacagatggtttgttgatgcagtaggtcargggtgtgagatctccaggcagggcggtgttgccgtgggtgtatrgctgatgtggcacccatagcctagggttttctgcccagcagacagctgtggggacttcccagttctttttgccttgagtggatctcaataagctattttaaagaagtgacaacttatcttagatcacaaagtaaagaatagaaacaaagaaaaaattttaaaaaaatwctctatgctttaactccatccccaccacatttcaactgcttattatctaaatttgtgtatttttatattacctttctcttaataggttgctgtagctattacggctttttatgagtttatctttcagcttcataccagagttaggcatggattgcacaccatcattacaataatagagtattctggttttgtccatgttgttaatgttaccagtggattttatgccttgaaaagttttctttttgaatgtgtatgtggttttttgtatttttttattttccttctgaagaactcgctttagcatttcttgtaagtcaggtctgctgctgttgaatcctcagattttgtttatctgaaaaatactttatcactccttcatatttaaaagtacctttgctgaatatagtgttcttggataacaggttttttttttctttcaacactttgaaaatttatcccacttcctcctggcctatatgatttctgttgagagtcaattgtcagatgaattggagctcttttatatgttaattacttcttttctcctgctactttttaggatcctctctttatccttgagctttgagagttttattattttatgctttggtgtagccttatttgggttgaatatgtttggtgttctctgatgctcttttttttttttttttttttttttgagacggagtctcgctctgtggcccaggcgggagtgcagtggcgcaatctcggctcactgcaagctccgccgcctcccaggttcacgccattctcctgcctcagcctcccaagtagctgggactacaggcgcccgccatcacgcccggctaatttttttgtatttttttagtagagacggggtttcaccgtgttagccaggatggtctcgatctcctgacctcgtgatccgcccgcctcggcctcccaaagtgctgggattacaagcgtgagccaccgcgcccggccctgatgctcttatacctgaatatttatatctgttgcattttggaaagttttgttattatttctttgaataagcttcctaccccttgctcttgttcaactccctcttgaacaccagtaatttttggatttggtcttttgaggtaattgtctatatttggtgatgatcttcattcttttttattctttttccacctatgactgcattttcaagtagccggttttcaagctcmctgattctttcctctgcttgattcattctgctattgtgaggctgtaatgaatttttcagttcagctaatatatttctcagctccaagatttctatttgatttttaaattatttcaatctctttgttaagtttgtctaataaatttttgaattggtgttctgttaccttggagatctctgagtttcctcaaagctattaatactagtttgaatttttgatcagggagctcttatatggctatctcatgagggtcagtcactggttccttgctttatccatttggggaggtcatggttttgtgttgactgcagtttcttctggatgtgcaagaaatatatatcttgtattgatgtctttgaatgaaggattagttatttattccagtgttctctgtctggcttatttttgttttttattgaatgtatttggttatagattctatgtaatttacctgtcgaattttttttttcttttttttttttttttttttggtgaggggctaagttgctgccttctttttggcactagatgtcaccttacgaccaagtttgccttggctccagtaaacaataagagagctgctcattcmaattagggaaagtctcaaaggagatatcatggcagtgtgggaaaggtggctagagattcatgcccaggggtcctgtgcaatgtatcttctgcartgtggtgctactaaacaaccactctggtttggcatctcctttagctgagttacagaccagagtttccagggctggggatggtagtcccacctcacctgtttgtttctgactcttctcaggrtatttctttcttcaggcacatgtagtgcttcctgtgggttgaggtagggacaggtttcctgccaggtaacccagatggtgggaaamctggatgtcaccttttctggtatagaaatcatgaatcaggtggagattttttgcactcttggtgctgggcaaattggagraatgggcattgcagatgtggaaacccaattctcttactgcctacttagagtttttttcccatctctgtggatccaggaactgtcttctcctcgtatttgatttctgggatattgttggtgataatttcagtgctgtatatttggttttggttttctttgtaaagaagtgaagccagcttgcttctacactgttattttggaaccagaagtcctctcttgtctttttaatctaattctctttaagataattattttatctttgaattaattattttttatgtaaattacaaataagtcttaatggttcctttgctttgttaaccagtacatctttggaaataacacaagtgtagttttagagcttcacaatcaataatgactataaaactcaatatatgaggaatcataactccaagtgaaaattatataactctttgtcttcatttcattgcagtcacttccatcttcattatttggttaaccactacagccacatttggaaagctgtgtcttttcttaactgaacagtccagtcatgcttgttttatagtcagtaaactgattaaaaattagtaattcaaatgtatttccataatttgcctaatcttaaattataattaaaaaaatgcttttaaagaagttacagtttttaattctgatgagattgtattttattagtttttccttttatggatcatgttttgatatcaagtctaacagctcatcacttagctgagggcctgaataatttttttgtgttcttttatgaaaattctgtaagttcatatttgacatttaagtccatagtccattttgagttaataaattattaaatttaggtgaagattcattttttggcctattgatggctagttgtttcaatatcatttattgaaaattctgttattcctctattgaattattgttgtacctttgtcaaaaattattgggcatatttgtatgggcctatttctggttccgtattctgttctrttgattagtgtgtctatccttctgccggtaccaccctttggattattgtagtgatatagtaagctttaacatcagatagaatgattcctcccacgttattctcctttttcaaaattgtttgagctatcctagggtctgtgctttctctaataaattttagaattagtttggctacatctacacaaaacttgctgggatttggatggaaattactttaaatctgtagtttaattggagagagctgatatctttactgtattgaatcttccaatccatgaacatggtaagtgtatttatttaggtcttttttgaattcttgcatcagcattttgtcattttcagtgtatagatcttgtatatgttttgttaaatttaccctattcattttctttggagcaattgtaaatggtattgtgtttgtactttcagtttccacatattcattgctagtacgtagaaatttaattgattttcatttgttgatcttgtaccctgtgatcttgttgaaattacttattagctcttagaggttttgtaggtttttttttttttagattctttagtgtgttctacatagacagtcatgccatgtgcatatagatttgtctcttcctttttgatctgtatacaatctgtatacatcctacttattttctggtcttattgctgtactaaaatgtcaagtgctatattgaataagagtggtgagagcaggcgttgttgccatcactgatctcagagggaaagcaaactaaaattttatgttttgtgaaagacccaatgaagaggataaaaaaaaaaaaacaagctagagagtaactatatgcagggcacatatccaacaaaggccttggatctagaatttataaggaaccctcaaaaatcaatagttaaaaaaaaaagaaaaacagaaatgggtaaaagacatgaacagacagttcaccaaagagaacatacagatgacaagcacgtgaaaagatgctcagcttcattagcccttggggaaatgctaattaaaaccaggatggagtagcattacacacctatcagaaaggcttatgtaaaaatagtgacagcaccccatgctgatgaagatttggaaatgctggtgaggatttggagaattatgtgaagatttggagaaactgtattgctcatacattacccatatgtatgagacattgggaatgtagactggtaccagccactrcggaaaacaattgagcagtttcttggaaagaaaacaaaaacaaaactaactaaagttgacatataacccagcaatagcactcttggggcatttatcccagattaatcaaaatttatgttcatacagaaacctgtatgtaaatgttcatagcagattatattcacagtagccaaaaaccagaacaacccagatgtccttcaacaaattgatggttaaataaagtggcacatatccacatcatggaatattatttagcaataaaaggaagcaaactattgttacaccaacaacttggatggatctccaagttattctgggtgggaaaaaagtcaatcacaaaaggttagctattgtgcaattttattcatatagtgaattttgctatttcttcttgaaatagcaaaagcatagagaaggagaacagattactattttccaagggttagagattggggtggatgagtgtgactctatagggatagcaggaggaagtcttgtggtggaacagctctgtatctggactgtggttatagttacatgaatcttcacatatgatataattgcatggagctctgtgcatgcacacatgcacacatacacactctcacacactcactaacagttgcatgtaaaactggtgaaatctgaattaagctttgtggattgtcccaatgtcagtttcctggttttgatattatatcttgttaaacaagatgacaccatctgggaaactgggtgaaagatacacagggccaccctgtacaacttcctgtatatctgtattataaaataaaatttttttatggcagatatggtggctgacgcctataatcccagaccttaggaggccaaggctgaggatcactttaggccaggagtttgaaaccagcctgggtaacaaaaataaaaataaaaaagttagctgggcatggtggaacgcacctatagttcttgctactcaggaggttgaggagggaggattgtagtttgagattgcagtgaaatatgatgacaccgctgtactccagcagctgagacaacagagcaagaccctgtctctaaaaaacwaaaagttttttcaaagggttaattaaaaattttaattataaaaatgataagctatgaaaataaaggaatgcttattgttttctatttttatatgctttggggttacagttgacaacatttacatgtgtccacaatgtcttgctgaaacgactcattctcagcttgtcccacatgtgactctccaggcaagttcagcaacacctgagctggtctatawcctgttmagttgagcacacttctcagtgctgtgccagtgtcaaattgccataagagtttctgagcacttactcccagtttcttgactcattgtggaccagcaacagacctttgtaggcctgcaccaactcaatgaccacacccagctgtactggtgtccacacacagtctggaatctagtgttgggtcgactgttgctcccagtttccgtgtgagttgacagggatcttcatataagaaacagatatgctattgttggggccagagaaagtcttctgtgcctttccagaattacagtgctgctttaagttctgcctttggataacaaacagggacacacaagggcaaatttattacttattttggagagcatttcttattatgaatgattgcttcctgctttctcctgaaaacctattaaaatagtcttccttatccattgggctaagttaaaaatagcacattttcttgtgagtgaaaatgagatctttctgattaaatcttgacatctctttcaccctttttggcaatctgtgaatttgtgtttttcccccatgtggatcatacaaaattactgtcatcttattacagttcaacatcatggatatagtggcccaaatgagagaacaacgttctggcatggttcaaacgaaggtaagctttcaccacatacataataataagaataatgaatataaagattaacattgcataacaytttaccacttaaaagctcttttattgacataatctcattgaattcctactgtttgaggtagacattagttttgctctgattctctggtattcctgaccaagtacttcaaattcagagcaataaagcctgctccatggrgtcactcagatagaaggggaggagccaagcctgaagttgaggtctcctcgtgtccaaacacatgccttgtccataatgccgtgctatttaagtaacatctaaagttatttttaaaacatttctggatagcagtttgagatatttacttgccactaaactgtcaaggttatcaggacgtcataaaaagacatcatttatgtcacagatttgttagtagtcattgggagggtagattaatagaatatggataatgataaaaaaaacagttatgttaagccttaaggtaactagttctaggccaagagctatattttgatcatttatcttcctcatagttttaaaaatgtattcacgtaaagttcttaagtgtttatagttaaatgtttgctctttttaggaactttccagtgtggctgaaaattacaaatgtgttttctgaaagtggattctgttattcaattacttaacattctgttgttttttatatatatgtatataggagcagtatcacttttgttacgatattgtgcttgaagttcttcggaaacttctgactttggattaagaaagacttctgttgcctctcacttgaaattaccaagtgggtttgcacctcctcataaagaacatgtttgcactgtgctgaagggctttgctatgcatacaatctgctttcttggtttatcagtttattttctttctaaaagctccctgaagggcaatatcatttggcttggggtgatcagtgtttacttattgatcttgctagacaatatcaaaataacttcccacattttccagtgaaacagatgttacataaaacgattgcagcttggctatttggttgaagggattacagagcccaataaaggatttaaaatatattcattaagattttatttggaaaggtggctggagagagctgaggatttccaggactttgtaagttcttattctgggagaacataaggccaataatcatgacctcttccaggcatttttaagacagatgtctattcatgttctttagctagagcctgtactttttgctggcatttgaataacccagtttaaaaagagtccagttagggtggactaactttggacacaaattggcttccatttcctacattttcatactgctgccttcctacagctgctagaccaagacctgttggtctgggaagcatttcatggatagggagagctcctctcggtgaacagtccaaaactaaaatagatgtttatatagaaagcccaagaggagayttttgccatgcctgagttctttcctatcccaccctaacacttaacatattacttagtctgctttgttaaaagcaagtattacctttaacttgcctcttactctttgccctttagctaactaataaagtttgatataggcattattatataattctgagtcattcatggtatctctcatgtttgatgtatttttcaaactaagatctatgatagttttttttccagagttccattaaatcatttatttcctttactttctcacctctgttgaaacatttagaaactggatttgggaacccaattttggaaaaccagattcatagtcatgaaaatggaaacttccatattctgtttttgaaaagatgtggccattattacagtaattttattataggactttgcctcgtacaattaatagtgatattttggacaaggagttctggtgacaagctatacctaattataagctataaaacaatagatatgagtgtttgtacagtttaactcaatggagatcagaatattctatgtattgagaaaatgtttaatatcaatctataaatcttgaatttctaagaggcttattttgttcttttggctgaatgagtatatttgaattggttgaataattaataattctcattgtaaaaataattatatgccaaaaatatatttgatgttaaatcaaatagatgattctgtttacattgttcatatgaataataatctgtgttaatttcattttgataattggcctttaatatttgtatctctaattttattttctctctgttactgtaaaataatagctataatgtataacaattttcttcagaagaattctatgctattattaaaataaaatatttactgtgtattgcctgaagtatttttatttatctgggccttgaaatcgtcttgtaaagaaaaattccacaatgcttgatgttaaacatgtctcttctttaatgtgtgcctcatatttttacagctggactaatttttagttttccagggaaattaaaggagtgaatatggaaatactaattgcatttgttttcacttcattcttggaaggtgaatgccaaagtgaaaacttttgactgattgaaataattttatatcaataatgaatcaatttctgcctgcaatgtgaacatgaaattttcattgacacctttgtgagtatatgaatgctaatttaaaggaagttttaaaatatttaaatataagcatatatatatttattaactttcaattttaaatacatatttttaaagttgtatgttcttgaggcttacatgttagaccaaagcttttcagaaataaacatcttagatttttttcttccatattagagttagtaatttatcttcctttggaccttttacccccaatctccttagaacattattgaattttcagctaaatttacctttagcactcaaaagttattttagtgatttatttttattgaaaaacctcaaaggaaaacacctttaaaaagtctaaagcaaaatacttttatttcctacttaatttttttctaattcctcggaagaattcgttttcttctatgttgtcttgaggttcatgtaattgaacaagaagattcagaaggtctctattaagtaaaaacaagtcattggtattcaatgggggtgatggattgctcactggaacactcatttgtctatagcctcaatcaaaaactggtaattacttcataattaaacaatttgaattagaagggatcttaaaagattgaatacaagcattgtatctgaaacttgaacgtgataacattttttagaaaccaacagcaacatcaaatttgtaggtgaaaaacagagccccccctattaacaaaacaatacctcctgttagcacagtagctgagtattgctccagagttatctagccaatgcagtaagattacaaaagtggaataattgctgtaaatattggaaagctagaagaaaatgatcttttgttcatacgttgttcacatagaaataatagactcaactcaaaaatagtattagcaaacttattatgaagttaagatacaagataactatgtaaaaattaatctttctctatatctattagtctgtctctttatctacaaccagcaaactatggcccacaggccatatctgacttcttgcctttttttgtaaataaagttttatgcccatttgtttacatattgtctgtggctgcttttgtattatggcgatgactgagtgaatagtatcagcagagatcatatgtcttataaagcctacaatttttaccacctggccctttaaagaaaatttttgccaacccctgttctgtatcttcaacaggaaaaatatctttgagcaacaggcatatataaaatgtatattttataaaatatgtgaaatacttaagattaaacttaacaagaacgtgcccagatgatgcttacattctaaatgaacagtaaatgtatgaaaagagctaagatatttttgagaaagaaaaattaactggaggaaagggaaaaggtttgccttaacgatagtcaaagtattatctaaagtcacagtaattaaaacaatctgattctggcacatggatatatagatagataaatggaacaaaatagagttgagcattacagactcatttatatttgtgaatttgctgtatgctaaggatagcatttcaaatacagagcttcaaatacatgaaacaaaaatggatatataagatcaaactggaaaaatatgcaaatccataattagagtttgaggtttcagcatttgtctctaagtaattgatagaacaagtaaacagaaactaagacgtaaaagatttgaataaccctaccaacctgcttgacctaactgatacttacagaacactaaactacagcagaatacacattcttttcaagcggacatagaacattcaccaaaagagactgtattttgggtcattagtctcactatatttcagaagaatgtaactatataaagtatgattatggaattaactagaaatcaataatgtgaagatatttttaaaattccaaaatatttggaaattaaacagcatacttctaaataacttatgagtcagagaaaaaattagaagttacaaaatatttggaactgaacgaaaataaaaacgcaacaaaacttttgagattcattgacaaaacttggggagaaagtcatgcacttgtttggttcatgctgaattcattatacctatgcaagtgtctctacaagtttcatgttaaaaaagattcctgagctgaaaactcaggtctggaggaatgcttgccttgaaagtgatgtttgagggcatgggaatggataagctccacaaacaaagtgagatggaggccaagggcagagcactgaggaacttcaacattcacttcaaccctgattgccctccagggcctggcctaagaactatctcttctatgaagccttctaacactcatctctccctctgctgattccttcagcaatgcttctcaaactctggtgaaggacccgttttatttaccaactgatagacctgaacacagcctaaagatccaacagatatttactaggaggtgtggtggggctaagctgaggatggcgtctgaaactggatgggcattgctcactttcttttttttttttttaatttcattattattatactttatgttttagggtacatgtgcacaatgtgcaggttagttacatatgtatacatgtgccatgctggtgtgctgcacccattaactcgtcatttagcattaggtatatctcctaatgctatccctcccccctccccccaccccacaacagtccccagagtgtgatgttccccttcctgtgtccatgtgttctcattgttcaattcccacctatgagtgagaacatgcggtgtttggttttttgtccttgcgatagtttactgagaatgatgatttccaatttcatccatgtccctacaaaggacatgaactcatcattttttatggccgcatactatcccatggtgtatatgtgccacattttcttaatccagtctatcattgttggacatttgggttggttccaagtctttgctattgtgaatagtgctgcaataaacatacatgtgcatgtgtctttatagcagcatgatttataatcctttgggtatatacccagtaatgggatggctgagtcaaatggtatttctagttctagatccctgaggaatcgccacactgacttccacaatggttgaactagtttacagtcccaccaacagtgtaaaagtgttcctatttctccacatcctctccagcacctgttgtttcctgactttttaatgattgccattctaactggtgtgagatggtatctcattgtggttttgatttgcatttctctgatggccagtgatggtgagcattttttcgtatgttttttggctgcataaatgtcttcttttgagaagtgtctgttcatgtcctttgcccactttttgatggggttgtttgtttttttcttgtaaatttgtttgagttcattgtagattctggatattagccctttgtcagatgagtaggttgcaaaaattttctcccattttgtaggttgcctgttcactctgatggtagtttcttttgctctgcagaagctctttagtttaattagatcctatttgtcaattttggcttttgttgccattgcttttggtgttttagacatgaagtccttgcccatgcctatgtcctgaatggtaatgcctaggttttcttctagggtttttatggttttaggtctaatgtttaagtctttaatccatcttgaattaatttttgtataaggtgtaaggaagggatccagtttcagctttccacatatggctagccagttttcccaacaccatttattaaatagggaatcctttccccattgcttgtttttctcaggtttgtcaaagatcagatagttgtagatatgtggcgttatttctgagggctctgttctgttccattgatctatatctctgttttggtaccagtaccatgctgttttggttactgtagccttgtagcatagtttgaagtcaggtagcgtgatgcctccagctttgttcttttggcttaggattgacttggcgatgcgggctcttttttggttccatatgaactttaaagtagttttttccaattctgtgaagaaagtcattggtagcttgatggggatggcattgaatctataaattaccttgggcagtatggccattttcacgatattgattcttcctacccatgagcatggaatgttcttccatttctttgtatccctttaatttcaccttcaaagtggaaaagtgcgaggagtacatggtagggcctgaaggggttagagcagtgtagctcttatctgctctaaaaggtgaccagccagggctcctttccagaacagagtcacactgaggagaaaccttagaatcaaagttgaggagagaatggagagaatgggataaagaaaagagaagatcctataaaagtgattgaggagaatagagccagaaaacctcagaaagcaagctcagtgaacttataagagctgtctgtccaagtcaagtttagttcaggaaatccaaattcacatggaaacaagcactagaaaatattatgatcaaatcccgtacaagttaccataagaaaaaaaaaagactgaggagctgaatagcatcccttacaaacaatgaaggtacaccagaaagatacactcaaaacacagttctcaatggcaagcagctcgggaagtcacagaaaacgatatcctactatttcaaaatgagcttaaagacaataggagaattgcataaaacaggatggaataacaaaaatcagaactagaaaaatttaaagcagtatgaaaatcaagaaagagttagaaacaaaaattagaaataaaatctataaactagaaggaacacaaaaaaattgataactgatgctttacaataaatagaaagcttaagaggaataatttcaaaacaaaatggagaaagaaaacaggatttaagagcataagaaggatcaatgataggtaaagaagactagtagatagataacagaaagtttaaagaagaaaaaccaaagcaagggttcagaacaaattcactaattcaagaaatatttagagtaataattaaagaaaattttcctgaaataattgtttttaaaattatatgttgaagtatcatagtacatacctgaaaccatcaaatgagtatgaccaataccaaggtttaataaattttaagtaaaattgctgcagtttgaagaaagaaaatggggrggggggaggatttacgcaaaagaatatgaggaaaagaaaattagatgattatcagatttttaagagtaatgctttaatacaaaagaagatggaataataagatgtccaaggaaagatttttatgagccaatatgttatgtctagaaaaactgaccttgatgcacagggtgaaaattgaaatcaacatgcaagagctcagaaaatattgttcccaagagccattcctcaatagatgcagaaaaaaaattcgaatcaaatttgatatccattctatattttaaaaataaaaaattttagtaaacttggaatagaagggaattaccttaatctgctagggcatagctacagcaaacttacaacagaagcacattttatggtaaaacactgtttctctccta

SEQ ID NO: 93541 - DNA, 13170 bp, Homo sapiens
actccagcccaggtgacagagtgagactgtctcaaaaaaaaaagttaattttatgttatgtgaattccactttgattaaagaacaaaacacagaagcaattattagctatttggaaaaatctgaatactgactagatctttgatatactgaagaattactggtaattttttggtgwgatgatggtattgtggttatgatttttaagggtgtttggtttcagattagtatagtatataataatggatgaaattataccatgtctgggatttgcttttcaatagtccagtgtgaggggggcaggggaagtgggtggaggtacagatgaggcatgacttgactaattgttgaagtgggtgatgcgggttcactatactattttctctactcttgtatgtgcttaaagtcttgcctaataaagttgtaagatttccttttcaagcataattaaaaaaatcaaagattaggctacattgggcttatttagaaatctattaggcacttactctaccctataaaattaaaactttcatgtatctgctgaatctaaaataaaaattgagggtgatggggcctggtggggagagggtccagagtaggctctcagacccgaaactgaatggggtgtctggggcatcagggagctcccttgcctggccctcagtggcctgatggagtaagagcgtttggttgagtgattcagatctggtcactatggtaggagaacaaaaatgcatattgtgtcatatcgtgtacagctccaaaaagaggcactagtcatgagtgccgaaggtgcgggcccacagaagtgggtctttctgcatacgcaaagcacatttctggccagctgcacaaagataacgttgatgcccaggaaagagaagatgatggaaaaggagaggaagaggaagaagattattttgacaaggaactcattcaattaataaaacaaaggaaagaacaaagtcgacaagaaccttccagtagcagccaagaagtaaattctgatgacaggtgaccccaatggagctgagaacaccaaattcctcaccaacacagacagagttacagtcagccagcatggcatcaccctggacctccacaggaggattgtaattggaaaaaagatcgctttaataatacatggagaaacagctttctgtattctttgaggaatagtggtggaccaaaaggatgttctgagtggcattagagtgttgcaggaggctccttgacttggtttcacaaccatagtaattctggagttggttggcattcaaatagtggaacagtagattggaatcataatggtacaggaaggaattccagttggcattctgagggaacaggtgacttttccagttggcatatgaacaacagtaacggaaactagaaatccagtgtatgtagtaaaaataattgcaactaaagtggccctggacataaatttcaaccaggcagaaacagaaattctacttgtcaaatggaagatgtgactatgctatggaacaagaaatcaaataagtcaagcaaatacaatcaagaaagatataattggtagtgtcaagaaaatgagaaacttggaatgacaaactttgtacggctgccacatatagaggtccttctgaaagatttacaagtgataaatttccttcggaaggcttacttgacttcaattttgagcagccagaaagccaaaccactwaacaaacagacactgcaacttccaaaattagtggaaagaacagcagtgcagcaacggggaaagccttgttgccagactccttacccttctaaaataaaaattaaaaaggaaaaagatttggtagtactcaagttgaaggaaggaaacatgacaaacttagaggaagcataaggaatttcatatgcacttcttaggagaaataattttgtatttaagccttttttttcttttgtttttagttgatacataataattgtacatatttatgagatacagagggatatttcatgtgtgtatacaatgtgtaatgatcaaatcaaggtaattagcatgtccagcacctcaaacatttactatttatttgtgttgtgaacattcaaaatcctctcttctagctttatgaaaatatagaaagctggctctttaagctttttgtaaatatgcaataaattatagttaaccatattactccatagtgctgcagaacaccagaactcactggatctcattgattaaactgaatatgactgagatcttttcatgaaatgagaagctatggatttagaatcattaaactttaaggctgggtgggcccatccaaacccatcattttactgctcattttaatgctggcaagacccagaaagggttatgtgacttatgaaaacatcttttaaaaataataaaagttgtctgagcacagtgagctcacacctgtaatcccaacactttgggacactgagcatcacttgaagccagtagttcaagatcatcctggacaacatagtgagaccctgtcattacaaaatttaaaaattttaataaataaaagttatattaaaaaactcaaagtatgaaaatatagggggccaggcacaatacctcatacctgtaatcccagcactttaggaggccaaggtggatggatcacctgaggtcaggagtttgaggccatcctggccaacaaaccccatctctactaacaatataaaaattagccgggtatggtggtgcgcacctgtaatcccagttattcaggagattgaggcaggagaatcacttgaacccgggaggcggaggttgcagtaagccaagatcgcgccactgcactccagcctgggccacagagcaagattccgtctcaaaaaaaaaaaaaaaaaaagggaaaaaatcattcctgattccgtaattcaaacaattgtaaacatttgttaaaattttggggtgtttcctctcagcctttttttttaactcttaggtttgacttttcctaatacaactctaagcatttttacatattaatgcaaatccttagaaacaattattttaatggttgtctaatatttcatggagttgatagagtttactttttcattcttctataatatggcattcatattatttccaactctttataactacaaataaagcaactatgaacatatttatatacaaaacttaaatatagttagtattaccataaaagtcatatttgatttttctcagaagtaagataaaacttccttcctaatggaagcctttttttccttttgaaaatttgttaatggacaaaatagagttagattctccattttctttatggatcaagctatgaacagtcaaaaagataagatgtagaggtgggctgataattgtctttccattatgagcaaaacaatctttatgtgagtagtacaggcaaaaaaaatttaaagtaaaattatactctacctgttgaaaagctttttctgcttgacgttcagcatcaataacttgtctctcaagctgttgcatctgtagagtgagggaaaatataaatacaaaaatttatttttgaaaaatgagcctttctgaaaaaggctttaaaaatctcataattctacctccacctccacctcacctccacctccacctccacctccacctccacttccacctctacccacggtctccctctccctctctttccatggtctccctctgatgccgagccgaagctggactgtactgctgccatctcggctcactgcaacctccctgcctgattctcctgcctcagcctgccgagtgcctgcgattgcaggcgcgcgccgccacgcctgactggttttcgtatttttttggtggagacggggtttcgctgtgttggccgggctggtctccagctcctaaccgcgagtgatctgcgagcctcggcctcctgaggtgccgggattgcagacggagcctcgttcactcagtgctcaatggtgcccaggctggagtgcagtggcgtgatctcggctcgctacaacctccacctcccagccgcctgccttggccgcccaaagtgccgagattgcagcctctgcccggccgccaccccgtctgggaagtgaggagcgtctctgcctggccgcccatggtctgggatgtgaggagcccctctgcctggctgcccagtctggaaagtgaggagcatctctgcccggccgccatcccatctaggaagtgaggagcctctctgcccggccacccatcttctgagatgtggggagcgcctctgccccgccgcccggtctggaatgtgaggagcgcctctgcccggccgcgaccccgtctgggaggtgaggagcgtctctgccaggccacctcgtctgagaagtgaggagaccctctgcctggcaaccgccccgtctgagaagtgaggagcccctccgcccggcagccgccccgtcctggagggaggtggggcgatcagccccccgcccggccagccgccccgtccgggagggaggtgggggggggtcagccccccgcccagccagccgcccggtgcaggaggtgaggggcgcctctgcccggccacccctactgggaagtgaggagcccctctgcccggccaccaccccgtctgggaggtgtacccaacagctcattgagaacgggccatgatgacaatggcggttttgtggaatagaaatgggggaaaggtggggaaaagattgagaaatcggatggttgccgtgtctgtgtagaaagaagtagacatgggagacttttcattttgttctgtactaagaaaaattcttctgccttgggatcctgttgatctgtgaccttacccccaaccctgtgctctctgaaacatgtgctgtgtccactcagggttaaatggattaagggcgttgcaagatatgctttgttaaacagatgcttgaaggcagcatgctcgttaagagtcatcaccactccgtaatctcaagtacctagggacacaaacactgcagagggccgaagggtcctctgcctaggaaaaccagagacctttgttcacttgtttatctgctgaccttccctccactattgtcctatgaccctgccaaatccccctctgcgagaaacacccaagaatgatcaattaaaaaaaaaaaaactcataaagtcatcatcagtttggatattttaaactagttcactggagatgcgttaaatacagttagcacattaaaggctctttgcatatttaaaagttgatcaaaatgccagagtttcgatacttttaatacaaggactacatatatacctcaagagtattcatcaatagaattttcttcagtggattgtagattaaaaattatggattaacatatattaagaacaagaaaataaatctaagaggaaagaaaggcttcaaatgtcctatttgaccgcttgatcaaaaagtcataatgacatcaaggaagtggtgtgttctcatgaactccgtgggtgctaggtttaaataaactctgggtagttttacattcttacagactgatggagagagtatagaagagattctttgattaaacacacagacacacaaatactaaaacgaatattataaggagaattttaaaagccttaagaaggaccccatgctaatcaacatacgggatgtgttgtaccaggggctgaatacacaaatcgtgaggtaaaactcaattttattctttttggctcagtgctgatgtctggctcactttagagccgtctgtgactcatctctgctcattttcaactttattgctggttggaaggccaggcgtgcagaactcctggtatacctctcacccgcagcagcccggaccccacccgcagtggccgccgcgtcccgctcctgccccgcccccttctctacgccaccgagaagcgacctcccgcagctagagtggcccaaccgggagcgcagccgccagctccggaaggcgcgggaccccaggacccggtcccaggctgcctttgaccctggcgcactgtcctaacgcctggaaaatggtttccgctagtgggacatcattttttaagggtatgttgcttgggagcatttcctgggttttgataactatgtttggccaaattcacattcgacacagaggtcagactcaagaccacgagcaccatcaccttcgtccacctaacaggaacgatttcttaaacacttcaaaagtgatactcttggagctcagtaaaagtattcgtgttttctgtatcatctttggagaatccgaagatgagagttactgggctgtactgaaagagacctggaccaaacactgtgacaaagcagagctctacgatactaaaaatgataatttgttcaatatagaaagtaatgacaggtgggtacagatgaggaccgcttacaaatacgtctttgaaaagtatggygacaactacaactggttcttccttgcacttcccactacgtttgctgtcattgaaaatttaaagtaccttttgtttacaagggatgcatcccagcccttctatctgggccacactgttatatttggagacctcgaatacgtgactgtggaaggagggattgtcttaagcagagagttgatgaaaagacttaacagacttctcgataactctgagacctgtgcagatcaaagtgtgatttggaagttatctgaagataagcagctggcaatatgcctgaaatatgcaggagttcatgcagaaaatgcagaggattatgaaggaagagatgtatttaatacaaaaccaatcgcacagcttattgaagaggcattgtctaataaccctcagcaagtagtagaaggctgctgttcagatatggctattactttcaatggactgaccccccaaaagatggaagtaatgatgtatggcctgtaccggctcagggcatttggacactatttcaatgacacactcgttttcttgcctccagttggttcagaaaatgactgaggsctggagaataatagacctgtgctgtccaagagcacttgaaatgtggctagtccaaattctgatacagtgtaagtgtaaaatacgtacttcattcaataattcatatattattagaaaacagtatgaagatgtaaaacatctcagtaatatttcatattgactccacattgaaataatgttttggatattttgcattaaataaaatatactattaaaattaatttcacctgctttttaattttattaatgtgtctattagaatattttaagttacacatgtagcttacatatttctactggataataaaggtgtagaacatttgttgccaccatgtatggccacatatttaactgcctgtccacatggcagcatttttttttttttttgaaatggagtcttgctttgtcacccaggctggagtgcagtggcacaatttcggctcactgcaacctccgcctcccgggttcaagtgattctcctatctcagcctactgagtagctgggactacaggtacacaccaccatgcccagctaatttttttatttttagtagagacagcgtttcaccatattggtcaggctggtcttgaactcttgacttcaggtgatccacccgcctcagcctcccaaagtgctgagattacaggcatgacccaccgcacgcagccccatggcagcattttaaaaggcagtttattacagggatctagattctggaagaggtttcaaatatttggatatgtaaataactgtgcaagtacattctcagtacctcatatttaatttctgtgaaaatatttcaaatgtttaatgagcaagtaatgtggtttcaaagcattttgttgaattacttgtttagactatggcactatatagaagcagctggacaagcattaagtcttttggatgtctctagaatattccctaaaccaaaaaccaactagcaaacacatgccaataccacattcttccactactggcaatatgctgacaattgtcacttctacaatataactatattctattttcagggaaatttggtttttctggagccttacttagcctggattttgaatattgtcaggattgccaggagaaacagaagaatgcacaaaattttgctagtgaaaaaaatagttctcttaagagaactatgcaaatatcttgtctgatttctcctcaaatgtatagtttctagtgataacaggaaggataaaagtcagcttgcttcactgttacataactaatacaggtctttctacatagtagatatttaatatattacaaattattgatgaaatgacaaagctctctgtcatgcctaaagtaccatgcatatatgaaggacagtatcattatttttaccactgccaaataactttttttctgctcctatggcactgacttcctatcttgtactatcttcccaactacattgtaaagttgtcttgaaggcgcaatcaggctcaaaagttacttgctttcttaatgaaaaggaggtaatccttgaagtatgaatatagggaaaactggaaagaatactgaacttaaaggcaagacctaaattggaactcagattccaatactagctatgtgatgatgggtacattatttaacttatctgagtctcctctccctacctgtaaaatgatacaacacttatttcacagcatttataaacagaaaagcatccaacatagtatctaatacttaacaggtgttcaatgaatagttacatagaaattttttaagcagcctatttctaccatatatatgtgttatttttatgaataattttaagttaggaaactctactatttaccaatagtttgccactggactctaaaattcttgtgtataaaatgtggataatataacccgttctgactactttacaggatgttgtagggctaaaaataagaaaatatattcaagcaatgtgaaaagctggtggtaactcatttatttaaaaatattatggtagcagttgtagtgttataatttgaatgataaaactaaaagtcacaaatgtccaaaaacaggattatctaaatatataaataatggtacatccatacagttagataccatacagtcattacaaatttttatggatggatgaaatgatatatttgggacttgtctcaatataacataggaggaaagaagtaggtcagggtgcagatgaagatgaaacaggattggccctgagttgacaaccatgaaagctgggtgatgtgtacaggagggtccattataacattctgcttacttttgtatgtttgaaaatctctctaataaaatgttttaaatatatatgaaaagatgtaaatgacatatttaaaaataagtgtaaattatatatagaatgatattatacataaatgatatattgagggaaaagggactgcaaagcagtaatgaatgttgcaatcaaatgtttgttaaaaaatttacgtgtgcctgtttttatggaattacataaaccaaggacaaggagttgtctatatctaggtgacaggattatggatatagtagtttgcatcatatatgatgaggcaccagagggagttttacggagctgaaaaaagtaagagaataatggcagggaggaaaataaatgggtgttagaaacttgcattagaaatagtaggcaatagttaatcaaagataattctgctcccttagagggaatgagtagaaaatcaagaggaagattttcaaataacctgtgaaattagagaggctatatatgaaagtacatagaaaaagggttcaaatgctgaagtggcatctaactaggcaacaactggtgatgatgccactgctaattaggaggtcattagtgacttttgtgattccagctgcactgtggagaagtgagggcataagctggaatgcaagagtctgaatgaattaaactcattaggaagagcaaattaaacctaaagccaacagaaatttaaaaactaacaataaagattagaggagaaatgaataaaattaaaaacataaaaatagagaaaaatcaataaaaccaaaagctggttctttaaaaatatcaatacaattgatagctctctaaccagaccaataaagcaaaaaagaaaaaagacacaaattatcaatatcagtaatgtaatgggagacatcaccacagaccccacagatgctaatgagataacaatattatgaaatacttcatgcccataaactggacaaaatagcaaagctcatttaagaagaaataagttagcttaatagcccaatgtctatgaaataaatcacacttgtagttaaaaactttcccacaaaggaaactccaggactagatggtttcacttgtgaattctacccaaaaatgtatagaagaatgaatagaaactcaacaaaaactcttccagcacataagagaagggaatgcttcctaacacattttataaggccagtattgccaaaaccagaaaaagacgaatatccttgtgaacacagatgcaaaaatctttaacaaaatatcagcaaatccaatccaaatatacacaacaaagatattatgtcatggctaagtggggtttatcctaggaatgcaaggttgttttaacttttgaaaaataaaccaatgtagttcaccatgtcaagtggctagaaaagaaatatcatttcgatagatgaagaaaaatcatctgacaaaattcaacatccattcacaataaaaatctcttaacaaactaaaaatacaaggaatttctgatacctaataaaaggtatctacaaaaaaacctataactaacatcatactcaatgggaaagcctgaatgctttcctccacaagaatgtcgttttaccacttctactcaaggttttactgcaggtgctaaccaatgtaatagccaagaaagaaaaataaaaagcatatatactggaaaggaagaaataaagcaatatttattcacagatgacatgagtatctacacataaagtcccaaataatctacaaaagaactaataaatgagtttattaaggccataggatacaaggtcaatatacaaaaatctgttgtatttctatataagagcaataaatggccgggtgtggtggctcacacctgtaatcccagcactttgggaggccgaggtgggtggataacctgaggtcaggagttctagaccagcctggccaacatggtaaaacccggtctctactaaaaatacaaaaaatagctggtcgtggtggcaggtgcctgtaatcccagctactcagtggggggcagaggcaggagaatcacttgaacccaggaggcagaggttgcagtgagccgagattacgcatcacactccagcctgggggacaagggcgacacttcatctcaaaaaaaaaaaagttaaaaaaaaataagagcaataaacaattgaaattagaatttaaaaaacagtagcatttacaaaagcatcaaaaccataaaatacttagctatgaatctaacaaaataagcacaatatttatatgctgaaaatcacaatatactgataaggaaaattaaagaagagctaaataaatggagagttaaactatgagtcagaagactcgatattattgtcagttctcttccaattgacctatagattccacccagtcttaatcaaaatcctagcaggcctttctgcacaaattaagaagaagaatctgaaatttgtatagaaatgcacaggacctagaatagcctaagcagcttagaaaaaaaaaattagaatattcacaatacctgacatcaagacttataaaattgccaatagtagtcaagagaatgatatttatataaaaacagacatattagatgaatagaacaaaatagggttcagaaatatactttaaaatatgcaatcaattttttttcaatttttattggtttactctatcttcattgtcagatcctatagccatcacatactacaatctccctactctagttgactgaacctcattctctaaatttcttagggaaaactcctgggaacaatattttctgagttctttaattgctaatagctgcttgctatgccctttatacttgaaagccagttctgcttaatacgaagtccttggatcatatgtgctttccttgatatctgaaacatggtagtccatgttctcctggcataaagcattactatcagtgtaagaacataattttattctcctaatgatataaaggtcatgtttttgttttttgcctaaatacctaaaaaatgttttctttttctttaacatccagtattttgatgaaaaatatgccttgaagtgggtcattctaggttgatgttctcagccacacgatccactatttcaatatgcaatattttgcttttttaaggttctgtaaacgtttcttaaattacactgtttgtatttgtttcattcccttgttttcttcaggggcttcttttatctgtatattgtatcttctttacttatcttcaatactagtcattgtttcaaatccttttcatctttcctcattttgatgtttaaaagtttctgggaggctgagacatgagaatcactcaaacccaggaggcagaggttgcagtgaactgagatcacatcaccgcactctagcctgggccaacagagtgagactccgtctcaaaaaaaaaaaaagtttcttcgttttcaccttcatttctcattaaagcattatgtgttgagtttatccattcttcggttccttctgctttagtcttagtttataaaatatatttttctacttgtaattctttgttgagttctatcacctcatttctgatttttttctaattatgattcatgctattcgtgtcttatatcattttgttaatgtcttttggttaatttattttttcccactatttaaagtcgagatataatacacatgccataaaattcaccttttaaaacagtgtaattcagtggtttttagtatattcaaagagttgtgcaaccatcactgctaattccagaacatttctatcaccctccccctaaaaaaaccctgtacccattggcagtcattcccccattgctttgctctgcatttctttaagtatgagtgaggctgaatacctttttccatgtttattggctactagtattttttgtatactatcttttcatagcctctgcttgcatggtgattactttgagtctgggtatttgaaccagtgtctagtctctcaaggaag

SEQ ID NO: 93542 - DNA, 15708 bp, Homo sapiens
aagtcaggcttggggagagaatctgggtagatgcaaactacaggtgcccttcgaagtgaagacaggaggtttagtcttaggctgaggtcctccagaaatgctgggctcaagtctactcagaaggcaaggccaggatatgggtctggttggctttggggcatgggcaccatccagaatgaagatgtctcttgtccgcattggtaagagagacacacaggcctgagaaggaagcagagaagccccattgcaggatctgcctctgctccccctccactgtgaccttgggctctttctccaagaaggcagtggagggacagtcctcactgcaagcctggggcgggtgggactctgtacagagccaggagctcaaggggcttcctgtgagatggtgaactcctgtcccaagtatgccaaccagtggtggggacaactgaaccatgtgggacttgaggctactgtggtggggacagctgaaccacgtggggctgggtagttgtctccagggtggagggaggggggatgaactggatacctgactgtctgcatctccaggaggtgagatggcagctgggcaaaatgggcacgaagagtgggtgggcagcgcatacctgtttgtggagtcctcgctggacaaggtggtcctgtcggatgcctacgcgcacccccagcagaaggtggcagtgtacagggctctgcaggctgccttggcaggtgcgtggatgggcgggcatgtggagaggaaggggtggcctggagcattttgtgggtgggcctgggtttagccacctttaagaagaagatttggggtgggaggagcaagacggaggacccctggctgtgcagactctcttctttgcttgtggcatgaccttgaggataggcgtgtgttctcgagtctgtgtatgatttaccaatttgtgcactaacgtcctttgctccatccccgcccccctccaccagccggctcactcctttctactaattgtggatgtctctctcctcttttcctctcttactgcagcactccttgctcaagacccctccccagtacctacccttccaggcccccctttcccatctcagggcagaggccacaggaggctgaagcgggttgggggatctgttcgtggcctcagagcggcgagagcccctcttcttcccgagcagtgggagtcgcgcttggtggaggccgaagacctgagacctctcgccctcctctgccctgctggccgcctacccagacggcttgtttgcccagggcacacgcccccttttctgtgcttcgaagtccctctcttttgccaaccctcatttggggcgtgagagcgggggttaggtggcacccactctgtcttagggtgctccctgtgacagatcctggtcttctttctgggttattgctgtttgtatcccaattttgcttcccagctgggtactctggggtaactgcaccctaggtcaggggatgggacgcggggcttcaccacgggcttcgcccctcctccggccgtttggagaacggccgagcttggggaccgcccggcgcctgaccgcccgcctccgcagagagcggcgggagcccggacgtgctgcagatgctgaagatccaccgcagcgacccgcagctgatcgtgcagctgcgattctgcgggcggcagccctgtggccgcttcctccgcgcctaccgcgagggggcgctgcgcgccgcgctgcagaggagcctggcggccgcgctcgcccagcactcggtgccgctgcaactggagctgcgcgccggcgccgagcggctggacgctttgctggcggacgaggagcgctgtttgagttgcatcctagcccagcaggtgcggccgggctagggtcaggatggggtagggcggggatccgcggttaagtcccccgtgacggcacgttccattcccctagcccgaccggctccgggatgaagaactggctgagctggaggatgcgctgcgaaatctgaagtgcggctcgggggcccggggtggcgacggggaggtcgcttcggcccccttgcagcccccggtgccctctctgtcggaggtgaagccgccgccgccgccgccacctgcccagacttttctgttccagggtcagcctgtaggtgaggcgcaggtggagaggcggggtcaccaggaggttggagtctggggaggggcaggggtcgttgccgggtggggatgggtgggaccggcgctgggggtccccgccctcaccccgtttccccactccctctgcagtgaatcggccgctgagcctgaaggaccaacagacgttcgcgcgctctgtgggtctcaaatggcgcaaggtggggcgctcactgcagcgaggctgccgggcgctgcgggacccggcgctggactcgctggcctacgagtacgagcgcgagggactgtacgagcaggccttccagctgctgcggcgcttcgtgcaggccgagggccgccgcgccacgctgcagcgcctggtggaggcactcgaggagaacgagctcaccagcctggcagaggacttgctgggcctgaccgatcccaatggcggcctggcctagaccaggggtgcagccagcttttggagaacctggatggccttagggttccttctgcggctattgctgaacccctgtccatccacgggaccctgaaactccacttggcctatctgctggacctgctggggcagagttgattgccttccccaggagccagaccactgggggtgcatcattggggattctgcctcaggtactttgatagagtgtggggtgggggggacctgctttggagatcagcctcaccttctcccatcccagaagcggggcttacagccagcccttacagtttcactcatgaagcaccttgatctttggtgtcctggacttcatcctgggtgctgcagatactgcagtgaagtaaaacaggaatcaatcttgcctgcccccagctcacactcagcgtgggaccccgaatgttaagcaatgataataaagtataacacggattttgatgtgagaaatacaagtagtagtggcttacacctgtaatcccaacaatttgggagacagagataggaggattgcttgagctcaggagtttgagaccagcctgggtagtcccagccacttaggaggctgaggtgggaggatccctggagcatggaaggttgaggctgcagtgagatgtcactgagctactgcactccagcctgggtgacagagtgagaccctgtctcaaaaaaaaaaaaaaaaaaagaaagaaaaaaaaagagaagttgtggaggatggaggaaggggcctaacctgggcaggggacagggggtaggcttcctggaggagatgagtgtgagtaggcataggggtgggctatcgagagaagggcagtgttcggggcacagtctcaggcaagggcttgaggaaggcttgtgggtttttcaatgaggccagtaggaagcctttgaagagtttcgggagttaagactgggaggtggttgttttttttttttttttaattttaattttttttcagatggagcttcactcttatttcccaggctgtagtgtaatggcacgtttttggctcactgcaacctccacctcctgggttcaagcaattctcctgtttcagcctcccaagtagctgggattacaggcgcccaccaccatgcccagctaattttgtatttttagtagagatggggtttctccatgttggtcaggctggtctcaaactcctgacctcaggtgatccacccaccttggtctcccaaagtgctgggattacaggcatgtgccaccgcacctggccaagactgggaggttgatgaggatgggggtgggggaaatggtggccccaggctggggcagtagcagcagagatggagggaaggggatgaccaccaaagagctgtgtgggtggaagagtaacaggcctggtgacactgggtgaggaatggctgagagagggccccaagtttctgcctttgccagttggatggtgggtgggactgcttgctgggatggggccctggggggaaatgaaatgcttgctctgtttgggacaagttgagcatgatgttcctgcagtgcatccggggagagagtatgagggtagttgggtctgtagttctgagttcaggatgagggttcaatctaaagattgatgaatagacaggtggggagtgggtggggtggccccaggggatgtcctgaaggacaccaaccagaatgggaacagccaaagaggaaggaggaaaaccaggagatttggaaaccaggggattacccacccactataatggagcgggtagtcaagaccgaggagtgtctgttggactcagttaaaaggagcttaccagtcaggggtctttctgagtcatggtggaggcagcccgaagctttatcacaggagggaatggaaggtgaggccgcggagaaagctggagcagaggactcctgattactttgtgaccaaaaagagtaaggctcagggtggagatttggcttttttttttttttttttttttggagagagtctcactctgttgccaggttggagtgcagtggcacgatctcggctcattgcagccttcgtctcccgggttcaagtgattttcctgcctcagcctcccaagtacctgggattacaggcacgtgccaccatacctggctaatttttgtatttttaatagagacagggtttctccatgttggccaggctggtctcaaactcctggcctcaagtgatccacctgccttggcctcccaaagtgttgggattacaggagtaagccaccacgactggcctttttttttttttgagacagtctcgctctgttgcccaggatggagtgcagtggtgtgttcttggctcactgcaacctccaccttccaggttcaagcaattctcctgcctcagccctctaagtagctgggattacaggtgcccaccaccatgtctagctaatttttgtatttttagtagagatgggggtttcaccacgttggccaggctggtcttgacttcctgacctcaagtgatccactcacctcagcctcccaaagtgttgaggttacaggcataagccaccacacccagccagagaggtggctttttaagattgaacattggtgggaagaagccgtcaggagcagatatagcccttggacagaggatggggctgggttcttaagagaccagtagaggctgtctattccaggctccaccacatgggctgggaccaagaaagagagagctggcagctgagctgcgcaaggacttagctctccattgcagagcacctctgtccacctgcatcccagagcaatcctttagccaaggcctccgccaggagtcttcccaagctgtccccatccttgccagccctgtctgacctgcagctgcacaggcctgatcatttctacctgcagtaggctatgctggggaccaggggactcagaactgcacctggcttgggctcaggtccattagcccccggggagacaggctgaagtgcttgcctgtgaaattaaagcagactgggttggccccctgttctgtatcccagtggatgaatgagcggggcaaggacagataaaataatcctggcctgaatttcagaagacctgggggcagagctttctggcctttggatcctgggcaagtcacttaactccccgaagagccccccagtgtccccatctgggcatgaatgagagctgctggcagagttgccctgaggattgggtgggctgccttgtttgtcccgtgcgtgtgtttactgggggtggggagcatggcagaaccaggagtaagaagacagccatgtgtctcgggggcagcgtatgcaccctgcctgatggaatcagggctgctgaggagaggcccgcccgggatggtggccaggttcatgcgcatttggaaccggcctgctcaggggctcctagcagcccaggctccgccccactccagagacgcsggagtggggagtggatagttgggggagctaaccaggggagttgatgcttcttcccaatccccagaaaggcgaatttggggtgtgagcacccagaccagcccttcccagagggactgagagtgaggaggctccctctcagggattagtccccactctgaggccggagtgctcctggcgccggggcggagctgagctccagaagtctgggcgcgcacagctggagggtcacgtggcacggcaccggtcccccttcctgccaacgctgcatttggctcgggcccggtccatggcggcccctcggaccctgcgctgagccccggaggccagggcgtccggggctgcgccacttccgagggccgagcgtgagtgtcgggaccccagggcccgacattgaggggatggcagggtggaagggattcggcctcagcgcgagggaggcgggcgggggaggggccgaggctcccagtctccctgcccggccctgggtcgcagtcctgggccggagctgaggccgcgggggagttggctacatgggtgaacttsttgtcccttcaggctgccggtcccggcggtgcgacacggccgggaggaggagaacaacgcaaggggctcaaccgtcggtcgctggagccccccccggggcgtggcctcccgccccctcagctggggagggcggggctcgctgccccctgctgccgactgcgacccttacaggggagggagggcgcaggccgcgcggagatgaggaggaggctgcgcctacgcagggacgcattgctcacgctgctccttggcgcctccctgggcctcttactctatgcgcagcgcgacggcgcggccccgacggcgagcgcgccgcgagggcgagggagggcggcaccgaggcccacccccggaccccgcgcgttccagttacccgacgcgggtgcagccccgccggcctacgaaggggacacaccggcgccgcccacgcctacgggaccctttgacttcgcccgctatttgcgcgccaaggaccagcggcggtttccactgctcattaaccagccgcacaagtgccgcggcgacggcgcacccggtggccgcccggacctgcttattgctgtcaagtcggtggcagaggacttcgagcggcgccaagccgtgcgccagacgtggggcgcggagggtcgcgtgcagggrgcgctggtgcgccgcgtgttcttgctgggcgtgcccaggggcgcaggctcgggcggggccgacgaagttggggagggcgcgcgaacccactggcgcgccctgctgcgggccgagagccttgcgtatgcggacatcctgctctggsccttcgacgacaccttttttaacctaacgctcaaggagatccactttctagcctgggcctcagctttctgccccgacgtgcgcttcgtttttaagggcgacgcagatgtgttcgtgaacgtgggaaatctcctggagttcctggcgccgcgggacccggcgcaagacctgcttgctggtgacgtaattgtgcatgcgcggcccatccgcacgcgggctagcaartactacatccccgaggccgtgtacggcctgcccgcctatccggcctacgcgggcggcggtggctttgtgctttccggggccacgctgcaccgcctggctggcgcctgtgcgcaggtcgagctcttccccatcgacgacgtctttctgggcatgtgtctgcagcgcctgcggctcacgcccgagcctcaccctgccttccgcacctttggcatcccccagccttcagccgcgccgcatttgagcaccttcgacccctgcttttaccgtgagctggttgtagtgcacgggctctcggccgctgacatctggcttatgtggcgcctgctgcacgggccgcatgggccagcctgtgcgcatccacagcctgtcgctgcaggccccttccaatgggactcctagctccccactacagccccaagctcctaactcagacccagaatggagccggtttcccagattattgccgtgtatgtggttcttccctgatcaccaggtgcctgtctccacaggatcccaggggatgggggttaagcttggctcctggcggtccaccctgctggaaccagttgaaacccgtgtaatggtgaccctttgagcgagccaaggctgggtggtagatgaccatctcttgtccaacaggtcccagagcagtggatatgtctggtcctcctagtagcacagaggtgtgttctggtgtggtggcagggacttagggaatcctaccactctgctggatttggaaccccctaggctgacgcggacgtatgcagaggctctcaaggccaggccccacagggaggtggaggggctccggccgccacagcctgaattcatgaacctggcaggcactttgccatagctcatctgaaaacagatattatgcttcccacaacctctcctgggcccaggtgtggctgagcaccagggatggagccacacataagggacaaatgagtgcacggtcctacctagtctttcctcacctcctgaactcacacaacaatgccagtctcccactggaggctgtatcccctcagaggagccaaggaatgtcttcccctgagatgccaccactattaatttccccatatgcttcaaccacccccttgctcaaaaaaccaatacccacacttaccttaatacaaacatcccagcaacagcacatggcaggccattgctgagggcacaggtgctttattggagaggggatgtgggcaggggataaggaaggttcccccattccaggaggatgggaacagtcctggctgcccctgacagtggggatatgcaaggggctctggccaggccacagtccaaatgggaagacaccagtcagtcacaaaagtcgggagcgccacacaaacctggctataaggcccaggaaccatataggagcctgagacaggtcccctgcacattcatcattaaactatacaggatgaggctgtacatgagttaattacaaaagagtcatatttacaaaaatctgtacacacatttgaaaaactcacaaaattgtcatctatgtatcacaagttgctagaccaaaatattaaaaatgggataaaattatacatttytcttctcagttcttttcaaaaggattaatatttttaaagcacatatatgctactttccattagcaagacccatgaagggactgagcagcccagccttccttgagcccccagaggctttgagccatgaaatggcccagccaggggccagtgcccagggttggggcagagagccagcccacagtgcagaacagaatgctgaaacacaacaaaagtaggaagatgtctttggctaaaactttggcattaaataaaagaggcaaacaggatggaaacatgcagccctgccagccaggatggggcagagcaggggcacaggcaatcttgaaagctgactccaacaggggtgagaaccaggcctgggcatgtacctggatggtagaaagctgtgtttcaaccagtttggtgtgcccaggcagggagcgcgtgcaagaaaggaacagggaagggcaggtgggccaccctggccacagccagctcatcaagtaactaaagtggatgtagtgcaaatgtcgcaaccaagtactatggacacgctacctgcttgccttaagggtcatgtggcaatgtggagccaaaggcaggaccttgtccttatcctgggtgcctgtgtcctcagtcacagaaagagccccaagtcttcccaatgtgcatgggacaagggttgacctctcctgcctccttgttagttgagagctcctgggtccaggaatcaaggctcaaactttgtgcttctctttgcagtctgtgtcccctgctggcaccagcaggccaaagatggacagaagaatatctgggccactcagcccatggcagagcacccagcctgagcccaacctcagaacatcacaacagcccttcagcactggccaggtgtccaagaaaacccacagggtggtacagaggcccactgagcaggatgtgatgcacagttccacgggacagaggggcatgggtggtggtgtccctaggggagttccgctgttctcaggtggctaccaggcctgggggggccatacagggtcaccgaggcaatgtggttgttctgcatgacctggtgtgagaagaggacagtgggtcaagggggagaggtaaagggatgtaggcagatcctgtgcatgagggctggaggttgtgtgacatacctgcacctaatggctgggtttcccgactcctcaacctcccctggttcatgctaaaggcccccctctgcctgagatctgcctgtttctcaatggttacacacagcctttaccatggccacgtgtccagtccttctggaactgttaagtgtctgctggagatactgcatccacagggaaaacaagggcagcttgctgttctcccaagtcagcagggcctccagagccactcactcccctacaatgcatttgttcacatgccactggagggcccccaacaccctctgctgggccccacttgccctgtggttcccttccctgctataatcatgttgtcagatagaaacttgggatccgttacctcccatcttgttggacacagaccactgcttcggcctctgtgaccccagatttctcaacatcatttctgaaccttcattgttaagtgtggggaggccaggtatgcagcagacacggttgctgaagaaggatgaatctgcccactatggcagtgatgccctccccaatttccctccatcattcacctggccctgccatgaccagcaaccccccaggcagtttatttctagggcttccacagcttacctcaaagatcattcgctgaagaccaaagcagaatgtggaaccaaatgggttggtgktgtttggggaggaagacctgagrccaragaattcagaattagagaggcagacagaggccacggccttaaagcaagggatccagtcttttctggggtatgggatactggccagtagtctctcatggctgtgagtgtctgtctgtttcccacacaggcctgcaagatcctaggggtagggatggtctcactcaactcagaattatacatacagagcccaacaggacaaaaaagttactgtggaactggactagggtggcgaggagtcaagagggccctcttgagtgagagaatctcaggcagcatggcaaccaggaacggggctgtggacttcagcaggcagcagctcaaagctcaaagggaaaaagagcccaggccagccagccaagccctccttccttattgaataactgagggtgagaaggcccccatacctagaggtaggcttgggagaggggagctacccctggggacattctctctatcaaagatgaacacacagaacagttgactcagtcctaatgtgcagagtggggcaggaagtatgcttgtggcaatatcagaaacttctgtaatttttaagcaacatccactgtgccaggcttccctgggctttctgggctctgaggagtcaggtggggtggccggggacatcaaactcccactcacctgtgcaggacaacaggcttctccacagggtggcccaggagctcctggatgttgtcccactgcaagagggatagaggggagcaggggttagtagggacatgaacatgtctgtgaccaatggctggcctagaggacacagccccatactgcctgcaggctcatgtccacctcattctcaggctatgccaggtaggaagataggtgctcaccttgctgtaggtcgtgcatgtttctgtctgaccatctgcgttttctgaaaagagaagacagtggggcagatttgtagctggcccagcctacctgtggccccagccctaggtaggaaccagacctggtgtccctttgcactggggttggagtacatggggaggattaacaggctgttttggagttccagggtggaagaggatggaggggtgaagggaggtcagtcaggtgtgagcaacaacaattggcagtgggtggcaggcaacaaggatgggctggggccccctggatgatcatctgtagataagaaactctcccctccagaggccggcaatcccacagtcataggaagaggcctcaagggcctctaggagactcagaccaagaacactgcagcccccagaacaatgagcccaccccagaggaactgaggccatgggcagaagctccacacatccaaccactgcttcgatctttctcccttttcatagtggaaaacagactctaaaacccctcccttaccctgagagctttcactactcacctttctttatggctagtgggatcttgaactcacagcgatgataactagagagaaggcaaatgggtaaaggctgggcctcctagaaggcctggccactcccatattccaaccccacaccccaggagaaacagaaccaaacacacctgcccaaagccctggctctgagtgcctgacagtgttcactgggggaggccagatttaggcacggaagtcgaacagaaaagatcttggccctgggttctggagagcctattaccttggataagacatcaagctttctgaacttatttccctatttgtaaaatgggttcaaacagagagatgtaaggcattggaccctgtgccaggaacacagcaagcactcaggaaattcacttcccatgaaacagcaagaattcaggtgtagataaattagtgaacacccaaagccaaaagctctttcctggggttttcagcccaaaactcacttcacagaggggaggtacagacaggtgtactcacatgttgaaattataatgcccagggtaattggtgtgtagaacaaacttcttcactttgtgtgtattcgcatcaaagaggatgtcctgggatagaaaacaagggtactcaaggagggaatgttactgaggcagggcagaggcctttccaaaggcatgtccaacttgggacatccagtgcactccacagcaagaatgcctgcaggcatcacctttcttccagacaacagtccaggggacaggccaagcagcttttagacattttctttcttcttttttgagatggagtctcactctgtcatggaggctggagtgcagtggcactgtgtcagctcactgtaacctctgtctcctgggttcaagcaattctcctgcctcagcctcccgagtagctgggattacaggcgcccaccaccacgcctggctgttttttttttaatttatttttatttttagtagagacggggtttcaccatgttggccagcctggtctcaaactcctgacctcaggtgatccgcccacctcggcctcccaaagtgctggcattacaggtgtgagccaccgtgcctggccccataccttatcttttctgtcatgtgtgttacctctcaacacactgtactatccattttagctctttgtcctgctaagtggctttcttccctctgaatataagctccgtgagggcagggttgtccgtctgtgttcttcactgctgtatcccgaactcctagagtagtgcctggcacacagtaggtactcaataaagatttactgaataaaggtgctttacaaactttcaaggcaggttcctctttacagatgaggaaaccaaggccccaggaggtgcagtaagtcacctagcgtggtgcccagatggtaagcagcagagccaagagaatccgaggatgcagactcaggactttgggaggccaaggcaggaggattccttgagttgagaatacaggtgcacaccaccacgcccggctaatttttgtaattttagtggagatgggggtttcaccatattggtcaggttggtctcgaactcctgacctcaggtgatccacccaccttggcctcccaaagtgctgggattacaggcgtgagccaccatgctggccaagtcacctggttcttgaggggctgaaggccacttgactattctgaattccacaatccatcagaccctcctggcttccattacaccctctgtgggagtcagcaaccccaggaactgaagttccagcctgacctctctctaggacttggacctggatttgatgccacccagtgaacacttccctcctatcccctaccctttccagcttcatatccatccagctgcttgggcccgtgacctcagggtaacctctgactctacccctgtacccacagccaactaagtcctactgaggccagtccattctctccatcttccctgtcacctattgatggcagcaatggcccatctggagtggccgctgcaaggatgccgactggagcagaggaagtgtggccgggacctctgttttcccatagaactatgcagagcctatgggaactgggaacaggtgagagccctggcctctactaagttggcagggcaggagcccatgctcctgggtgtagctgcagcctcccagctgcagctccagaccctggcatccctgcactctcaggggcccagaaggccccttgccccggcaggcttgaaagtgcctgctcccactacctagcctctccccactcccggtgcctgctctggggaggggcaaagttgtggctgagcccaggcgctgtcacgacctggttgggagtgcacgcactcagggcagcactgacacactagccccctgccgcctcggcatgaacagcatgggcaccatggatggcacgctgatggtggtaggaagcagaagggctcctgggcagaaagggcttggtctgaggtgaaaccccaccttcaagcctgggatggcctgaggcctgggggccgggctgccagctctgggtagtctgtgggtggagtgagaatttatggtgctttttccgggcctgctcatggaccaatcagcatgcacttcctcccttctgagcccataaaaaccctggattcagccagacttggacagatgtcaatactaccaactgtgggaagaagctacccacttcaggactccttgactcctcaggatgacctgcctacagaaagaagctacccactatgggtcttctctctgctgagagctggatactcgtcaggatgacctgcctgcagaaagagctacccaccatgggtctcctctgaactgttctgttgcccaataaagctcctctcctttttgctcaccctccagctgtctgcatacctcattcttcctggccgcaggacaagaactcgggacccaccgaatggtgggactgaaagaggtgtaacacaaataaggctgaaatgccctgccccgctttccacattgtgggtgacaagaagagaagagctgcagcccttcaggaagcccagacctaggagctccccgagccagagctgtgacaccctgtttggggctctgtgtggttcttggtgtccccaagcttccgggtgccaccgcattctccttgtccagacatgggtgcccgcaatggaagccgcttgcggtacacgtgatctagcctcacccttacgtggagctggtgcctatgctggcgcctggagctgcctgccccaccacagcagtcagcatgcctggctgggcacagtggccggatgccacattcactcgctcacacaccccttgccactccatgcctggcttgcccttggcaggcatgggatccaggctggtagcatgagctaagcgcagcct

SEQ ID NO: 93543 - DNA, 20582 bp, Homo sapiens
gggttggatcttacgaagtacattctcatgggcggggagaatattacaaagtaccttcttaagggcagggggaggatattacaaagtaccttcttaagggcagggagggtgtattgtcacaaagtcaattgatcaattagggtgaggcaggaaccaatcacaatggtgggatgtcatcagttaaggcaggaactggctattttcacttcttttgtggaaaaatactggccctctggagcgggggctggaatattggcaggtgtggaggcattggctatttcttttgctgtcctgtcgacataggcatttccttttgcaataagatcagtaggtttctggtgtcctttacaatgaatgactgcagccatggccggcgggagagcaaccttaaggagggcctttattagggagacattgatcatggaagagccttgtgtggtaaggaagcctctttcagcccagagggcagcatggttatggaggatgtggaaagcatattggagtcagtgtaaatgttaatgtgcattctgttagcaagagagagcgcacgagttaaagcaattagtttggcttgttgggaagtggtggagggaggaagtgcagcagcttcgataataaaggtgtgggacaagacatcatatccagctttagctggtgaaaattgattgggtttagaagcactgccatcgataaaccaagtgtggcctgggtttggaattggaagaatagaaatctgaggaaagggggaagatgctatgtgtattagggaaacacagtcatgtggttcaggacttgtgttgggtgttaagtgagaagctgggttgaaatcgggcccataggcaatagttactgttggggtttcagtaaacagtgaacagagctggaggagtcgaggggcagacagtaggtgtgaaaggtgtgaggaggatattaacgcttgaaggttgtgagaactgtagagggcaagtggagcctggcctgtgattttgagggcttccagaagtattaaagtggtggctgctgccacatgtagacatgagggccagcctaaaacagtaaggtcaggtcgtttggatagaaaggctgcagggcacagtcttggctcttgtataagaattctgaccacacagcccagcacttcggctgtgtgtaaggaaaaagggttgggctaagtcagggagagctagtgtgggagcagtctctatagctgttttcaaggaacggaaagaggagtggggaaaggatttaggatctatgggatcagctagatttccctttgtgagtttatataatggttttgttaggatggcaaaaccaggtatccaaaggcaaaagtacccaaccatgcccaggaaggaaagagtttttgctttgtaggaggggttggggtttgagagatcagccggacatgatcggcagggagaacacgtgtgttttcatgaagaattatgctgaggtaggtaacggatgaggaagaaatcagggctttggagggggatacgcaatatccctttaagaatagatgttggaggagcaggagggtgtcctgttgggaagatttgcaggaggggctataaagtagaaggtcatcaaaatattgaataaggtgagaagcaaaggggtggaaagaaagtaaatcatgagaaagagcttggctgaagtaatgagggctgtctctgaagccttgtggcagtacagcccaggtaagctgctgggactgatgggtgtcagggtcagcccaggtaaaagcaaaaagaggctgggatgaggggtgcaggggaatggtgaaaaaagcatctttaagatcaagaactgaatagtgagttgtgtaggaaggtattgaggacaaaagagtgtacgggttggtccccacagggtggataggaaaaacaattttgttgataaggtgcagatcctgaactaacctgtaagacttgaccagtttttggacaggtaaaatgggggaattgtaaggagagtttataggctttagaagcccatgctgtagcaggcgagggataataggctttagttcccttaaagcctgttgtgggatgggatactggcattgagcggggtaagggtgattaggttttaatgggatagtaacgggcgtgtgattggttgccggggagggagtaggggtgtcccctccctgtgggtgaaggtgggagggatacaagaggaagacacgaaggacgctttggtttgggaagaagggcggcaatgagatgtggctatagtccaggaatggtcagggaagaagacaatttggttaaaatgtctcggcctaataacagaactgggcaggtggggataactaagaaagagtgcataaatgaatgttgtccaagttggcaccagagtgggggagttttaaggggttttgaatcttggctgtcaatacccacaacagttatgggggcaagggaaacaggcccttgaaagaaaggtaatgtgggctgggtgtggtatctcacgcctgtaatcccagcactttgggaggccgaggcgggcagatcacctgaggtcaggagttcgagaccagcctggccaacaaggtgaaaccccatctctactaaaaatacaaaaattagccgggtgtggtggcgggcatctgtaatcccagctactcgagaggctgaggcaggagaatcccttgaacccgggaggtggaggttgcagtgagccgagattgctccgttgcactccagcctgggtgacagagagagactctgtctcaaaaaaaaaaagaaaggtaatgtggatgggtagctcccatatcaattaaacaggggatggccttaccctccactgtgagagttacccgaagctcggcgtccatgatggtccagggggcttccgaggcgaccaggcagcatcagtcttcagccgctaagctgagaagatctgaaaaggagtcagtcagagagcctggggccagagttccaggggctctgggagtggctgccaggctagttggacggtctgatttccagtggggtcctgcacagatgggacacggcttaggaggaatcccaggctgcgggcattccttggcccagtggccagatttccggcacttgaagcaagatcctggggcaggaggtcctggaggaatgcctggcagatgtggtttaggcgttttgaagttctcatgttctggagatgtggctggcgtttctctctcagcggaggcaagtaattacaactcagaaatacgttgccacttggctgtatcttttttattattgtataccttgaaggcaaggttaattaagtcctgttgtggggttcgagggctggaatctaatttttggagttttttctaatgttaggagcggattgagtgataaactgcatattgagaataagacggtcttctggtccctctgggtctagggtggtaaagcatctcagggttgttgccaaatgggccatgaactgggccgggtttttatatttgatggaaaagagcctaaatgctaactgatttgagagaggtcagctaaagaaaaaggagcattaaccttgcctatgccttcagctccagccacctctctaagaggaaattgttgggcaggtgggggagggctgtgtcacggaacgaaactgtaagccagaccgggtgtgaggaggggaggtgatagaaggattatagggtgggggagcggaggttgaggaagaattgggacctggctctgcctggcaaggagcagcctggggaggaggggagaggtcagatgggttcgtagaaaaggaggattcaaaggactcagagcttggggtgcagactgaaggaacagacaggagagaaagaagaaagatttgggacgagtcgcattgggagcagagactagggagggaccagtgtgtaaaagaatgcctggacgcggccgggcgcggcggctcacgcctgtaatcccagcactttgggaggccaaggtgggcggatcacgaggtcaggagatcgagaccatcctggctaacacagtgaaaccccgtctctactaaaaataaaaaaaattagctgggcatggtggcgggcgcctgtagtcccagctactcaggaggctaaggtaggaaaatggcgtgaacccgggaggcggagcttgcagtgagccgagatcgcgccactgcactccagcctgggtgacagagcgagactccgtctcaaaaaaaaaaaaaagaatgcctggacgtcaggcacctcggaccatttgcccatgtttcaacaaaaatcatctaggtcttgtaaagtggagaaatcaaaagtgccgttttctggccatttggaaccgttgtcgagtttgtattggggcctagcagtattgcaaaataaggcagttaggtttttaggtcaggtgtgagttgaacaggttttaagttcttgagaacacaggctaagggagaagggggaatggagggcggaaggttgcccgtagaaaggtagagacacggagaagtggggctgtggggggtgagcagccaaagcaggtgtccccgcaattgacttgccaccaagggaatgtgggtgatgagcaaggcaggcgtcccccgcggtgatcagacaccaatggaatgtgggtgaatgatcagggcaggcgtccctgcagtgattaaacaccaagggaagaccgtctttccaagtccgtgaccagcgccggagttttgggttcacggataaaatgtgtctcctttgtctctactacagaggaaaaataactggaattggaaggacagggagattgaagcgtagcgagagaggctggagaagagagtgaaaagactgcttaccccatttgaaattggtgagatgttccttcggctggttggtctgaggacctgaggttgcaggtggatctcctcacggagtgagggcgaggacaggagaccggtctcccaaaggagtcctcctgtcctgggtcttcggcaccaaatgtcacactcgcccgtgtgaagagagtctaccaaacaggcttcgtgtgagcaataaagctttttaatcacctgggtgcaggcgggctgagtccgaaaagagagttagcaaagggtggtgggattatcattagttcttataggtttgggataggcagtggagttaggagcaattttttgcgggcaggtggtagatcttacaaagtacattctcaagggtgaggagaatattacaaagtatcttcttaagggctggagggggagaatattacaaagtgccttcttaagggcagggaggaggatattacaaagcaccttctcaagggtgacgagggtatattgtacaaagtatgttcacaagggcgggggaatatcacaaagtacattattgcaagggggtggtgtattgtcacaaagtcaattgatcagttagggtgaggcaggaacaaatcgcaatggtggaatgtcatcagttaaggcaggaactggctattttcactttttttctggatcttcagttgcttcaggccatctggatgtacacgtgcaggtcacaggggagatggtggcttagcttgggctcagaggcctgaagaattgttcccttacaaaagtcatgtattgtctgattcacccacttgctccctgcactctccctgggtctggtatgcaataggtgcataagcaatgtttgttgattgactgactgaatgggtgggatggttaaaattctgctcacttccctccctttaccatctcccgagaaacccatggggcccccgtgggacccactttgagaatcaaagctttagaccagcgttttcactttatggatggaccagctgtgcacccaaagccaggcagccttcaggctacagatggagcccgggtcacgtcccgggcctccaagttcctgcacccttatccggtctcacaggcgagattaggacaccccggaaactggcttccagacaatatccctgctgcaggggagaacaccctaggtcacctggtgacaggtgtgtgctgcaatgtacacgtacttgttcctcctcttctctgttcccacttcctccccgccccaggaaacctgccatggcctcctggtgagctgtcctcatccactgctcgctgcctctccaggtaagttatcccattctaccttttccccccacccagaatgcctgggagacctcccaggaaaggcytcctggctccgtccctcctcccctcggcccccatcctatgggccctgattcatgatgtggctgggctggcacaaaatcccggtggagagtcaccaaactgtccatgacctggaatgtggccagcaccccctagtcacaggcaggggtctttctgggtgtggcatgcaccaccgttggggaggacatggaaggttctgggtgatttgccaaaccggaaggaaagagtgacgtttgtctctctctctggcagagctctggagtggagtcccctctgcaccccaaccccatcaacagcctccccccactcatcttttctggccttggattctctctggccctgccctgcctggggtggacttaagatgcattttttttttctttttctttgagacagaatcttggtctgttgcccaggctggagtgcagtgatgcaatcatggctcactgcagcctcagactcctgggctcgagtgaccctcctgcctcaggctctggagtagctgggactacaggtgtgtgccacctcacctggatactttttaatttttttttcttttgtagagatggggtctcactatgttgctcaggcaggacttttttttttttttttttttttttttttgagacagagtcttgctgtgtcgcccaggctggggtacagtggcatgatctcggcttattgcaacctctgcctccctcgttcaagcaattcttgtgcctcagcctcctgagtagctgggattaaggtgcctgccaccacacctggctaattttttatttttagtagagacaagatttcaccatgttgccaagggtggtctcaaactcttgacctcaggtgacctgcccacctcagcctccgcaagtactggcattacagccatgagccattgcacccggccaatcaggcaggtcttgaattcctgggctcaagagatctgcccacctcactctccgaaactactgggattacaggcatgagccaccacgcccagctatttttttgctttttgcttcctgatctttgtgatgtctcagcagagtagcattttttaatctttttctaggaaaaaatatcttgggttcaactggggtgggatctcagtcctcatcgcgatctcacatgtctgtgtgaagagaccaccaaacaggctttgtgtgagcaacaaggctgtttatttcacctgggtgcaggcaggctgagtccgaaaaaggagtcagcaacggtggtgggattatcattgttcttataggttttgggataggcagtggagttaggagcaatgttttgcaggcagagggtgaatctcataaagtacattctcaagggtggggagaattacagagaaccttcttaagggttggggggagattacaaagtacattgatcagttagggtagggcagaaacaaatcaatggtggaatgtcatcagttaaggctattttcactttttttgtggatcttcagttgcttcaggccatctagatgtatacgagcaggtcactggggatatgatggcttagcttgggctcagaggcctgacattcctgtcttcttatattaataagaaaaataaaacgaaatagtggtaaagtgttggggtggcaacaattttttggggtggtatggagagataatgggcgatgtttctcagggctgcttcgagcgggattaggggttggtgtgggaacctagagtgggagagattaagctgaaggaagattttggggtaaggggtgatattgtggggttgttagaaggagtgtttgtcgtatagaattattggtgatggcctggatgcggttttgtatgaactgagaaactaaacaaaagagtggctgccaggtgagttgaacagtctgattttcattgggggtccttcacagatgggacatggcttaggaggaatcccgggctgcgggcattccttggcccggtggccagatttccaaaacttgtagcaagctcctgggggaggaggttctggaggaacccctggcagctgcggttcaggcgtttggagttcttgtgttctggagatgtggctggggtttgtctcacggtggaggcaaggaattgcaactcagaaatacattgctacgtggctgcctctactcttattattgtacaccttgaaggcgaggttaattaagtcctgttgtggggtatgagggccggaatttaatttttggagctttatttaatgtcaggagcagattgggtaataaaataaaatgcattttgagaataagacggcattgtgacctttcagggtctagggctgtaaaacatctcaggattgctgccaaatgggccatgaactgggctgggttttatatttgatgaaaaagagcctaaacgctaactgatctgggagaggtcggataaagaaaaaggagcattaaccttgactgtgcctttagctccagccacctctttaagaggaaactgttgggcagatggaggagggctagtcacggaaagaaactgtaagctggactgggtgtgaggaggggaggtaataaaaggattatagggtggaggagcagaggctgaggaagaattgggacctagctcggcctggtgaggagcagcctgggaaggaggggagaagtcagatgggtttgtagaaaaggaagattcaagactcagcaacgcttggggttggaactgaggggacaggcaggagggaaagaaggaagatttgggatgaactgcattgggaacagagactagggagggaccgatgtataaaagaatgcctgaacgtcaggcacctcagaccatttgcccattttatgacaagaattatttagatcttgtaggatggaaaaattgaaagtgccattttttggctatttggaaccactgtctggtttgtattggggtcaagcggcattgcagaagaaaataagacatttaggttttaggtcaggcgagagttgaagaggttttaagttcttgagaacacaggctaagggagaggaaggaggaatggagggtggaaggttgcccatagtgaagtaggcaagtttaaagagaagggtagagacacggagagaaggggtgggggatgcttatcccccaggaaagtggagaagggatgggaggtgcttgccccccaggaaaatggaaacggggtggggggtgcttgcccctcaggaaagtagagaaggggtagagacacggagagaaggggtaaggtgagcagccaaagcaggcgtccctgcaattgacttgccaccaagggatgtgggtgaatgaccaaggcaggtgtccccgcggagatcagacacaaatggaatgtgggtgaataatcaggcagtcgtccccgcaatgattaaacaccaagggaaggctgccttcccaagtccgtgaccggcgccagagttttgggtccacggataaaatgtgtctcctttgtctataccagaaaatgaaaggaatttaaattaagagaagggagagattgaaggatggtgccaagattgaaaggagaaagaggttgagggatagtgagagaggttggagaagragtaaaagaggccacttacccaatttaaaatcagtgagatgttccttgggctggttggtctgcggacctgaggttgtaggtggatctcttcagggagtgaaggtgargacaggggactgctgtcccgaaggagtcccgctgayccgggtcttcggcaccaaatgtctcatgcgtccgtgtgaagagaccaccaaacaggctttgtgtgagcaacgaggctgtttatttcacctgggtgcaggcgggctgagtccaaaaagagagtcatcaaagggtrgtgggattatcattggttcttataggttttgggataggcggtggagttaggagcaatgttctgtgggcaggggtggatctcacaaagtacattctcaagggtggggagaattacaaagaacctttttttttttttttttgagacggagtctggctctgtcgcccaggctggagtgcagtggctctttctcggctcactgcaagctccgcctcccgagttcaagccattctcctgcctcagcctccggagtagctgggaccacaggcgcccgccactacgcccagctaatttttttttgtatttttagtagagacagggtttcaccrtgttagccaggatggtcttgatcttctgacctcgtgatctgcccgcctcggcctcccaaagagctaggattacaggcttgggccaccgtgcccggcctacaaagaaccttcttaagkgtgggggagattacaaagtatattgatcagttagggtggggcagaaacagatcacaatggtggaatgtcatcagctaaggctattttcacttcttttgtagatcttcagttgcttcaggccatttgaacgtatatgagccggtcgtaggggatatgatggcttagcttgggctcagaggcctgaaaatcgcccccaccaatcacctgtttcccccaatctaccctcctgaaggtcactgacaaagacttcattgtctcctaggagaggctgccatatatccagggctgacgtaattccatcttaatatcagttacattataaaaatttacctcgtgcctgaggccccagagcccaagggtgcaaagcagtaattggtcaaagttcaacttccctcccactctgggctcaggctgtcccctgagggcctgtgttttgagtctctttccagaaccttggtgtgaacttaggtcttggcgtcgggatcccttttcgtcacactcaggtgacctacagggagctccgctcgacactgcaaggcttagaccagttcggtccaacagagraagcaggcaaccaccatgtcatttgaaaacagtttcatcgggatataattcgcaacccatacagtgaatccatttaaggtgtgtaagtcaaaagtttttcgtgtattaccttatgtttatttatttatttatttatttatttattttkagrtggagtctcgctctgtcccccagtctggaatgcagtggcactatctcggctcactgcaagctccgcctcccgggttcacgccattctcctgcctcagcctccccagtagtagctgggacaacaggcgcccrccaycacgcttggctaattttttgtatttttagtagagacggggttttaccatgttagccaggatggtctcgatctcctgaccttgggatctgcccacctcagcctcccaaagtgctgggattacaggtgtgagccaccgagcccagccttttattttatttttttaagacaaggtcttgctccatcacccaggctggggttaagtggcatgatcacagcttgctgcagcctcaaacttccagactaaagcaatycccccaagtagctgggactacaggcgcatgccaccttgcccggcaaatttttgtatttttagtagagttgggattttgccatgttgcccaggctggtctttttttaaaaaaattatttatttatttatttttgagatggaatcttgctctgtcacccaggctggagtgcagtggcatgatctcagcttactgcaacctctgcctcccaggttcaagtgattctcatgcctcagcctcccgagcagctgggattacaggcatgagccaccacactcggcttatttttgtatttttggtagaaacagggtttcaccatgttggccaggctrgtctcaaactcctgacctcaagtgatccacctgcctcagcctcccaaagtgctgggattacaggcatgagccaccaaacccggctattatttatttatttatttttgagacacaatctccctctgtcacccaggctggaatgcagtggtgtcatcttggctcactgcaacctcygcctcctgggttcaagtgattctcgtgcctcagcctcccaagtagctgggactacaggtgtgcaccaccacacccagctaatttttgtatttttagtagaaatggggtttcatcatgttggccaggctggtcttaaattcctgacctcaggtgatctgctcacctcggcctcccaaagtgctgggactacaggtgtgagccactctgctcggccggtcagctcatatattacctgcaaaacccagtcccattgtacctttctctggctgagtcatggattcaagccttgcctcagtgacatgggaagcaatgatgaccggctatgccttctcccctgcctccagggcacttgtatttcagtagactggggaagacttcggggattccaggaaaggtcttgtctaataggtagaaggaagtggactctgggacaaggtccctttgttcaaacaccagctgtgctgatttttgctgtgagtcacttggtctcagttttctcatctgtgaaacaggaataatagcagctcctctcaggactcatggcccggagctttggtaagcaggagattgtcatcaatgaccctcactcctctctcctctcttcccagatactctgacccatggatcccctgggtgcagccaagccacaatggccatggcgccgctgtctggccgcackgctatttcagctgctggtggctgtgtgtttcttctcctacctgcgtgtgtcccgagacgatgccactggatcccctagggctcccagtgggtcctcccgacaggacaccactcccacccgccccaccctsctgatcctgctayggacatggcctttccacatccctgtggctctgtcccgctgttcagagatggtgcccggcacagccgactgccacatcactgccgaccgcaaggtgtacccamaggcagacayggtcatcgtgcaccactgggatatcatgtccaaccctaagtcmcrcctcccrccybccccsaggccgcaggggcagcgctggatctggttcarcwtggagycaccccctaactgccrgcacctggaagccctggacrgatacttcaatctcaccatgtcctaccgcagcractccgacatcttcacgccctacrgctggctggagccgtggtccggccagcctgcccacccaccgctcaacctctcggccaagaccgagctggtggcctgggcggtgtccaactggaagccggactcvgccagggtgcgctactaccagagcctgcaggctcatctcaaggtggacgtgtacrgacgctcccacaagcccctgcccaaggggaccatgatggagacgctgtcccggtacaagttctayctggccttcgagaactccttgcaccccgactacatcaccgagaagctgtggaggaacgccctggaggcctgggccrtgcccgtggtgctgggccccagcagaagcaactacgagaggttcctgccrcccgacgccttcatccacgtggacgacttccagagccccaaggacctggcccggtacctgcaggagctggacaaggaccacgcccgctacctgagctactttcgctggcgggagacrctgcggcctcgctccttcagctgggcactggatttctgcaaggcctkctggaaactgcagcaggaatccaggtaccagacggtgcgcagcawagcggcttggttcacctgagaggccggcatggtgcctgggctgccgggaacctcayctgcctggggcctcacctgctggagtcctttgtggccaaycctctctcttacctgggacctcacacgctgggcttcacggctgccaggagcctctcccctccagaagacttgcctgctrgggacctcgcctgctrgggacctcgcctgytgrggacctcacctgctggggacctcacctrctggggaccttggctgctggaggctgcacctactgaggatgtcggcggtcggggactttacctgctgggacctgctcccagagaccttgccacactgaatctcacctgctggggacctcaccctggagggccctgggccctggggaactggcttacttggggccccacccgggagtgatggttctggctgatttgtttgtgatgttgttagccgcctgtgaggggtgcagagagatcatcacggcacggtttccagatgtaatactgcaaggaaaaatgatgacgtgtctcctcactctagaggggttggtcccatgggttaagagctcaccccaggttctcacctcaggggttaagagctcagagttcagacaggtccaagttcaagcccaggaccaccacttatagggtacaggtgggatcgactgtaaatgaggacttctggaacattccaaatattctggggttgagggaaattgctgctgtctacaaaatgccaagggtggacaggcgctgtggctcacgcctgtaatyccagcactttgggaggctgaggtaggaggattgattgaggccaagagttaaagaccagcctggtcaatatagcaagaccacgtctctaaataaaaaataataggccggccaggcacggtggctcacgcctgtaatctcagcactttgggaggccgaggagggtggatcacgaggtcaggagatcgagaccatcctggctaacacggtgaaaccccgtctctactaaaaatacaaaaaattagccaggtgtcatggcgggtgcctgtggtcccagctgctccagaggctgaggcaggaggatggcgtgaacccaggaggtggagcttgcagtgagctgagatggcgccactgcactccggtttgggcgacacagtgagactccatctcaaaaataacaataataataggccaggtgcaatgggtcacgcctgtaatctcagcactttaggaggtggaggcgggcagatcacctgaggtcaggagttggagaccagcctggccaacatggtgaaaccccgtctctactaaaaatacaaaaattagcctggcgtggtgacatgcgcctgtaatcccagctacttgggaggctgaggtacgagaatcacttgaacccaggaggtggaggttgcagtgagccaagattgcaccactgcattctagcctgggtgacagagcaagactccgtctcaaaaaaaatatatatatataaaataaaataaagtaaaataaaattgccaggggagaccaagacgtgggtggtggtggtgaatcccaggtgctctctgagcctcagtttccccatctgtacagtggaggtgcagaggtgcctgtgatgcctccctgaggcccaggtgggagggtggaggggcatagggtggggagggtgtggggggcctgaagagtctctaccaaaccctctggtgaccccgggcctgagccagccttgctgggcccatcactcacctgccacccacaccacacacctgggcccctctccccaccacctggctgcaagccacgggtcctgggagggggacggggccctcggcaggccaggccagggcttcctaacaggctggggcaggcccagtccccagggggtaagaggtgtggggacaggctgctctgtcctctgacgcccctggagcccctgtggtctccgcctctacctcagctgatgtcagagtgaagagctccctttcccaacttctctttctctgcctctggaatttcctctgaggcttagagggacatggaaaccctccctgggtcccacgagggcagaggcccagccacctggccgatgttggggggctctggcctgccccctctggaaccccagcactgccctcaaacccccattgcctccctgtatgccccggatctcacatgtggttcatggcacgcccagcccgtggggccttctccctcctcctgggcaccagctgcccttggctcccagccctgggccccagggggagaaaaatttccagcaggctggcagctccatctcccacccagccctggccagggaaggcactggagggtccaatgagggccaagaccccaacgaggtgcacagatggcctaactgcccctgcaagcctcaagcaggtcctagcttgccctgagcctgagggaagaggtcctcatgataccctactctgggctctgggctcagctccttggcagggaggtcccacctggcactggtatggtgagccctgctcagagaggaccaggaaacctctcaagtcacacagcagtttcaggatgagcacacgttctctctggcaccatccctgaggtcagcccaaggtcctccaccctccctttgcccagcgatcacatcgatggaatgactagagccctactgtccctcactagagacctacctttggattttgaatccttaagaaacaacccagctgggggcggggcgtggtggctcacgcctgtaatcccagcactttgggaggccgaggcgggcggatcacaaggtcaggagatcgagaccatcctggctaacatgtctctactaaaaatacaaaaaaaaaaaaaaaaattagctgggcgtgatggcggacgcctgtagtcccagctacttggggcaggagaatggcgtgaacccaggaggcagagcttgccatgagccgagatcgtgccactgcactccagcctgggccacagagcgagactctgtctcaaaaaaaaaaaagaaaaaaaacccagctgggcggagtggctcatgcctggcctctaatcccagtactttaggaggctgaggcagacagatcacctgaagtcaggaggtcaagatcagcctggctaacatggcgaaaaccagctctattaaaaaaatacgaaagttacccagtgccgtgtcacgcgcctrtagtcccagctactcgggaggctggggcatgagaatcgcttgagcccgggaggcataggttacagtaaactgagactgtgccactgcactccagcccgagtgacagagcaagattccatctcaaaaaaaagagagagataggggtatctctgttttccctaggctggtctcagactcctgggctcaagcgatcttcctgcctctccttcccaaactgttgggattacaggtgtgagtcactgtgcatggcctcagaagtcttttttttttttttttttttttttgagacagagtcttgcactgtcgcccaggctggagtgcagtggctcaatctaggctcactgcaagctccgcctcccgggttcacaccattctcctgcctcagcctcccaagtagctgggactacaggcacccactaccacgcctggctaatttttttgtatttttagtagagacagggtttcaccatgttagtcaggatggatggtcttgatcttctgatctcgtgatctgcccacctcggcctcccaaagtgttgggattacaggcgtgagccaccacgcccggcccccagaagtcatttttttaataagttacagtcaacctcaccagtcaaggaatgagacatgagtggaattaggttgccacttctggagctctgggagaccccaaccccctggcccatccctacctcccagaacctcactggtctgggcgtggctgggcactgagatagtagaactcaggcagcatgatgcagcctcccagaaatgatttctagaacagggcagtcgtgatacttggaggctgggctttgagctcggtcacctttgcacccagcttgggagtgagagagtttaaggtcatcctccctcaaaaccagtattccagatcatttctctccattccaggaagtttgcatagctccctggacttctgctttgcactgccctgcaggagtgggtggggaaaggaagtggctttgaggcacacagaggggcttggtgaggccaccggaggaagcttctgccaccaatatgggacctgtgcccagcctaccagaagagagcatctgaaaacatgtatcgacatggtaacccctctgcttgaagcctcacatggctccctattgccttggtgctgaacaccctatggctgaccgtggcccagcctctgcaacagctctgcctcctctccagtggtgaagacccagcctgctgagactcctcctgcagttcctcaacatgcctgcatttctgctgcctcagggcctttgcgaaggttgttccttgtaactggaatgcccttccatcccttttttattcaaaaggctgcaattttaattgaagaaagttcccttccaaggttcatgagttgcctgacttgcccaccggtttcctgcaagatcccttggcctggcacttagtgctcaggaaatatttggtgatgggccaactgagtgagaaggtgggatctggtgggaaggaaagcggaaaggtagaaattctgctcacttcctcattcccacctcccaaggaacccctggtgtccctgtggaacccgctttgggaaccggtggttcaggtcagccttttcactttgtactcaaagccacatcgcattgaagccacaggtggggcaaggtcatgcatgacctgagtctccaaatcccttcaccctgtttggttctgcaacggggattaggggagccccacgatttgttttcaaaggatgtccgggctccaggacaggatgccctgggtcacctgatgacaggtgtggtggttggaaagggcctggtttcagctccgggtacacttcctccttccttctgctgcgtggtgtggcctcttccacgtcctcagaatccagctgttactccgtccgcggcctctcagctctagggccctctgcacactggcccccccaggtaaggcctcttgtcccactttcacccccaacccggatcgcatgggtccagggaaaggcctcctggctccgagcctcctcccctcagcctcagtcctgtctgctgtaattcagagtgcgggtgggctggcacaagatccctgggggagggtctgcaggctgtgcagtggcctggcatttggccagcagcccctagtcgcaggcaggggtctttctggatgcaccgaggtgggctgaggatatgggaggtctggctgatttgccaaaccaggaggaagtgggtgtctgtctgtctctcttgcagagctctgcggtagaatcccgtgccccccgaccccatcagcagcctacaccccttcatccttcctggccccggattttctctgcctctgccactcccggtggtaaaagagggcttagaatgcggtttgctttctggctttgtttttttgcatcctgatctttgtggcgtggatcgatcattttccagggaaagtaccttgggtgagatctctctcctggactcccgttccccgtttcccccaatctcccctcctgaaggtcaccggcaaagacttcactgtctcctaggaagaggtcgccataaacccaggggccacatgataatatattaatattaaatgtatctctaaacattaacctttcactggcagcccaagagcccgacagcacaaaggaatacttggttaaaattcaacctccctcccagtccgggctctgagtgtccctcgagggctgtctcttgagtctttttccagaactttggtatgcgcttgtgctctcaatcccttctcatcacacctaggtcaccatgcctggagctccgctatgcaccataaggtttagaccaactcagtttatttattttattttattttattttatttttttgagacagagtctcgctctgttgcccaggctggagtgcagtggcgcgaccttggctcactgcaagctccgcctcccgggttcacaccattttcctgcctcagcctcccgagtagctgggactacaggtgcccgccaccgcgcctggctaattttttgtatttttagtagagacggggtttcaccatgttggtcaggacagtctctaactcctgacctcaggtgattcgcccgcctccacctctcaaagtgctgggactacaggcatgagccaccgtgcctggcctttaaaaagttttattgagatatctgacattctgtttttcatcctaaatcttggcaatctagtgtgcattttaccctcagaagacaattcagacattcaatgtctgtcataactactcaatctgtatttagtttccataaaatgaggctgggcgtggtgactcatgcctgtaaccccagcactttgggaggctgaggtgggcgggtcaattgaggtcaggagttcgagaccagcctggccaacatggtgaaactccatctctactaaaaagacagaaattacctgggtgtggtggggggcgcctgtaatcccagctacttgggaggctgaggcaggaaaatcactttagcccgggagctagaggttgcagtgagccaagatcacgccactgtgctccagcctgggtgacagagcaagattccatctcagaacaaacaaacaaacataaaaagtacaggtgaagaagtagatttgcccatccaagatgttctgaaggtactcaaaagtttcccaattactgcctgtaataccagtcattgctttttttctttttgagtatctgtttcttgtgtgcttttttgtggtttttgttttctgt

SEQ ID NO: 93544 - DNA, 69338 bp, Homo sapiens
actaaaaatacaaaaaagattagctgggcgtggtggtgggcacccataatcccagctactcggaaggctgaggcaggagaatctcttgaacccaggagttagaggttgcagtgagctgagattgcgccactgcactccagcctgggcaacacagcgggactccgtctcaaaaaaaaaaaaaaaagttagtggtaagatttgaccccatctcctgcaaataaatgaataaatgtattggtggtgaaaaaaattttttttcttcaacaaatttctaatcatggccaatttttttcttgttaaccagggaagcaaaaagatgacaagaaagtatgcaagttcaggctgggtgcagtggctcatgcctgtaatcccagcactttgggagaccaaggtgggtggatcacctgagatgagaagttctagaccagtctggccaacagggcaaaatcccatctctactaaaaatacaaaaattagccgggtgtggtagcgcatgcctgtaattccagctactcgagaagctgaggcaggaaaatcacttgaacctgggaggcagaggttgcagtaagctgagattgcgccactgcactccagcctgggtgacagaggagactctatctcaaaaaaaaaaaaaaaaaaaaaaaaagagtatgcaagtttagacacagtatgaaaatgcagaggctgtataaaatccttacgggcccagtgcagtggcttaggcctgtaatctcagcactctgggaggaggaggcaggtggatcacctgaggccaggagttcgagatcagcctggcaaacatggtgaaaccccatctctactaaatatacaaaaaattagctgggcatggtggcgggtgcctgtaatcccagctactcaggaggtgaaggcatgagaattgcttgaacctgggaggcagaggttgaaataagcagagactgcagcactgcactccagcctgggcgacagaggagactctgtctcaaaaaataataaaataaaataaaataaaataaaataaaatccttacaaaaagaattagcttaagaaaaattgcagttttaattcacaatatcataaaaacataggttgttacaaaggatatttcaggaagaatgacctgagatacaaaattgctgtcaatgaacacaacagttaagttctatacatttaagaagtatatgataggccaggtgcggtggctcactcctgtaatcctagcactttgggaggcagaggtgggtggatcacctgaggtcaggagttcgagaccagcctgaccaacatggtgaaatcctgtttctactaaaaattcaaaaattagccaggtatggtggtgcacacctgtaatctcagcttctcgggaggctacaacaggagaatcacttgaacccaggaggcagacgttgcagtgagccaagattgtgccactgcactctagcctgggcgacagagcaagactccatctcaaaaaaaaaaaaaaaaaagaagtatatgataagaatacatatatgtgtgatatctggaataacaaggttttgtcccctaatatgtctgctagggccaataatcatgaaagcaacaaagggtataaagagagatcagaagtacagcaccaaaaaaaaaaaaaaacaagctctaattttaaacaagccatttttgtgttttttctaaaacttacaaagatgcagcatatacacttttcccatttcttagtttgggacatttttgccccttttaacattattaacatctttgtacatatatcctgagtacttttatttctgtaagacagattcccaatgtggcattatggggtcaaaggtccaagactactctgcccaaaggttgtagcaaattatgatcccaccaacgacacttggggtctagcagacttcagtaaatctacaaacattccagaaactggacacaaaacaaactgtatacatgagtatgtatacagggacaggtctatatcttcaacagatttttttttgagacacgatcttgctctgtcacccaggctggaatgcagtggcacaaacacagctcagtgcagcctcagccccctgggcgcaagagatcctcctgctctagtttcccaagtagctgggattacaggtgtgcaccaccatgcccggctaatttttaaattttttgtagagttgggtctacaaaacagactggtctcaaactcctgggccgaagtgatcctcctgtcttagccccagagtgttgggattacaggagtgggccactgagcccggtctcaacagacgttttaaaaaaaagtctgaagcccagataaggctgagaactagtacactataccttcttctccttaaggcattgatcaccttatacgttcattcattctgcaaactttccactgcaggttctttatatctggctttctacatataagaaggaatatatgcataaataattatgctaggcactgggaatatagagatgaatgagattcaacccctatttgccagggccttacagtatctgaggacagaaagaggagtggagatggaggtagacaggtacaaaagtataataaaacactcctggcagctactaaggtatgaggcaaggaagaagacaatgtacttggggaagagtgaatgtttcagcctaactggattataggatctaatagcaccagtttcaggagatgagggtagcctggtggtcaggatggaagtcaagggagaggcttaaaaaaaaaagccaatttcagtactacacagcctttctcttgtaactgcatagcaatataagcacataattcagactttgtagaccttttttttttttgatggaatctcactctgttgcccaggctgaatacagtggcaagatctcggctcactgtaaactctgcctcccaacttcaagcaattctccctccctcagcctcccaaagagctgggatgaaaggcacctgccgccacatccagctaatttttgtatttttagcagagatgaggtttcgccatgttagccaggctggtctcgaactcctgacctcagatgatatgcctgcctgggcatcccaaagtgctgggattacaggcatgagccaccacacctggctgatttcctagactattattaatcacaaagtgtcatcacaatttcacccacagtgagaggcactataacatgtagtttaggaagatagtctttgacatcatcttctgcagtaatttaaccttagtctttggtttccctatctgtaaaatggagacaattatacacatatcctctatttcacatttacattcttttcaaataggtgtgttaaaatcagtatgtatgtttaattttgtagttttcttctccccccaaaagctatcattaatacatctcttattcaacagaacctcagaaacaagtaaaataggtaatataacaatacacctcaattttcttatcagtaaaattgaggtaataattctatccaggtcatagggtcttatgaagatgaacggagataaagcacataaaactcttagcagtataccttccacaaaggaaatgctacatacacacacacacactcactcactcacactctctctggcataaagtgtgcatagtgactagaccagaagagaattggtttggttggaaggcctctttcataaaaggctctttcataaaagatggaagaatcttgctctggccttgctgctaactggtatcttttccttataccacggatttctggcaggatctattagaatttggagcccctggcagttctactgttttaaggttggttagatctggctgagatgcacttaacagcccttctatcagcttttctctgtaatcttcctcctaccttgtcttctggcctactcttgcctgacactactgcctcttcacaacactgcagagtaattaatatttttttaaagctcagtcagatcatgtcactgttctgttcgaaacctcccagtggctttctctttctcccagattaaaagcctgagaaaggaagaggcaggccctgacatctgagagctggtctgacacagctagacttcagggttgttagaagctggcctgatgctcacagcttggcccagttattcttctgtgggacataatctcacagaacaccaacatgagacaaggtcagtcagactataaaaaagggacacaacaacaaggccatttcaaaattgtgtctaagcagagacaagagagcaaggtcactgtgcaagccatgaaataccaaacgtccttctctgctattatgagtgactgctgcttctttactaggtatagctttatcctcactctagtctgtccatcttatagacaatacttattcagatacctagtcacagaaatgtccctgctttctgacagcacccaatccagggtgaagcctggctttcttgagccctcccgcaaatcgcccaaattctataataggttctctcaccctcaccaagctgtcccaatggtcctccacaacacctgcttcctcactgcaagaactattaataatgaactcaacttgtttaagcacaggtgtgttcctgatggtctctggctggagggcagggacaggccagagtccttacaattgtctacaaagtcccacagtggttcttggacttcatcacccatcagaatcatctggaagaattgttaaaagagaattgctggtccccaaccccagagcctgtgattgaataaagctggggttgaggtcttagcatctgcatttctaacaactcccagcacctgaggctgcagatctggggctcacactagaagactcacttctctaaaccacttgttcccccgtcttatttccctgacttagcctccttgtctccactcccatcttacttcattctactccagccacactggcctccttgctgtgttgagcctccctgggcacatgccttaggctactgctttgtctgcactcggattcgtaacacttactccctcacccctcagtgagacctaccccaatctccctacccttttcagaatttattctccacaacacgtaatcaaccttctgacatgctgaataatttacttattacatttattgttttgctctctctctgctaataaaggaatgacacccttaagacatcagctatctgagtgtattttgttcacggctgtatcctgagacctggaaaaatagctggcaagtagtagatgctcaacaaaaactttctgaatgaatgttccttccagcttttcagcttcttctcctgagtcagggcagcactcccttcagatcttcctataaatacaatctctctcctatatgtccaacctcttgacaattacaatatccagctcctgggacttttcgcttcagtggctcaggccagggatacagggcaggtaagtcagccatgggccaaggagatcaaacaacgccagaaaattactgtatcctgcatctcttcttcacccaccttctccagatgaccttatccacccatctccctcctctcttgttttccaactatttgttcacctggatttctcctctctttgaccaccaacattgttatggcacccctaaaaaaaataaaaaaagcaaccactctccccgtgctaagccaccctcatgctggggctgtcctatctccgcttctccggcaaggctcctcctgactttgtttttcctttctactccctgaaattttgcttctgaagttccattaccgcctccttcctaaattcaactgcaattttcggtcttgctctttcctgatacactgtggaatttaatacatctgtctggaaactcttcaagaacaccgcgtgttgcctctacctcctttagtgcttctactccggtccttcctagtcttctcttcataagtgtccccaagtttccttccaggaagatgggtcgtggtttccttgacgccaatgcgtttctggccgtgccctcgtcacttgcccactccggggtcacgaaggagaggccccggattccgggcgcagccgcggctgagcccggggcgttgaatgcgggtggaatttccagtctgggaaggggcggggccttggaccgccgggaagtttggtcctcagcggcttccgtcctgcagcaagtccggaagaaggtccgggggctggagtcctgggacctagctcgggaccggcctggagatggagttcgactgcgagggcctgagacggctgcttggcaaggtgcgggcagtccgctgggccagtttgggtcctcagggtcttgcggggggtgcctctgcctttggccaggttgcctccgttttgcgtttcccggcttgtagtggggcttggagccggggcggctggtctgaaaccggctatggggcgcggccccagggaggctgaggggacctggattctgatttctcccgcaactctgaggtttcccaacctccacctggtgcgagccctcctcatacccccagcttcactgacctcaaacagctcccagcacacgcctaaccacgcctttctctctttctctctgctgaaatggtctgccttttttttcttttttcttgaattgcaaagctcatcctttgtaagacccaactcagtcactccctgtaagattgaatcaacccttctgttttgaaagatatcgattatcacattgtggagtaattatgtatttacaaaccgtaatcttgctgtgagcccctttgactgcagacattgtgcttttgtattcccttcctctagccactatgtttgacaacaccataggtactaagtaactgtgcagtgaatgaaagacctgagtagatttagagatgaagacagagcttgaaggccctggagagatcttaatgttggaaggctggggagtaggcgggccgacctagaaatctgacctatatttctgagacctgactagcctgagtttccggtgtacaatctgagggaatccccgccaattttctagttaagaagactagttttcaccagtttcctagttaaggtggttttttgttttttgtgtttttttttttgacagagtcttgctctgtcccccaggctggagtgcagtggtgcgatctaggctcactgcaacctccacctcccgggttcaagccgattctcgtgcctcagcctcccaagtagctgggactacaggcgcgtgccaccatgcctggctaatttttgtattttagtagagatgggttttcaccatgttggccagtctggtctcgaactcttgacctcaagtgatccactcgcctgagcctcccaaagtggtggaattacaggtatgaaccaccgcacccggccttaaataattcttaatgcttcttaagacttcctaatgcagaaaccatagtttatgccatttttgttatacttgcctctttctttgttggggcagtttacatacccgtgggaggttttgaagtcctaagattgaaattgtttatgtaagtgacttgaatgaatttatctactgcgacaggtgcagatcttgtaggaagagaagtatcataatgctaccctttctgtctcctcttcagagcatgtgaaattaaaagaaccattcaagttttaatgtgcagaggatgatggattgtccgatgggaagaattgttcaagttaagattcaaacatagagcatatttttggtggcactggaatgaaggaaaagaagagagacaatggttttttcaagggtgagagtagaatagtagaggatttttttttccccatcagtgcatagcatagagtctggcacataggtagcttattattattattactgtttgttttgagacggagtctcgctctgtcacccaggttgaagtgcagtggygcgatctctgctcactgccatctccgcctcctgggttcaagcgattctcctgccttagcatcctgagtagctgggactacaggcgcccaccaccaagcccggctaattttttttgtatttttagtagcgacgaggtttcgtcatattggccaggctggggtagcttattattaataagtatttgttggctgtataaattaaggaaaccaatcagaaacaagtcagtgcagcaaatatatgaagtttcctgaccattcactgcagtctgcaaataatattgtttaatatctagaaataattttagtctaggcacagttactcatgcctgtagtccccgctacttgagaggctgaggcaggagaatagcttgagccctggtgtttgagtatgcagagagctatgattgtgccactgcttgccagcctgggagacagaacgagaccgtgtctctaaaaagtagaaataaatgtaaggccaggcacggtagctcacgtctgtaattccagcactttgggagaccgaggcgggtagatcacctgcggccaggagttcgagatcggcctgtccaacatggtgaaaccccatctctactaaaaatacaaaaaaataagccaggcgtggtggcccgctcctgtaatcccatctactcgggaggctgaagcaggagaatcacttgaacctgggaggtggaggttacagtggcccaagatcgtgccactgcactccagcctgggcaacagagggagaccccatctcaaaaaaataaaaaaaaatgaatttaaaattttttaaaacttagaaataattttgttgcagaaaaaatcgatggagaagtgatcagtacattaaaaaattaagcaactatggagaaagtaaaaaatctaattaaatagatatcccagtttcatagatgtgaagattgtcagttctctccaaatttatctatagggtcaatgcatttcttggaaacttcaaactgattctaaaattcattcagaagagcagaaggccaaggataaccttgacattattatggaaaaaaaatagatatgagggctgggtgtggtggcttacgcctctaatcccagcacttcgggaggccgaggtgggcggatcacttgaggtcaggagttcaagagcagcctggccaacatggtgaaacctcgtctctcctaaaaaatgtaaaaactgggcatggtggtgggcacctgtaaccccagctacttgggaggctgaggcaggagaatcgcttgaacccaggagacagaggttgcagtgagctgagaatgcgccactgcaccccagcctgagccacagagcaatactctgtctcaaaaaaaaaaaaataataataataaagaaggaaagaatagatgatagatttgaggacctgctctaccaaatatcagtactacggcaagtaaaatttagtgtggcattggtgtggaatagactaaccagtgaaacagactaaagggcttagaatcgtagtcacacatgtttggaaatgcaatataaaacagaagacattgcagataaatggcgaaaggagaatggagagacaagtgaatatccacatgagaaaaatgaaattgtaccttgtatccctgccttacgccaaacataaaaatttccagtggattaaagacctaaatgtaaaagacaactttaaaacctaaaaagataaatgttataggctcagaatatgcaaaccgttttaaaataatacacaaataagagacaaattcaactgtattaaaattaagaacagaagacaccatgaagaaagtgaagaggcagccaggtgtggtggctcacacctgtaatctcagcactttgggaggccaagacaggcagatctgttgagtccaggagtttgagacaagcctgaacaatatggcaagaccctatctcaatttttttaaaaagaaaattaaagaaagtgaagaggcaagatacaaacttagagaagctatctgtagcacacataactgacaaagtattggtatctaaaatatataaagcatgcctacaaatcaatattagaaccaataaataggccaggcatggtggcacacacctgtaatcccagcacattaggaggctgaggcatgcagatcacgaggtcaggaattcaagaccagcctggccaacatagtgaaaccctgtctctactaaaaatacaaaaattagccgggcatcctgcaatgggcctgtagtcccagctactcaggaggctgagacaggagaatcgcttgaacccgggaggtggaggttgtggtgagctgagatcacgccactgcactccagcctgggcaacagagcaagactccgtctcaaaaaaacaaagcaaacaaaaaagtaaatagataattgggcaaaagatataaataagcattttttaaaaacaggaataaaatcactaatcacatttcaattgttagtagccacatgtggtttgtggctatcatattggacaatgtatgtgtagattatttccattatggcagaaagctttgtcagacagttctgtatcataagtgggtgggtcaattcaccagtacttattattctgcaaaaagcgtrtgctttttcttttttttaaagagacagagccttgctccgtctcccaggctggagtgcagtggtaccatcatagcttactgcagcctcaaactcttgggctcaagtgatcctcctgcctcagcctctggaggtagctaggaccacaggcaacatcaccacatctggccaatttttgtttttatttttgtagagacagtgtcttgttgtgttgcccaggctggtctcaaaactactggcctcaagtgatcctttgtccttgactgtccaaaagtctgggattacagatgtgagccaccatgcccagccaataagtatattccttcgtttatattaagtgttacatttagagaaattacctagttccctaattcctattttctgctcctccagctgagttacctcggagaggcaacttaacctagatttgctcactcataaaatggtaatactgcggtggctcacacctgtaatctcaacactttgggaggctgaggtgggtggatcacctgaggtcaggagttcaagaccagcctgaccaacatggagaaacctcgtctctaccaaaaatacaaaattacccgggtgtggtggtgcatgcctgtaatcccagctactcgagaggctgaggcaggacaatcgcttgaacctgggcagtgcaggttgcggtgagccgggattgcgccattgcattccatcctgtgcaacaagagtgaaactctgtctcaaaaaaaaaaaaaaaaaaaaagtaatactggacttaatatataagattccttcctgctaaaaacttcttttaataaatgatactacaaagtattattattcctcagtgtgtcctacatttgagcaaagtcatgtaagaatactcttgaaatatcagtcttctaggccgagcgtggtagctcacgcctgtaatcccagcattttgggaggccaaagcaggtggatcatctgaggtcaagagttcgagaccagcctggccaacacgatgaaaccccatctccactaaaaacacaaaaaagccagacatggtggcgggtgcctgtaatcccagctatttgggaggctcaggcaggagaattgcttgaacccgggaggcggaggttgcagtgagccaagatagcgccactgcactccagcctgggcaacaagagtgaaactctgtcaaaaaaaaaaaaaaaagctgggcacaatggctcacgcctgtaatccaagtactttgggaggctgaggcaggtggatcacttaagctcaggagttcgagaccagcctggccaacttggtgaaaccctgtttctactaaagatacaaaaaattagccaggtgtggtgatgcgcatctgtaatcccagctactcgggaggctgaggcaggagaattgcttgaacccgggaaatggaggttacagtgagctgagatcacgccattgcactccagcctgggcgacaaggtgagactgcctctcaaaagaaaaaagaaatatcagtcttctgaataaatacactgtagtgcagcaggcaaatttaaaattttattaaactcaatttttcagtcttactaatttttataaccatgtaattgtattacttttagaatgtcttggaccactttcttctttagtgaagtacctgtaccctttaagcacatggcactgcttgagacacatttctttagagaatgttatgcagaatttttagtggtgaggaccagtatggaatctgtcttaatattacactaagaagatacactgtttaatatgtagtgaaaataaggctgggtgtggtggctcacacctgtaatcccagccctttgggagggtgaaacaggtggatcccttgagcccaggagttcaaggccagcctcggcaacatggtgaaacccatctctacgaaaaataccaaagaattatccaggcatggtggcacgcacctgattgtgccactgcactccagcctgggtgacatagtgagaccctgtctccaaaaaaaaaaaaaaaaaaagctaatattttccttgggacagataaaacaggtactttttggctcgggccgggagtgggggtgggtggtgggtgtcaaaacaaaacagcaaatgaaatatttaactaatagtaacatttgggtttttaagtcccgagaagagtgcttttgctgcctttgagaaacttgtgtagcagttttgcaattaaatcaattctagtgtagccttatatagctattaataatcatgttctccaatgattttacggatgtaaaaaatagtggaaaatgaaacaaattatatttgttgataatatgtatattccaggtgacaacaatgcagccttttgtacatttgtgtagtgtttggagttgaggtgacttcattcagttttgtttacactgaatcatgggcactgaatctaggactcattttgcccaacagactaaacaagtctgttatagttaatactgatcatttcttagttttgatgctcagtgctgtggatcataattactttctatgtctactctactcatataaatctgcctatttgctaactcctatccaaaaaacataattctatcaaaggcataccctgtactaagtactgtgaagagctagaacaatgagggaaagaygattcctgctctcaagttgtttataatcaggcttctcttctagcaaattcttccccatcttagaatgaccttcccttttccccctaattttctttttttttttttttgagacagtgtctcgctctgtcactagagtgcagtgaggtgatcccagctcgttgcaacctctgcctcccgggttcaagtgattctcctgcctcagcctcctgagtagctgggattacaggtgcatgccagcatgcctggctaatttttgtatttttagttgagacgggatttcaccatgttggcctgtctgttctcgaactcctgacctcaagtgatttgcctgccttggcctcccaatgtgctgggattacaggcgtgagccaccatgcctggcttaactactaattttctatactgttctagactctaggctgaaatgtagattcagcttctccagaggcctttctctaacttagatgttctttgtgtcaatttgtagtttcctgcctgtacttactattgtatacatattttgtttattatctcacttttacatatgttaattgtaagaccttcatacacacctgttgaagtttgtaggcagtagagctatatcttttttttttttttttttgagactgagtctagctcttgttgcccaggctggagtgcaatggcaccatctcggcccactgcaacctccgcctcctgggtttaagcgattctcctgcctcagcctcgcaagtagctgggattatagtcgcctgccaccatgcccggctaattttgtatttttattagagatggggtttcaccatgttggtcaggctagtcttgaactcctgacctcaggtgatccacccaccttagcctcccaaagtgctgggattacaggcgtgagccaccgcgcctggcgagctgtatcttttttgcaggtgaacaacttaaggctctgagagaggaaacaggatccactagcaatcctcttccattttctcccaaactcccacaatcctaggtttccactagtctactttgtgtttctatgtatttgccagttggagatattgcatatacatggaatcataaaatatatagcctttgtgtctcatttcttttatttttaatttttcttttttttttttttctgggaagcacagtctttgtccaagaccagaggcaggcacttcctgtgtctagtttctttcacttagcatagtgtttttaaggttcatccatgttgtagcatatattagcattttattcctttttgtggttgaatatttcattttatggatatgccacattttattcattcattagttaatggacatttgaattgttttcactttttggctattatgaataatgctgctatgaacaattgcatacaagtttttgtgtaggtacccgttttcatttttcttgggtgtatacctagaagtggaattaattgctcagtcatgtagtaaccctgactctgtatttagtcttttgaagaactaccaggctgtttcccaaagcagctgcatcattttgccactggcagtggtgtatgtgtgagagttctgatttctttacatcctctccaacacttgttattttctccttttgatgataacctgtcttttgattatagtatgaatccaccagctgttttgttctttttcctgatcgttttggctattctaggtccctcgaatttccaaatgaattttagagactgtaaatctttgccaaaaaaaaaaaaaaaaaaaaaaagccagctgggattttgatagggattatgttgaatctgttgaggaaaattgccatcttaacaatacagtcttcaagtccgtgaacaagggatgctttccatttactttggtctattttatttttttcaacaatgttctgtagttttcagagtctaagtattgtaccttgttaaatttattcctaaatattttattctttttgataccattgtaaaaggaattgttgtctcaaatccattttcagaatggwaaactcttaatatacttattttctttcatttaaacctaaccactagtgtaaraggtaagtattatttatttttgcagatgagaaaataagcttaaagaatttaaatgattttgcccacaagacaaccaagtcagtatctctgagaagacatctggataaatgaagaggcagttcacacacctgactacaaaacttgcatgcttttgttttccatttgaaacccaggatgcagtgccaggaaggtgggaggggaaagtcgaggtatctcaagtgaatgagccgtgccaaaaagacggttggatcctgcatagtggtgagaggggtgatccattctgcctcatcatttaagctgtctggaggtatttggaggcagtttgatttagagattaaagactctggtcctggatttgagctcgggcttcactatttaacttgctatatgactcagcaagttactttgattctctagctttcattttcttctcctgctcctatagagcagttgtaaagccctacctacctggtagggttgttgttaaaaagattaaatcaaataccattcttgtttgcagagctcagggcctaccacaccgtaaattgtcagttaaatattaactgcaggccgggcgtggtggctcacgcctgtaaccacagcactttgggaggccgaggcaggcagatcacgaggtcaggagttcgagaccagcctgaccaacatggcaaaaccctgcctctactaaaaatacaaaaaattagccaggcgtggtggcgtgcgcctgtaatcccagcaactcaggaggctgaggcaagagaatcacttaaacccaggagacggaggttgcagtgagctgagatcccgccactgcattccagcctgggcaacagagtgagactccgtctcaaaaaaaaaaagttaactgcaattgttcttttgcttacagctttattcttactccatgcttatttttctcttttcagtacaagttcagggacctaactgtggaagaactaaggaatgtaaatgtatttttcccacatttcaaatattccatggacacctatggtaagaatcatatcctctagtttaaatgctgcattatttgaactactaatttttggtcytaaagagctgcaaaattgtaatttctctttttctcttttatcctctgattttcagctatactttatgacctgcaatttctgagaaagcttaaattaatacaatgtatcttgtattagttttctattgctgctgtaacaaactaccacaaacttagtggctttaaaaaacacacgtttactgtgttataattctgtaggcaagaagtccaccacaaatttctatagcttagaaagtaaactagaggtttgacttggctaaaatccaggtgtcaactgcctttgtttctggaggctctgggagataatgtttccttgcctttttcagtttctagaggtcacccacattcctgggctcttggtctcctttctccatcttcagagccagcagtgttgcatgtctctaaccattcttctatagtcaaatcgccctctgaccacagctgggaaagattctctgcttttaaggaccaatgtgattagattagacccaccccagtaatacaggataatttcttcatctcagactccttaatttttttaaggctagccaagtgatcagagtcactaatcacatctaaaaaatccctttgccaagtaaggtgacatattcacaggttccaagggttagatatggacatctttaaaggacctttattcggcctatcrtatgtatatggttgattctaaatcattaacagttttagttattctgttcacctaatagtaagaatttggttttctaagaaatattttactttattatcttaatctttctttttttttttttttttttgagatggagtcttgctctgtcgcccaggctggagtgcagtggcaccatctcagctcactgcaacctctgcctcctaggttcaagcgattctcctgcctcagccttccgagtagctgggattacaggcacccaccaccatgcccggctaattttcttgtatttttagtagagatggggtttcaccatgttggccagtctggtctcgaactcctgacctcaattgatacatccacctcggcctcccaaagtgctgggattacaggcgtaagccactgtgcccgaccatgggctcttttatgaagacactagtctcattcatgagggcccaaaggcccccctccaaggtagtttgattgtttgaaaccagagatagtgtttcctgtactcaatcctgagattagggcgttgattctctatcagtgtgtcccagttactgatgggaaagttgaactttcagagatatgaatgttgaaaagaggttgagaataatgaaattagagaaaccaaagaaggtaattattgatctaacagtttgctttagaaagcaatgctggcagtttttcttctggttctaaaagtgactataactgattttgttacatgcgataatgtttttttgtttgtttgttttttgttttttggtttgtttttgcgggagactggaggttggttggttggttggtttgttgagacgtagtcactgtctgtttgcccaggctgcagtgcagtggcacgatctcagctcactgcaacctcccccttccaggttcaagcaattctcatgcatcagtctctctagtagctggaactacaggcgcatgccaccacgccctgctaatttttgtatttttagtagagatgaggtttcaccatgttggccaggctggtcttgaactcctgacctcaagtgatccacccaccttggcctcccaaagtgctgggattacaggcatgagccactgtgccagacctggaattttactgttactcaaatcagtcgccccgagcattgtgagaacagtttttaatgacagcttggtgggtggggggaagccagtgagccaggagtgctgattggttaggtagaagatgaaatcatgggaagttgaagttgtcctcttgctctaggtcacttcccgggttggggccacaagatcagatgagccagtttatcaatctgggtggtgccagctgatccatcaagtgtagggcctgcaaaatatctcaagcactgatcttaggagcagtttagggaggaccagaatcttgtaagcttccaggtgcatgattactaaaccataatttttattttattttactttatttatttatttatttatttttctgagatggagtctcgctctgttgcccaggctggagtacagtggtgtgatcttggctcactgcaacctctgcctcctggcttcaagttattctcctgcctcagcctcccgagcagctgggaaccaccacacccggctgatagagatggggtttcatcatgttgcccaagctggtcttgaacttctgacctcaagtaatccacctgcctcagcctcccaaggtgctgggattacaggtgtgagccaccgtgcccggccataaaccataatttttaattttgtggctaatttgttagtcttacaaaggcagtctagtccccaggcaagaaggaagtttgttttgggaaagggctgttattgtctttgttttaaactataaattataaattaagttcttcccaaagtgagttcagcctatgcccaggaaggaacaaggacagcttaaaggttagaaggaagacggagttggttaggttagatcttgtttgctgtctcagtcataattttgcaaaggcaatttcaacccctccctttggatttttaaaacaccttaatcttaaggtgttggctaatgaaaatgggaaaaggccgtcgatcactctggcttcttcctgctgagggggcgtagtggaggtaggtgttgacaccgaggtgagaggagtggaactgctttgcaactgacattgacaattatttaataatggccccacatattatagtacttcttaagttttcaaattttctcatttgatccttatgacaactttgtaaggcagtcttattatctttattttatagatgataaaactgaagatcaaagatgattaaagtcaccaaaagtcacattcctctaagtggggaaggtggccctagaacttggggtttcagtatcaaagtcctgtattctttcagctacccttactgctttctaagtaaacaacatctagtcatttcctcttgttgacagatttaccgattcctagattatgtttagagattgtgtgtgtatttgtgtgtgtatattcatgagcacacacatgtgcacacttacatactttactacagttctttctgtttctgattgcacattttggggcttttttttttttcttctagtttttaaagatagttctcagaaagacctgctgaattttactggcacaattcctgtgatgtatcagggtaagtgtggaagttgaaaaaatgtgtgagttttctaaaagagcagttcatttaataacttaaatttgtttatgccataacattcttaaagtattattgcagatatatgacctatacagaaccttactggatctgttccagtcaaggaaggcctgtattaatgtcaacaagttcagttcaattcaacaaatacttactatcaactagataaatcaaatagaacagcgtaacttcgatctcttaaaaagagttcagcattgtacaatgagaatacattgcccaaaagacactaggaagctgtattttggggggayttctttcaaagtaggtgcttctttgtggtagctcctggattatcacaaaccccctactaccactactctgaaaggctccagggtacaaaggaaagcaagacagacataggcctgcccttggggagagttacttttttcttcattacacctatattttgttcccctcctttcctctctatgtgatatagcattatctccattccataggtgaaactgaatcttagcctggtctgatttacctaagatcacatagctagtgttagcctgaaactcagactccaataggaaaattttacaacacagaagccattaaagctcaaagaaaggaacacattttagagtgacctagcagtttagaatagctaagtgtttgcccaaaaataaaagaaaacaaatcactgacttttcttacacttaactcttcccatttttccagacctacttctcctgtgttcatcaaggactaacctttcagataagaatcacaagaggttgcttatatatagtatgattttaagaacaccagtgaatctttgtttccaaatatttatctgaagtggtgcctgaaatttcaccattagaaattcactgttcttgccgggtgtggtggctcatgcctgtaatcccagcacttygggaggcctaggtgggcagatcacttgaggtcaggagttcaagaccagcccggccaacatggtgaaatctcatctctactaaaaatacaaaaattaggcctgatggcacgtgcctgtaatcccagctactcagaaggctgaggcaggggaatctcttgaactcaggagacagaggttgcagtgagccgagattgtgccactgcactccagcctgagtgacagagtgagactcagtctcaataaaagttcactgttcttttgaaatgcaaataatcccaggacaaataacatccataatcactaatatacagttatgtgcttaaaggacatttttggtatttgttgaacagtggagttagtttgattattgactgaagggcttaggaataagtggcttactggggcatttgaaacagaagatacactgaaaggggggctgagaaagatctggaaaccaaatagggagagaacagcgtaactttgatctcttaaaaagagttcagcattgtacaatgagaatacattgcccaaaagacactaggaagctgcatttgcggggacttcttttaaagtaggtgcttctttgtggtagctcctggattatcacaaacccccttaattccccactccccacccccagtcatgacttgttgctagagatgcactcatgttttgttctgcttctgtgtatgtcccaccatgatacctccttttgcaatagtaggcactcaggaaatgtgtaggaattcattttgtttttatgcataggagaatggatggagatgaatgcagctagccatgggatccatgcagagattgcagagtgaagtaggcagaacaggcatagagttgatttttcttttctttccttggtcttccctgccaagcttttagactgtttcctggctgtgtagagaattttactcagacctgttccccttaagttgtattctgaatttatcttggttagacgttgaaaagaaagggaagggaagggtattagggaaaggaggaagggagaggaagagggaaggaaactgattaaggtgattcattctgagagataaaggctaattcttaacccaccccagtgttttcaagggtagttgcatattaacagaggagcttgtgaatttaaatgaattactgcttagtagcatttcggtttctaatacagagtagggcggtaacatgagggcagaaaggttatcttaataccattggtaaaatcccgctgattggcactatgcctgtcctgcagtcattgagttatgtcattgattcttatgctggggtcttcctcaggtgctccccccacctttttttcctgcattacacttttcctttgctttggaattatatcaactcagtgtgaatgcacactaattatttcctgctgatcagaaggtcagaatgtatattatctttctcatctgtaaaatgggccaatagtagagcccacctcagagttgtaaggcttaaatgaattacagtaagtaaagctctgggcatagtgcctggcatatagtgtgtgccagtgtatgctcagtaaatgtggccattattatttgtctgccttttttttttttttttgagatggagttttgctcttgttgcccaggctggagtgcaatggtatgatctcagctcactgcaacctccacctcccaggttcaagcaattctcctgcctcagtctcctgagtagctgggattactggtgtgcaccaccatgcccagctaattttgtatttttaatagagatgaggtttctccatgttggtcaggctggtcttgaactcctgccctctggtgatccgcccgcctctgcctcccgaagtgctgggattacaggcgtgagccaccgcgcccagccttgtctgcctttattactctcttttagttaactagttttattagtgtaatgattatacatgcttatgctaaaaaaaatttaaacatttgggaagggatgaagtgaagcctatatctatcctcccatctgcatggaacttctgttaatattaccttatgtttacctctagaaatttttggtattatttcttatacagccaacattgtgttaagttataatgatactttttcttcaaacactcattttttagagatgtatgtaatctttttttcttttactttttttttgagacggagtctcgcactgtcgcccaggctggagtgcagtggcgcgatctcggctcactgcaaacgccrcctcccagtttcatgccattctcctgcctcagcctcctgaggagctgggactacaggtgcccgccaccacacctggctaattttttgtatttttagtagagatggggtttcaccgtgttagccaggatggtcttgatctcctgatctcgtgatctgtccgccttggcctcccaaagtgctgggattacagacgtgagccatcactcctgggctgttctttttcttttaagagagagggtgttgctctgttgcctaggctagagtacagtggtgtgatcatagctaactgtaacctcaaatttctgggctcaagcattcttcctgcctcagcctcctgagtggctaggactacagatatgtgctaccacaccagggtcttgcattgttgcccaggctggtcttgaagtcctggactcaagctgtcctcccattttggcctaccaatgtatcatcttaagatcacacctatctaaactttgtttacatccaacttaagttatgttcttatgatataattcctttaaatctgaggactttgtgccaggagttcggactcttcagtgctgaattactaaaagctagatgtgcagggtaggagtcaaggtatttgctgataggaaagagggaaggaagaagagactagtgaactagtggtgaaatcttaacgtttagacacaggaatctgagtcaccaggtgctttgccagtcatgggctgttaaaatgcawgaatactgctggggaggggcattggtggaggcagatccttgatcaaccaggggaataccttcaatagacattttttgttttgttttgtttttttgagacagagtcttgcgctgtcacctggctggagtgcagtggcgcaatctcggctcactgcaacctatgcctcctgagttcaagccattcttgtgcctcagccccccaagtatctgggattacaggtgcttgccaccatgcccggttaactttttgaatttttagtggagatggggtttcatcatgttggtcaggctggtctcaaactcctgacctcaagtggtcaacccaccttgaaagtgctgggattacaggtgtgagccaccacgcccggccttcaatagacatttctttccttttctttaatgtgtagtgattaatgtaggaagtgactccatcaggatttgggctgccactctggctatattagtaaacatttttgaaaatttgattttttttttttttttgagaggcagggtggatgatttggccattgttttaattaaacttactcaaatgttataccagtgatctaataggaacatatttccaatgtgaatgtggatgaaatgggggggaataggccttgattaacattaatcctttatatgtaaacctgactagactgctcatttcttttcttttttttttttttttttttgaaacagtgtcttactccgtaacccaggctggagtgcagtgacacaatcatggcttactgcaaacttcacctgccaggctcaagtcatctgcccatctcagcctccccagtaactgggactataggtgtgtgccaccacacccagctaattttaaaattttttgtagagatggggttcctccatgttgcctaggctggtctgaaactcctgggctcatgcaatctgctcacctcagcatcccaaagtgctgggattacaggcttcagccaccaccccagcctactcatttcttaaaatgccgcctagctatatcataatgtgtgtgctttattattgtttgaagatatgtttcttttgtctcaaataggtaatacatataacataccaattcgtttctggattttggattctcaccctttcgctccccctatttgcttcttgaagccaactgcaaatatgggaatcttagtcggaaaacatgtggatgctcaaggcagaatatatttgccctatctccaaaactggagccatgtaagatcaatttggattttctacagaaagcttttttttttttttaaatacctatcattgattctgctggtacaaataagtatgatactgcattttctttcaatgatattcttcaygtagtctttggaagtaatttgaaattgagctctctagggttacccaagtcccagaaccctgatgacaactgccygtacaaagctgctccctccaggttttggagccaactgtttgctccctgtctttttatagtcgtttcccacttgagaaagtacaggaggagctactagcaagtgattggggcattatttccaagtcccttcctattacagatttttatgttatatttatttgtagttttgcctgtttttgactttcatataagttgaatcatactgtatgtaatcttttgtgacatgctttgttttaaccaatattaagttttaaaaagtcatccacattgatctatataactgtagtatttgttttatgtcctcatgttatgtaattttgtattctgcatttttcattgaccattatattgagcatttctccatgttaaaccattttcaaaatacatggtttttaatggttacctgatgacagcataaggatattgcgtattgtatttacaaattgccctaacgtaagacatttaatgatgaacatctttaaatgtaaatgtttgtatatatctaatatatctttgatacttccgtaatgataaatctcttggagtagaattattggtccaaaggttttcaatattttcaagattttcttatatattactaaattggcctccaaaagggtacacaaaatgatacatttctataatcagtagaaatcagtgtaggagggtacctattttacagtaccttttctctaatagaaggtattatccttaaaacaaacctttgcttatcttctatacattggtttagacagatgtatagtattctctcatttttgtaaataattaaaaatctgtataaaaggataatttataatatgtttatatgaggccaggtgcagtggctcacagctgtaatcccagcactttggtaggccgaggcgggtggatcacgaggtcaggagatcgagaccatctyggctaacgcagtgaaaccctgtctctactaaaaatacaaaaaataagccaggcgtggtggtgggcgcctgtagtcccggctacttgggaggctgaggcagtagaatggtgtgaactcagaaggtggagcttgcagtgagccaagattgcaccactgcactccagcctgggcgacagagcgagactccgcctcaaaaaaaaaaatatgtttatatgtaccagaaagctagtagggctggaggacaggggtatattggagtccagtgaggttggagtaaagaatgccttaggattatcactttttattttatagacagcttataaaaaggtgtataattgtagatgcattttactttgttttatggttttctatatttttatatagaaaacatttaaaaagaagaaaaaagaaatagaaaaaacaaaggacatacttcggattatcagtagtaggagttgacattttactttgtgaacatttatgttatttgcattacctgatgatttaaataagattgccagttaaatgtgatgaatggggcataataaaaatttgtcagttggaaggacaaaaatggatcttactcttaattttcagttgtttggttatttgagaaattgaaatcattttcatttacttatcaatcgtacgtttcttcctttttgaattgtctgtttctctcctccatccattgttacacccttctttaaacaaaacaaaacaaaactatcctcgagtagtattttgacatctgtaccatgttgcaggaattcatgtatcctgtttcttctctctggttttcattggcatctcttttcataattttgtttgtttaataaatcctcggggatagtcttataatctagtgaaagttgtgtttaattttagtttagacagttctgattttattttactgttctgagcctctttattataagctaaaactagtctctttttttgagacagggtaatgctgtcttcacccgtgctggagtgcagtagcacaatcatagctcactgtaccctcaaattcctgggctcaagtgagtttcccacctcagccttctgagtagctgggactacaagcatggtctaccatccactactaattttaaaattttttgtacagacaggatctccctatgttgtccaggctggtattgaactcctgggatcaaggcatcctcccacctcagcctcccaaagtgatgggattacaagtgtgagccacagtgcccccacttaaaactagtcttaaaaagacattacattatttaaattgccctatttaaaagtactgcagcacctttaagttccacatgcagttggaattataattatgtagcataattttatagaactttggagctagaaggaatctagaggtcatctaggccagggtttgcaatttctctragagattcagagggccgcgttaggcctatggaatttgtttgaacagcacagttcgttttgttttaccttgttttgttttgttcttaatgtaaatttgaatgcctattggcatgctgtttccaatttgccacaataaccgtctctccagattttcttgtacttgccagcttcacacatttaacgttacctgcttggtccccaaaggtatttgaattcttggccctaatagcctcttcttactttataaatagtgaaactcagactctgagaaattaagcactttttaaatgagcatactactaaatattcccaggaataataataaacatctgttttacactcacggcgtatagtttgcattcattgactcatttattgctcataacaaccatttgggatttattattcactttgtattactgatgacactgaagctcagaaaggttagtgaatttcatcaaggttgcttaaccaattacattaaaakaatacagtaccagattagatactattagtgttaattttctgatttgataacggttaaaaggagaatgtctttttcttttaggaaatatacattaaagtacttaggggtaaaaggacatcatgtttgcagtttacttgttcagtttgttcagaaaaactagagagagaaagactaaacaagcaaatgtgatcaaatgttaacatttgagtaatctaggtgaagagtatatgtactatttttgcaacttttctgtaagtctgaaattatttcaaaatgaaaagttaaaaaaaggagagttcctaaacctaggtattcggctattaagcatattcatgctatttttctacttttgggaaatgttgaattagcatttcttcttcctttatttttcagttaaaagtattcagtaatttttcatgaaaagcattacaacagttaaaagtatcatataatgtgtatgatgatttttgaaaaatgagaacatgattgaatgcttctttttgactaactctaaaagaatgtataggttaaaaaagattttttgtttgttttgtttggagatgaagtctcattctgttgcccaagctggagtatagtggtgcaaccataactcactgcatctgaaactcctgggctcaagtaatactcctgcctcaacaaaggtagtattcttcagcaaaatttttgtgtaacttttctgttttttgtgtattctacagcctaaatctgtcattgttggattaattaaagaaatgattgccaagtttcaagaggaacttcccatgtattctctatcatcatctgatgaggcacggcaggtagacttgctagcctatattgcaaaaatcactgaaggtttgtatatttgtcaggcagattatcttgagagttatgagttaccagtttctcactaaactcctttactttctgccacttgatttttataaataaatttgtgtgcgtatgtacatctgtttttgaaataagaaattcctgtgcctcaggccaggcgcagtggctcactcctgtaatcccaggactttgggaggctgaggcaggcagatcacctgaggtcaggagttggagaccagcttggccaacatggtgaaaccctatctctactaaaaataaaaaaagtagctgggcgtggtggcaggtgcctgtaatcccagctacttgggtggctgaggtgggaaaattgcttgaatccgggaggcagaggttgcagtgagctgagattgaacaactgcactccagcctgggcaacagagcaagactccatctcaaaaaaaaaaaaaaaagaaaaaaaaagtaattcctttgcctttatcacagggtattaccatgtaattccaataaatattatttatttttttatttttttgagatggagtctcgctgtgtcacccaggctggagtgcagtggtaccatatgggctcatgcaacctctgcctcctgggttcaagcgattcccctgcttcatcctcccatgttgctgggactacaggcatgcccagccaatttttgtatttttgataagaatgaggttttgccatgttggccaggctggttttgaactcctgacctcaggtgatcctcccgccttggcttcccaaagttcagggattacaggcatgagccaccgggcctggccaggtttcttaaagtgtaaagaattggtcttaaacagataaaacaattcttgttcaaaaccacttgctgtatattaatgatcccaaactttttttcatgatatgtatatgtggcttgttggcttattcaatatattggatcagaatatctatgattctcatcaagaataaaggcaaatacctatgtttgaaacatttggtaaggtgttagacatatttttttattgtagaccagagcaatgagttggaatatttttcagaattatggaaatcctacttttttagagtcttatacaatattttaaaaatgtttagaaagatacattctctttagaaggataatttctatttagtcgactatttaataggaaacgtctgccttccttgcattcatttgttcagtagtattttttgcccattatggactagcaccatattttctctctaagctatgaagcctgctatatattttttttaaagatcctaaaaaaattcttgatatttttgaattctcaggataattcacctttctttctaggtgtttcagatacaaattcaaagagctgggcaaatcatgagaataaaacagtcaataaaattactgtggttggaggtggagaactcggtattgcctgcacattagcaatttcagcaaaggtatgtaaacatagtggttataaatacatctatcatagtgccacacttctaggcaggttgtgttttacacaccaaaaaatgccttcattttgtcgtgggaaaaccttattttggcttaaaatatatttagtaagttgacaaaaaagttgaaagctttcatcagtgatgttgccttttaattagtaggtttaaaaaagtgatttgaacaatgggcttatcctcatccaagggaaagctcaatttgacattcatatgacttaatcacaaattcttttgtattttctgaatcatgccactttaattaaactcatttaatrtagtaattttagctctttctaaaattggcttttttttttttaaagatggccttttcttacataattactttcttttaggatcacagtttctgagttgatatttaatactagtttagggtttgtttttttcatcagtcctttttactagtgtctgcataaattgtttgcaggaaagcttaaatgcccttccagagaggttcaaaagacctgcctgcctccctccagagcctagtatcatgataacagcatgtcttttgtcatttgagagatgtagccctgaatagaatagctgtacctctatatatttatttggtggctggcattagtttttcttttctatatatatttgattgttttgccatctaaattcttccctttccatttaagactcacatatgtcttggaggtgggttctactgcagcaaataattaaattatatccatggagctagaatatcttaaaagctggctgctcagagttaaatatgccaacttttggcatgctgtagttttatttctttcaccctccatttgaatacactatcacctctttttttttttttttttttttaggtggagtctcgctctgttacccaggctggagtgtagtggtacaatcttggctcactacagcctccgcctcctgggttcaagcgattctcctgcctcagcctccagagtagctgggactacaggcatgcgccacgacgcccagctaatttttgtatttttagcagagacagggttttgccatgttggccaggctggtctcgaacttctgacctcaagtgatccacctgccctggcctcccaaagtgctgggattacaagtgtgagccaccgtacctggcctgctattacctcttaattagaatttgagttgtattcagtcttttgtcactaaataaatgyttctataaacatttcaagttgcttgttttctcatctgaatttttatttggtcatacattattttattttatttagacagggtcatgttctgttgcacaggctggaatgcagtggtgcaatctcagcttactgcaccctccacctccccagctcaagccatcctcccaccttagcctcccaagtagctgggcttacaggcgccagcaaccatccccactaattcttgtatttttttgtagagacagagtttcaccatgttgcccaggctggtcttgaattcctgggctcaagcaatcttcctgcctcagcctcccaaagtgctgggagtacaagcatgccccactgcacccggcctggttgtacataattttaaaaaatagtactagtgagtcagagggcatgaatggtttttatagcacttatgacatagtgccagattgctctttggaaaggcagaactaatttatgctgctaataacatgcacatcaacctgatttttgacatccctaacagtactaagttttatttatttgtaattatttgtctttttttttttttggtaagcacaagaaggcatctgaaagtctgaaagtcatggtttttcatttttgtttttgagaccaggtttctctctgtagcccaagttggcatgcactggtatgatcatggcttactgcrgtctctatctcctgggcttaagagatcttcccacctcagcctcctgagtagctgggaccacaggggtgtgccactacacctaggtaatttttagtttttttgtagagataggtctccctgtgttgcctagattggtcttgaactcctggttcagactatcttcctgccttggcctcccaaagtgctgggattacaggcatgagtcactgctcctggccatgtttttaaactgttagaagaatctcactgtcattatttgtctgtgaattgtctgggtggaaaatttgccgtttttcagctgggcccggtggcttacacctgtactcccagcactttgggaggccaaggcaggagaatcagttgagcccaggagtttgagaccagcctgggcgacacagcgagatccccatttctacaaaaaaaatttttttttttttctttggagatggagtctcgctgtgtctcccaggctggagtgcagtagcatgatctcagctcactgcaacctccatctcccgggttcaagtgattctcctacctcagcctcccgagtagctgggattacaggcgtgtgccactacacccagctaatttttgtatttttagtagagagggggtttcgctatgttggccaggctggtctcgagctcttgacatcaggtgatctgcctgcctcagcctcccaaagtgctgggattacaggtgtcagccactgcctccaccctasaaaaattaaaaattagctaggtgtggtggtgcacactggtagtcccagcaacttgggtggctgaggattgcttgagcctgggaggttgaggctgcagtgagctgcgattgtgcagttgcactctagcctgggcgacacagtgagaccctgtctcaaaaaaaaattctgtttttctttttagacgttaatattttgatacaaagtacaatattcataggccactattatgactgcaacagtgatagtactcataatagtggcaacaaaagtagtggtggtagcagcagcaactaacctttacacaatgcttattaggtaccaggcacttgtctaaacacttgactcttttttttttcttgagatggagtctcgctcagtcacccaggctggagtgcagtggcgcaaacttttttttttttttttttgagacgaagtctcgccctgttccccaggctggattgcagtggcgtgatctcagctcactgcaacctcctgcctcctgggttcaagtgattctccttccttagcctaagattacaggcacccgtcaccacacctgggtaatttttgtatttttagtagagacggggtttcaccatgttggccaggctggtcttgagctcctgacctcaggcaatctgcccgcctcggcctcccaaagtgttgggattacaggcgtgagccaccgtgcctggccagtagtgtgaccttgactcaccacaacctctgcctcccgggttcaagcgattctcccacctcagcctcccaagtagctgggattacaggtacgtgccaccatgcctggttaatttttgtactttcagttgacatgggatttcactgtgttggtaggctggtctggaactcactcctgacctcaggtgatgcaccagcctcagcctcccaaagtgctgggattacaggcatgagccaccgtgcctggcccacttgactcatttttacaacaaccctttgtttaggtactgttattactgacattttacaaatgaagaaacaaaggcatagggcggttacccaagttgccccaaattacactgttaataaatgatgaagcgagaatttaaagaccaggtaatctgtttatcagagcctgtattctagatccttactaaacaaagtgtggctttcaaactagcagcattggtaccacctgagttcttgctagcaatgcataatccaggacccttcccagacctactgaaacaaaatcagcattttttttttttgagatggagtcccgctctgtcccaggctggagtgcaatggcgcaatctccactcactgcaacctccacctcccggcttcaagagattctcctgcctcagcctcccgagtagctgggactacaagcatgcgccaccaggcccggctaatttttgtatttttgggagagacagggtttcaccatgttggctacggggctctcaaactcctgaactcaggcaaccaacctgccttggtttcccaaagtgctcagattacagggctgagccaccatgcccggccaaaatctgcattttaataaaatccctggtgataatatatgcttcacggattgattacatggtgacattttaaaactttttcaatctctgctataaaccactatattgtctcgttgttactgatgaacgttttgttgttcctagtcttatgaatatccttaatattgtactcttttacacatgtactgataaatttgtaggatgatttctataaatgaattgatggattcaagaagttaatgttttaaatttttgatagaaaattgtcaaattatcttttattaattataccagtttattcccatacccataatatgtaagaatacttattttcctacaactactgctaaacttttggatttttttgtgccttataaatgaaaatggtaactcatagttttctttgcattttccttatgggtatggttagcaataaaattaataactatgttttagaggggattactatatgcaagccctgtgtcacataattaatccttacaacctcataaagtaaggccgaattcagtgactgtcctggtgttacatagctaatacatagtgtagcagggttattttctttctctctctgtgtgtgtgtgtgtgtgtgtgtgtgtgtgtgtgtgtgtgtagagacggggttttgccatgttgcccaggctggtctgaaactcctggactccagcctatgcccatcctgtccttccaaactgctgggattacaggtgtgaaccaccgtgcccagccagggttgttttctttaccatcacactttctgtctgatagtctggtagatctttgggtacttttgcccgtgaatcctaaaataggagatatcttcaagtctcctactactttgaagaaagaccttccataaaggtaaactgatttttaggagtttccatgctgttatttacagtcagcccactgtgccgccctatttacaggcatgtggagtattttccatgagatctctggggagagtactgcatgataataggatttgattttagattttatagctattatactttttttaagaaaaagctggcattatttttttaacttttctactagaaataagacacacaaatagacccaaaagcactttcagaatgaaaatgataacatcaaaatgaaaacataaatcaagagcaatagcagaagtattgagtgcaccaagtcatctttattaactcatcccattaaaagaaacctgcaggggccaggcatagtggctcatgcctgtaatcccagcactttgagaggacgaggcaggcagatcacttgaggtcaggagttcgagaccagcctagccaacatggtgaaaccccatctctaccaaaaatataaaaaatagccaggtgaggtggtgcacgcctgtaatcccagccacttggsaggctgagacaggagaatcgcttgaacctgggaggtggaggttgcagtgagctgagctcgtgctaatgcaccccagcctgggcgacagagcaagactccttctcagaaaaaaaaagaaaagaaaagaaaagaaaaagaaacctgcagacctgggcacggtggctcacacctgtaattccagcactttgggagaccaaggygagcacatcacctgaggtcaggagtttgtgatgagcctggccaacatggtgataccccgtctctactaaaaatacaaaattaggtgggcatggtggtgcatgcctgtaatcccagctatttgggaggctgaggcaggaaaatcacttgaacccaggaggcagaggttgcagtgagccgagattgtaccattgcactccagcctgggcgacaagagtgaaatgctgttctcaaaagaaacctgcaatctgtgacttgtgagttaagccctgttaaagcttttagtagtcaagcctaaaggattacttattgaagttcaaatttctttttttttttttgagatagagtctcgctctatcgcccaggctggagtgcagtgacacaatcttggctcactgcaactctgcctcctgggttcaagcgattctcctgcctcagcctcctgaatagctaggattataagcatgtgccaccatgcctggctggtttttgtatttttagtagaggtggggtttcgccatgttggccaggctggtcttgaactcctgacctcaggtgatccgcctgccttggcctcccaaagtgctgggattacaggccaccaagcccrgccaaagttaataatttcttgcttgcatgtcacttttattgctattgtgttacttactcttcttaacactaaaagacagtgtatgaggcctgtttattgtcctttagtcctcattgttgaatgaatttaaattgagtcactggccrtgttcagtgtaatgttctttctcttactgtacagggtattgcagacaggcttgtcctcttagacctctcagaagggactaaaggagccacgatggaccttgaaatcttcaaccttcctaatgtggagatcagcaaaggtctgtttattctgcttaaagatgtatgccttattagatcttcatttttgactcctagaatgttaatgctgaaaagcaccttaaagatcaccttgtccaagtctctcattttacatattgggaaactaagattgaaataagttaaatgacttacccaaagagtcattcagggattttaactgattatattaataggaatcaaatgagcaaataattcagatttattcagattggtcagaaggagttattctttgtttttgacttatacctcaaaataaatttatctctgattgcctcttttcttagaatatattggttaagagcattggctttagagttctacagatagaagtttccatccctgctctgccataatagtgctgacatttgtcagattatataatctctcaaacttcagttttttcatctataaagtagaaataatacctaccttttggtatatagcaaagtgctaaaccaagaataagaaaaaaaatttagctgggtgtggtggctcatgactgtagtcccagctacgtgggaggctgaggcagaaggattacttgagcccaggtgttcaaggctgcaatgcactaggattgtgactgtgaatagccaccacactccagcctgagcaacatatcgagaccctgtctctgaaaaaaaaaaaaagaaaaaaagaaaaaaaattcagtttacattcattgcactaaaaatatattgttaaaataaattttaataataaaaagattttctgtgtcaataacatttgagtgggccaggcgcggtggctcacgcctgtaatcccagcactttgggaagccgacgcaggcagatcacgaggtcgggaaatcgagaccatcctggcaaacatggtgaaaccccatctctactaaaaatacaaaaaaattagccgggcatggtggcgggcacctgtagtcccagctactcgggaggctgaggcaggagagtggtgtgaacccgggatgcggagtttgcagtgagccgagatgcgccactgcactccagcctgggcgacagagtgagactctgtctcaaaaaaacaaaaacaaaaacaaaaacaaaacgtttgaaatgttaaattttctatctctctctctttttttttttttttttgagtcggggtttcactctgtcacccaggcgtgagtgcagtggcatgattcagctcactggaacctccacttccccagctcaagctatcctttcacctctgcctcccaagtagctggggctataggcatgcaccaccacacctggctaatttttgtatttttagtagagacaggatttgccttattgcccaggctggtcttgaactcctggactcaagtgatctgcccgcctcagcctcccaaagtactaggattacagtcatgagccaccgcaccctgccctatctcattttttaattaaaaaatttgcatgtattttataatgtacgtaacatattagtatagacatatttatgtaggtaaataccgtatttggggatgtggagttgaaagtattttaccaaggatgcatgatccaaaaaaaagaaaaaaggccactgaactagaataaacatttcctaaagcctttctaccaagttatgggtaaggtcggattataacatgctatagttgtttggctttcctttgcctttccttaggtcccctttattccttgacaatattttccaaataatatataaagacatacagtattacaagcctcaataaactaaggaatggtagtcagaaaagttgaaattatacctatcagttgtaaaagttaggtgtaaaagttttagtaagccttcggctgcctgtaggatacaatgagttcattttccttctctggaaagagtaccatagttgctttaaggatcttttttgtaggtctcatgtagaagttctttggggaactggatattctcttgtgcctgtgattttcaggtaytgaagttcttaaaggacctcttaactcttcaaaatcactttaggagactcttcagtatatggactctagaggttgtgaggccacgtaggactgaagaaattgtttcttcctgtgtgtctcatcaaccatcaataggtattgcttcagataattgaaagactagaatccttggaatagatgtgtagtgcatggtgcttgccaccaagtagggagtcagtaattatctgttgaatgttgaatgagtgtatatcatcttggggtaactttcattcatgttscccttattaattgtggttgtacattttttttttctagagacaaggtcttgctctgtggtccaagctggagtgcagcggtgccatcatagcttattgtaacctcaaactcctgggttcaagcgatcctcccacctcagcctcctaagtagcttggactacaggcatgtgccaccattcctggctaatttattttcatttttgcagagacagggtcttgctatgttgccctgggtggtcttaaactcctagcctcaagcagtcctcctgcctcagcctcataagtatctgggactacaggtgcacgtcaccatacccagcttggttgtatatttctgatagcatttatttaattactattagatgaagtaattttatttattcatttgtttattttttttagacagtgtctcactctgttgcccaggatggagggcagtggcagaatcatggctcaccgaagcctggatctaccaggctcaagtgattctcctatctcagcctcccaagtagctgggaccacaggcatgcgtcaccacatctgactaatttttttttttttttaagacagtctcgcactttcacccaggctggaatgcagtggcacgatctcggctcactgcaagytccacctcccgggttcacaccattctcccrcctcagcctcccgagtagctgggactacaggtgcccaccaccatgcccagctaattttttgtatttttagtagagatggggtttcaccatgttagctaggatggtcttgatctcctgacctcgtgatccaccctcctcagcctcccaaagtgctgggattacaggcgtgagccaccgcacctggccctaattttttcattttttgtagagacagggtcccactatgttgccaaggttggtcttgaactcctggattcaagccgttctctctccttggcctcccaaaatgctgggattacaggcatgagccactgcaaccatccttagatgaagtaattttaaatgtaatgttaactgacttctcatgaatatattctgagatatggcgaagtacatcaataattcggggaattaaagctcatttggaaattttagtaatgccccattgtaacacacatagatgactgcagctgactgatcatttgatgtcttttttaatagctactataacattttggggagggatatacatatatacatatgagcatgaaaatttacatacagatacatacatacacacttatgcttgtgtatataccgacaatctggagaaatactaagaaactgttaagatgttgggcacggtgtcccatgcctgtaatcccagcactgtgagaggccgaggcgggtggatcacctgaggtcaggggttgaggaccagcctggtcaacatggtggaaacccatctctactaaaactacaaaaaattagccaggcatgctggcgggttcttgtaatcccagctactcaggagactgaggcaggaagatcgcttgaacctggtaggcggaggttgcagtgagctgagattgtgccattgtactccagcctgggcaacaagagtaaaaactctgtctcaaaaaaaaaaaaaaaaaaaatggccaggcacagtggctcacgcctgtaatcccagcactttgggaggccgaggcgggaggatcacctgaggtcgggagtttgagaccagcctgaccaacatggagaaaccccatctgtactaaaaatacaaaaattagccagatgtggtggtgcatgcctataatcccagctactcaggaggctgaggcaggagaattgcttgaaccttggaggaagaggttgcattgagccgagatcgtgccattgcactccatcctgggggcaacaagagcgaaactccgtctcaaaaaaaaagaaactattaagagtagttgctttaggagtcagaccgagggaattgattttgcacttgttttttgcatataatagtatatatatttaaatccttttatctttttattgtgcccaaatacacataacataaaatttaccattggtgactttaggtactcattcacaatgttgtgcaactatcaccactaatttccagcattttcaccaccccaaaaggaagctctgtacacattgagcarttactccccattttcccttctcccaggttctggcaactactaatctgtctgttctgtggattttcctctactagctaatttatataaatggaatcatatagtatgtgacttttgtgtcacttcgcataatgttttcaaggtacatccatgttgtggcacgtgtcagtgcatcattcatttttgtggctaatgtttcttggtatggatatagcacattttatttatccatttatcagttaatggacatcgggttgcactttttcactattgtaactagtgctactatgaacattcatgtaccagtttttttaatacctctttttggttcttttggatgtatatccaaaagtgaaattgctggattatatggtaatttgatctttaacttattaaggaattaattctacacttttgaagatgtttattaacagtacatatagctctaagtaactctatttctttgaaaacgttctacataatattccatcatatgagtgactgtattttcttttttcttttctttttttttttttgagacagagtcttgctctgatgcacaggctggagtgcagtggcacaatcgtggcccactgcaacctccgcttcctgggttcaggctattctcctgcctcagcttcccaagtaactgggattacgggagcacgccaccatgcccggctaatttttttttttttttttttttttgaracggaacctcactctgtcacccaggctggagtgcaatggcgctatctcgactcactgcaacctctgtctcctgggttcaagtgattcttctgcctcagcctcccaagtagctgggactataggcgcatgccaccatgcctggctaactttttgtatttttagtagagacggggtttcaccatgttagccaggatggtctygatctgctgacctcgtgatccacccgccttggcctcccaaagtgctgggattacaggkgtgagccaccacgcccagcctaattttttttctttttgagaccaagtctcactcattcaggctggagtgcggtggtgcaatcttggctctctgcaaacttcacctcctgggttcaagcgattctcttgccccagcctcccgaatagctgggattacaattgtgtgccaccacacctggctaattttgtatttttagtagagacagggtttcaccatgttggtcaggctggtcttgaactcccaacctcaggtgatccgcccacctcagcctcccaaagtgctgtgattacatgcgtgagccaccgtgaccrgcctaattttttaattttaattttwattttyattttttgagacagtctcgctcggttgctcaggctagagtgcagtggtgccatctcggctcactgccacctccgcctcctgggttcaagtgattctcctgcctcggcctcctgagtagctgggattacaggtgcacaccatcacacctggctaatttttgtatttttagtagagacggggtttcaccatgttgtctcaggctggtctcaaaactcgtggcctcaagtgatccacctgccttggcctcccaaaatgctgggattataggcgtgagccactgcacctagccttcaggaagatttttaatagctataattttagcacagttttctagattaagggtcattatcattagtatgagagaacacacatttctaaaattttgggtcatattaaataatttgaaaagagtatattcaataatttttagtacygtaagaatggcttaatgatataccagataaatgaaaatatgtgtagtgtcttcagtatattcagactgatagagtagctagaatatttcagtaggtctgcacggtatttacccatcattatttgatacagagttacctggtctttcagtattttaaataatcagcagtgttttaaaatgagttcatatttcattcatcataacattggcctcataatccgagaacagtagtatattaaagcatgaaatattatttactgggtcttttgacatacttgatttgatcatcccttagtataactgtgaccagcctttggtttaggttgtagaccttggcttagcaggaaggatatagttttttctgggctacctatagaaatgggaaagaggtgagaggcttgtgtcctggtaacacagatgctgactgagttcttggcatgggaggaaacttagcattatgctaatgtctaagtgggacaactcatatttgaaccaggcggtctcattctgaagccctccttactaacccttgtactacattgtgtgatatatagagtagggacaatatcatgttcacttttgtgttcttagggcctaacacattacctgtgacatgacaggaccttagtaggggtttgttgaattcattattgtcgaatgaacttttatcctgatcctctttttttttttttttttgtgatggwgymttactcggttgcccaggttggggtgcagtggcgcgatctcagctcactacaacctcctcctcccaggttcaagcgattctcttgcttcagcttcctgagtagctgggattacaggcacgtgtcaccacgcccggctaatttctttttagtagagacagggtttcaccatcttagccaggctggtcttgaactcctgacctcgtgatccgcccacctcagcctcccaaagtgctgggattacgtgtgtgagccactgcacccggcctatcctgatccttaaccttgtaatttatagctttaataatcatgcttaaagttctttctaattctctttataactgtataatcttcttcccttgttaaatcatcaacttgtaagggaagacttgaaaagtcaaagattttgagtgccaggtwcaaggaacttagttgcctgtggagcaatgctaaccaaacctggctgtgcatcagaatcatctggsggtttgcattctggaagctatttccccttatatatttaagtaaaatcttcagaacatgggctaatctgcatttttattaagcttcccaggttaggcttaggcacctagcctagcatttaagaactgctgcaagagattgatagaaatggaagactctatttggtcagaagcagcttaaagtttagataaaaagacacatgcaatatataaacagttattcatgacaagagagtgaggaggcactatgtgattaatgccaagagagtggtccagacagtgaggactcgaagttgggtggagacagagattgctttcaactgattaggattgagatagttgctggttcttctgggattggagagatttggactggcagaaagctgggggaaatgttccagttgctatgcgactagatcttggaggtggaaagatgagtaagaaacaaataatccctgttcccccagagcttgtaatatgtttgatgtagacagttaagcagatgtttgtcaaacatgtggtgagtgcagtgagaatttgagcaaaagccagtatcaggaaaattaggtagatattctagggaatgagtatagaccaattcagcctgcatcacaagtttatgtaggagaatttaaagaaatactgagctgggtgctgtggcatacacctatagtacctcctacttggcaggctgaggctggaggattgtttgagcccagggatttgaatccagcctcggcaacatagcaagaccccatgtctaaaagaaaactttaaaatataagaaatactggcttttaaactcaaaggaggccgggcacagtggctcacacctgtaatcccagcactttgggaggccgaggcaggtggatcacctgaggtcaggagttcaagaccagcctggccaacatygtgaaaccccatctctactaaaaatccaaaaattagctgggaatggtggtgggyacctgtaatcccagctacttgggaggcagacgcaggagaatcacttgaacccaggaggcagaggttgcagtgagccaagatggcaccattgcactacagcctgggcgacaagagcaaaactccatctcaaaaaaaaaattaaataaataaaaaataaactcagaggaattgattaaaaggcccgagagcttgatgggaaaatctttgggagtaggaaggctttcttgtacttttgaaatcatattaggggctgggcacagtggcttaygcctgtaattccagcactttgggaggccaaggcaggcagatcatctgaggtcaggagttcgagaccagcctggccaacatggtgaaactctgtctttactaaaaatacaaaaattagccgggctcagtgscgggcacctgtaatcccagctactagggaagctgaggcaggagaatcacttgaaaccgggaggcagaggttgcagtgagctgagattgcataccactgcactccagcctgggcaacagagtgagaccctgtctcaaaacaaaaaagaaaagaaatcatattaggtagccactactatgtttactcctaagtcaaccttgaagatgaggaagctaaaggagcaaagaaaagaaataatcacaatagcctggggccagattgtagagttataaattgaactgtccactaatatttcataatatggacagaccacctaacctctycacataacagtttcctcatccttatgagggtgtaggactaagtttctaaatgtagcatagtgtttaatagcactttgaagtcagactgcatgggcttaacctctggctctacacttcagctctatgactttgagcagtttatttaacttctctgtgcctcagatttctcatctgtaaaatactccattgtgtatygttgattagattaaacaaataaatttatggagaactgttagaacagtgtttgacacatatggaattgttaagtatatcccttccagttctaawgtcttctaattcttgaggttttgactcatcaccaggtatctactgtgaatcctacaacataggaattacttaagaggactcatgaagaaccataattaaaatctaggacttagtgtttagatctaccatcactagaactgtatcagaataggaagtaaaattagataatgcatctcccagtggacacattgcacaagtgtttscttctgaaacttgtttagaaagatggcctagccaggtgcggtggctcacgcctgtaatcccagcactttgggaggccgaggtgggtggatcacctgaggttgggagttcgagaccaacctcaccaacatgtagaaaccccgtctctactaaaaatacaaaattagctgggtgtggtggcatatgcctgtaatcccagctacttgggaggctgaggcaggagaatcacttgaacccaggaggcagaggttgtggtgagccgagattgcaccattggacatcagcctggggcaacaagagcgaaactccatttcaaaaaacaaaaaagaaagatggccttagaggcttaattaggaatataaaccatggagtctactgtctccctgggaggctaatattcatttgtaaatgttgactggactgatgccattctaattactttattatggttctcttatttctgatgttggtaacatctggccacggtttgggcatgtacttactgtaaaacacactgtgcaatggagagtaatatagttgtaacagcataacgtgtgctggagggtcaaaggtgctctggagtcagagtgaactccatagactagcttttcctaagtcataacagttgattacctgtagttcccatgggaagaagtagttatccaaggacagctgggcttctgtataagaaaagtcagtttaaaatgatccaagaggcaggtgtggtaaagtctcagcttctcaggaggcagaagcaggaggagtacttgagcccaggagtttgagtccagcctgggcaatatagtgagaccttgtctctttattaaaaaaaagccaagatatttaatttagagatttttgaactactctttagagtagaatccttaataagtaaaacagatttttaaaaagyaccactaytctgcttggataggccaaagtaagtggcctggagctatrcttaccagccttcttcctacttatttccactcctccctgatggcctctgagtttctttcaaggaactttagggcacctaagctcacagtttaggaaccaatggtgtaattgatggtaggttcattttgcctatagcataatatttattttcctttaaaaattgtaatttatataaaaaactcagttcttgtttgtaggttttagatcccataatttattttgattattactattgctatcttcccccctggggatacactcttccttttttattgagacagagtctcactctgtcacgagactctggagtgcaatggcgagatctcagctcactgaacctccacctcctgggttcaactgaatctctgcctcagcctcctgagtagctgagactacagtcacacaccaccatgcctggctaatttttatattttagtagagacagggtttcaccatgttgggcaggctggtcttgaactcctggcctcaagtgatccaccagcctcagcctcccaaagtgctgggattacaggcatgagccaccacacccagtcaacacttactcttaatcctctttttggaggcaaacctccgcattttatatgcttttgtggatctggggttgatttatggggaggcgtgcctaaaagctctcttatttgttgaaaagaacaaccttttaatcgtgaactagaacttgattaaagcctgtatcttcagctcagactgtttcttttcattcactagatttgtctgcctctgctcattccaaggtggtgatcttcacagtcaactctttgggwagttctcagtcgtaccttgatgtggtacagagcaatgtggatatgttcagagcccttgtcccagctctgggacattatagtcaacacagtgtcctgctcgttgcatctcaaccaggtaaaatgctttattttaaattaagttgatggtccagtacatcagtagaattgccattactgataaaaaccataaaactttagggcctggcacagtggctcacaccagtaatcccaacactgggagtctgaggcgggcggatcacctgaggtcaggagttccagaccatcctgaccaacatggtgaaaccccgtctctaccaaaaatacaaaagttagccaggcatggtggcgggtgcctgtaatcccggctacttggaaggctgaggtgggagaattgcttgaaccccggagatggtggttgcagtgaggccaagatggtgtcactgaaccccagtctggccgacagagtgagactctctcaaaaaaaaaaaacaaaaacaaaataaaaaacaraacaaaaaaagcctttaaattataaagagatggctagaatattcagcaaaattgcctatataataaacagtgtaatattctggcaaccagttacttgttatgactaacattatctagaaggttccagcatacaattttttaatgaaatatgatattatgttctaggttctaagccataccttcctcagtgagaagatgtttaaactcccaagagaaaaatgcaatgacttatatgcatgatattttgttaattctgaagtatcaaaaatgttagcatgccagagtgcatttttaacattttgtattttgcaggttgttttggaactgtcgtactcaaaaatagaaatattttcaaagagttagtttgtactgggctcaaattggtgaacagattttttttaaatgttcccaatgtagaggtattgtatgcatttcagttgtttttttgtagtaatttgttgagggacattgatctctttaattctcgacatgcttttggaatgtaagaaaaaagtagttgtgttttcattcataatgcgacactgaatcatggtggcatatgaatcagtattttaatttaaagatagaaattcagtttaagatagatagatgtaaaagaaaactcgatcaataagaagaaattattttttagttttttgtaccagtttttatcctcacttaactgttctaggaattatctattttctacccctgacaatttatatttaacaataaaatttgaccaggcacggtggctcacgcctgtaatcacagcactttgggaggccgaggcaggtggatcacctgaggtcaggagtttgagaccagcctggccaacatggtgaaaccctgcctctattaaaaatacaaaaaatagccaagtgtggtggtgcacacctgtaatcccagctactagggagactaaggtaggagaatcccttgaacctgggaggcagaggttgcagtgagcccaggtcatgccactgcactccagcctgggggacagagcaagactccatctcaaaaaacaaacaaacaaacaaacaaaacacagtaaaatgtatcttgttgaaaccttgttagtgtttctaatgtacattaaaaatatgttatgggctgggcgcggtggctcacacctgtaatcccagcactttgggaggccgaggcaagtggatcatgaggtcaagagatcgagaccatcctggccaacatggtgaaaccccgtctctaccaaaaatacaaaaattaactgggcatggtggcaggtgcctatagtcccagctactcgggaggctgaggcaggagaattgctggaacccgggaggcagaggttgcagtgagccgagatcgtgccactgcactccagcctgggcgatagagcgacactccatctcaaaaaaaaaaaaaatatatatatagatatagatatagatatagatatagatagatatacacacacatatatacacgtatatatacatacgtgtatatatatgtgtgtatgtatgtgtgtattatatgtgtatatatatagtatatatatgtatatatgtgtgtgtgtatatatatacatataatgcctcagtgcattgaggacctaatatacttattaaaataataaatatttgtgagctaggctagaagtatatattttttaacctttacattttttaccttgtatgcaatatttagtggaaatcatgacctatgtaacatggaaactgagtacatttcctgcaaatcgagtgatcggaattggatgtaatctggattcacagagattacagtatattattacaaatgttttgaaggcacagacttcaggcaaagaagtatgggttattggcgagcaaggagaagacaaaggtaagaagtacgtttttaggctgggtgtggtggctcatgcctgtaattccaacactttgggaggccaaggcaggattgcttgaagccaggacttcaagaccagcctgggcaacatagcaagaccccatctctacaaaaagataaaaaattagccaggcacggtagtgcatgcctgtagtcccagttactcaggagactgagtgggaggatcacttgagcccgggaggtcaaggctgcagtgagccatgatcgcagcactgcattcaagcctgggtgacagggtgaaaccccatcgctaaaaaaagaagtacattattattagttacaaccaaaattgccagtggtcatggcattcacatatatctgaggactccagaattgtgggcttaattggctttgttccacatttgagtgtgccttctgtataacaggccctatattgtgaataaattcctcatatgtgtcattctcgttgtaattacttttctgtaagtttaaggttagacaagaccgcttagtaggattttatatttttaaattgaatttcagagttcaggatcaatttaaaaatttaattttccagaaagaaacatttaaataaaccttaaagcatatatagaactctttcctttactcttcccacccttcaaccttgcttacctttcccaagttcagaccttctccctagatacatgccttctgtctgcttctttttaaacagagttttcactcattgtttatccctatggcctttttctccagccacttgctctttcccacagaaggcattcagtttcctgtattggaaagctccttttcctatttcaaaagaatgctttccctatttaacttgagaatctcttcccttactcttttattgtttctctcttgctataaagccaggttggtcagtgatttaagtgctgttcaccctgattttgttcatttaagtatatgagtaaaataaagataatagtatactattagagtaagtgccaaagtgagtactatacacttacagtgcttagatacttatgagtgagcatttaacatgggctgaaatgactagagaaaattctataaaggccatctggagtttgaactggagtttggacgaatgaataggattttaatagatagtgaacaataggaaaaacactccaggaatgggaaatcagaattaggcaaaagcacgaagttaagtatggcatgttcatgggataaaaaatgtggactagttgttgcagaaggtttcaatgagataaatctaattgaaattacattttgaagatctgtgaatacccgatcgaagagctggaaagtgatctggggaaaattagtcattacttcatcatttgaagtacttactgttaacttcactcagcatgtaagtgctgcaaggtagagcatgatatagaaaataacctctctgggctgggtgtggtggctcacgcctgtagtcccagcactttgggaggccaaggtggatggatcacaagctcaggagatcgagaccatcctggccaacatggtgaaaccccgtctctactaaaaatacaaaaattagctaggcatggcagcacgtgcctgtagtcccagctactcaggaggctgaggcaggagaactgcttgaacccaggaggcggaggctgcagtgagccgagatcacaccactgcactccagtctgggcgacagagtgagacttagtctcaaagaaaaaaaaaaaaaaaagaaaagaaaagaaaataactcctctgccggtgaggaggtaataatttaattgaagagttagagaaagaccatgcacattaaaaagttaaatagatgtcaaaccatatttccacaaagcaaatcaccctctcaaaactatttccttggaatttaaagtgtcatctatactttgatgccattaaaataaaatattaacattgatgatatctaggttagaggtaacttttaaaaatttatagttttctgtgtagtaaaaayatgtagtatttatataatttttaagaaaagcattttaataaaatataacagtattttaaatctgtaaaaatctgcactggctactagaaggctcagtgctagaatgagtcaggctatasaataaacccttaaaaaacccgacagcatgactgagcaaaaatacttttgaggctccaaatgctccctgacactacacactaatcaacaggaccctggaaaagggtagcaaacaagaacttggagcaaatgtattcaagtaatgaatgtctccattyattcattacttgaatacatttgaaattcatggctcattcaaactcaaaacccaacatagaccaaaccctctggtccatgttgatctcttgcttgcctggttattgcacatctcatggttagtttgcctcttcccctctagtctacccggtaaatgatgtgaaaataataataatattactcaaaacttatagaatgtttattgtgtgctctcacatattaattcaatcttcctaaaacatgttattattttcaaaaactttcagaggcttcctctgaccaaaccattaaattgcattgcttggcactcagggacccccaaaatataaccctaatctttcttcccaattatagttagggagatagccacgttattagagagctggaagggaccatctattacattttgttttagggagccagtgaatgcaggcattgtaaaagtgacctgcgtggaagcctacagcttttagggtcaaaggactagcacccaggtcttgtgtctcccaggcccaccccacagctttgccacagggacatttactcactttgtttacctcccttgtaatccctttgccttctcggccatcttattgacatctttcaaggtctaagtcaagcatcccttatatgataaaggttttttcctgatcacatcacttcacagtgatttcttcactcctttgagctaaagctatttcaatctataaggtaataaactacatcttgtctcatcatgttacttttgttgtcctgctgcttgttcttatctgatttttgtgtgtgaccttctccttatttaaagtgcaaattaytaagttattttagttgaaaatgtagtacattcacactggaaaaataagtacaaaaagatatgcagtgaaaagtctcccttagatgccagacactcaatccttcttcctarggacaatcacagttatcagtctcttttataatcttccagaaatattctgtgtatagacaagcacacatgtgaaatagacatcatacatcattctccacctcgcccttttacttaccaatgattatggaatgattgcacagtaacatagagctcattcattctttttaactactggatataccataatttacttaaccagcctctctaatttacaagttttgaggaatagttgatatacaataaatattgaatgagtaagaatgtttgaaatatggttgtattaatttcttaagtctcataaagagaaaatacaggctgatgtgatgtgataaatatacmacttaccctaacctagtatatctgggtgaaggaaaaaaacaatctaatagaagttaattgtgagctcttcagaggaacaatttaaaacctaccaaaaagcagtttgtatttgattaaatgaccttttatcccaaatgtaggaatttattttcagaaacatttattggccacctgctttgctcaataaacactgtgttgattgctgttagaactatatagatgtgtaagaacctgaccctgtctttaggaaactttgagtctaatactggaaatgactggaaggctgtactctgagagaggtccaagggaagtaggataaaaccacagggaagagatgtggtaattctgtcttgaggtctcaaattggaactagaaatagagagatgtaggtgcatgcaaattgagatcacataaatgtagtattatgtaatatttgacacacataatgccagtgttaaaacataactgagcacgtatgaatccatactcaatcaagaacattactgatactgaagttaactatgtagttctccccagtctatctccctgtctgccttctagaagtaccatctgatcactttttattctgtcttctactcttcttgaagagctagttatatccatggataggtatatttaccttggtcctggtatcagaaatggattagaagctccctctgctggtttcatgtatagataccaactgtttagacttttgcataagtgataccatcacagtaactgcaattataattattttttattgtacctactatgtgtattaaatattttgcatatctcatttaaattttataaacactctgtgaaggaggtagtggttttccagatttatgtatgaggaaacttaaggctcaatgagataagtaatttgcccaaggttacatatctgtgaagggcagaactgagatttgaaccctgatctgactctgaagctgtgctcttccttgctgtcacttaagataatgtatctagagcatttagtacagtatctggcacacagcaaacgctcagcaaatggtagctattattacagtgattggcaagatggtgatgaatagaaaattggcaaaaaacatgtaaaakaactctttgaagtaaagcaacattaggatttggaaacagatataagagtaacaattgtgtaaataaaatatcctcttcaagtatttcagagacaagtgacagctacagcctagggaggaatcacatgacatacaagacctttaggtctatttcctgcttcatcgtctcccattctcccaggcattctatgctagtcaggtggttgacttgcagtttactgaatggtttatgcactctcatgcctccttaacttagcaactgctgcttcctttccctgaactcgttcacttggctaactcctgcttaccctttaggattgggcttgagtgccacctctcccaggaagccttccttaatttgccaagttaagtaagttcatacaaataatgtaacaaatttttaaagaaagtaatccacctattacccttttatctaagtaaaacattcatgccaaaacacaattttcaaaacatcccgcccaatgtaacaaatttttaaagtaatccacctatcacccttctatttaagtaaaacattttaaaaatcccttaagttgtccatatgtatttatatttttcatataccagttcagggtttggtgtttttttttaatacaaaaacttttggttgggtgcagtggttcacagctgtaatcccagcactttgggaggccaaggcgggtggatcacttgaggtcaggagtttgagaccagcctgcccaacatggtgaaaacccgtctctactaaaaatacaaaattacccgggcgtgggggtgcacacctgtgatcccagctacttgggagtctgaggcgcacacctgtaatcccagctacttgggaggctgaggcaatagaatcgcttgaacctgggagacggaggttgcagtgagccgagatggtgccactgcaatccatcctgggtcacagtgagactccgtctccaaaaaaaaaaaaaaagaatatgtgcaagagaacacaaaagaataatacatggtccctgcactctgggagcttataatcagtttgaggaagggaggcatctggatacatatggggtcctttgttgctgacacatgactaagtggtctaattttgaatgtagtttagaattcttgtatcttaaacatattattctatagccacaagtatttttgttttgcctactcaaatatgtacagatttgtaccaaacaatctcttcacacagatgagaaacaggtgaacattggaaaggtttcaaaatgttactggcaacttcaatttaatattaaagtgcagttcggctcagtggcttacgcctgtaatcccagcactttgggaggccaaggcaggcagatcacctgaggtaaggagttcaagaccagcctggccaacatggtgaaatcctgtctctactaaaaatacaaaaattagcctggtgtggtggcaggcacctgtaatcccagctagttgggaggctgaggtagaataattgcttgaacccaggaggcagaggttgtagtgagctgagagtgtgccactgcactccaccctaggtgacaaagtaagactgtgtatcaaawaataataataataataatattaaagtgtgatataaatttctagtctggccaggcgcagtggctcacacctgtaatcctagcactttgggaggccaaggtgggtgaatcacctgaggtcaggagttcgagacctgcctggctaacatggcaaaatcccatctctactaaaaatacaaaaattagccaggtgtggtggcgggtgcctgtagtcccagctactcaggaggctgaggcaggagaattgtttgaaccgggaggcggaggttgcagtgagccaagatcacaccaytgcacaccaggctaggtaacagcgagagtccgtctcaaaaagaaaaagaaaaaaaaaaaawatatatatatatatataaagaaatttccagtctgtgtatgcagctttgaagttttgaattgtttttgtaaatgatgtagtaaaaggaaatgggtaacccagaagattcttttagaaaacaggaccctggtgctgggtgtggtggctcaagcctgtaatcctagcactttgggaggccgaagcaggtggattacgaggtcaggagttcaagaccagcctggccaacatggtgaaccctgtctctactaaacacacacacacaaaaattagcagggcatggtggcatgtgcctgtagtaccagctactcgggaggctgaggcgtgagaattgcgtgaacccgggaggcagaggttgcagtgagccaagatcatgccactgcactacagcctgggcgacagagcaagactccatctgaaaaaaaaaaaaaaaaaaggaacaggattctctgcctctgtaacagctgtggaaattctagcccaaaataggtgaccagattattccctacctggtgaaattagtctcagtgcatttctcagcagaacaaatgtcaagtgcttataggtttctacttagatagtaaaatggcccttgcagaactgttactgatgagagaaaacaggtaaggagactgcaagcagactttggggatcatgttttttgtagttcagagttttcctcacctcgggctagtggtacagcacattcattgttatccagtggaaaaatctaacttgctagaaatgagaaaacttctatataaatattagcacaggtacccttgactccaaaagatctgttatcacatcttaatccaaagagtcactggcaaaacataattaattcttcatctaattttagtgctcacatggagtggccaagaagaagtagtgagtcatacctctcaagtgcagctgtccaacaggtaacactgactggaaatttgcatttatccaacgaaaaatcatttacttcatagctaacagctatttatacagtatgtacttaaccaggcttctggaaacaaaactaatatggacaaacccaaaagtataaaggagcagtgttttatattctttgatttcttatctgaaggtagatctaagagtgctttgcaagctttttcagataacacagttgacatttaaatggtaaaacatgttatttgtagacagtgatttactgcttctctacctaaacatctgagccccactctgtcaccaggctggagtgcagtggcgcgatctcggctcactgcagcctccgcctcccgggttcaagcgattcccctgcctcagtgtcccaagtagctggaattacaggcatgcgccaccatgcccagtaattttttgtattttagtagagacggggtttcaccatgttggtcaggatggtcttgatctcctgaccacatgatccacccgccttggcctcccaaagtgccgggattacaggtgtgagccaccgtgccaggccaacaattttcttaatgtagaagataatttgtccacaccacttaaaaatgaatatctattaatcacacacaaatagaactggaaatcagtctaatatgaatggataagccatattatatgttcaggcaaaaaaaaaagtgtaacacacagatccttgtatcttttgcttttatccagaggccttccaggggtctgtaccgcataggcaggactctacacagaatttatactcatggcatttgttgtttcaccgtcatataacattttcctgaagtctgagaggtggtgatctttagctttcaaagccatcagcttatgacttttagaatataacaactggaaaaagtgttctctttcttgagaagattagtgtatggtataattcattctaatctgattatacaatcctgcatttatactttttaaaaggaagaaatttaagtgtttatgtatttttatcatttataaaagaatgtatgcttattataaaacttcagatactgcagatatctataaaatattaaaagaaaaagctaaggtaattccatttttcagagacaaccatttttaacaatttagtgtccacatgtccaaaaaattttttttctactcaggaggctgaaatgggaggatcagttgagcccaggagtttgagaccagcttggacaacacagagaccctgtctctaaaaagaaaaaattgtttttcaatgcttctacaaatgtataataatatagatttatgctatccatactatcttgcaacttcatttctttccttaatgatgaaatctcagacatttttgcacattgtacatgtaaatctaccttattcttctcaaaagctacatggtactacgcttggtagtgatttaaccagtcctcttttgatgagttgtttccaaatattgcagacatgcttattatgtacatctttgcacacttgagcatactgctgtaagataaatgcctagaagaggaatttctagatcagacgttaccaaatcttcttcttaaaaggttagatcactttacattctcaatagcagttatgagaatgcctgtttacagtttctccaaattagttatcagtctttttaatttttgccaattatcgataggcaaattggtatttattgttttaattcatattggttaaatatcaatggcagtgaacattttttatgttattaggccatttgtattttctttgaactgcctatctgacatcttaggaaaagtttaaataaacattagattagattatctataggcttccctaacaattgctgcataactcttgtttctgtcatagaaacatctaattaataccttagccagaatgtaaaactaaatgtgcatattttatgcattttctgagatcacgtatttttgtaacctagagccatggaactgctaagagtaaaaggtcaaagatcctggtctgttggactatcagtagctgacatggttgacagtattgtaaacaataagaagaaagtgcattctgtatcagctttagcaaaggtaattgctattcttattctcttattatattttaaacttagatattattaatacaaaactaacaaaatcattattcatactctaaccccaggtgtcttcagtatcaccagcttttagagtaacaggtaggagaaggcagtttagtttaagccctatcctgcttagctatgagaagtctgccagcttgggcaacatagtgagaccccaactttacaaaaacaaaaacaaaactttgccaggcatgtgacaaccactcagtaggctgaggtgggaaaatctcttgagcctgggaggttgaggctgcagtgagccatgatcatgtcactggactccagcatggacaacacagcgaatccctgtctccaaagataacattttgactgggggcagtggctcacgcctgtaatcccagcactcggaggccgaggcaggtggatcacttgaggttaggagtttgagaccagcctggctaacatggtgaaacccctctctactaaaaatacaaaaattagccagacatagtggcgtatgtctgtaatcccagctactcrggaggcggaggttgcagtgagcacctctgcaactccagcctgggtgacacagcgagactcagtctcgaaaacaaacaaacaaaaaaagtgtggacttctatcaggttgccttctcaccctcatgtgatttttggtaacccccaaatagtgtttatatatccataaatttcttcttactgtcatttatcatctcagccagccaagtcaccccagatttatgtgccagaaagacaaatatcacatattcttactcatgtaacccccaaatagtgtttatatatccataaatttcttctgactgtcatttatcatctcagccagccaagtcaccccagatttatgtgccagaaagacaaatatcacatattctcactcacgtgggagcttttttttttttttttaaagttgatctcatggaggtagagagtagagtgttggttaccacaggctgcggttgggggatagaatgaaaagcagttggttaatgggtacaaaaatagataggaataaattctagtgttcaacagcacagtagggtgagtgtgattattaataatttattgtacatttcaaaacagctagaagaagctgggtgtggtggcccatgcctgtaatcccagcactttgggaggccaaggtgggaggatcacttgagcttaggagttcaagatcagcttgggcaatatagagagacctcatctcaaaaaaaaaaaaragaaaagaaaagaaaagaaaaaatagccagaagagaccatttggaatgttttcaacacaaataaatgataaatgtttgaggtgatggatagccccattaccctgatttgatcattacatgttatatgcatatattgaaatatcacatgtaccccacaaatacacactcttatggtaccagttgttttattttttaaagaagctattgtcatgactgtgcccagagaccatcccatgcccctccccaggaaatacattcttaactatcttttttsttagcccccaacctcctacccatattgcagggggggctagcttgcttctctacaaagtgggtgtctgaccaagttgcttccatctctcaaaaattttctgaaatgataacaagtttatagaatcaatgaatgattgtgaggtctggacttctaaaaataaaataagtaaatgaacaaaaaaatttttttaagtccaacttgtatcactttgtcctagttaagaaagcaagaaagtatgcatttttgtattaacttctttgcaatgatttagttctattaaatccctatttttctcatttcagggatattatgatataaatagtgaagtgtttttaagtttgccttgcatccttggaaccaatggagtatctgaagttatcaaaaccacactgaaagaagatacagttactgagaaactccaaagcagtgcatcctcaatccacagtctccaacaacagttaaaactttgattctcaaatgcaatttgagaggctggacttctacctaaagggaaaagtcatttaattttacctatatataggtttgaggatttctgtatcctgctacttacttttacaaactgcttggttaaagtagagggtttcttgattagctttgtgatgtaaatccttaaggagttatacaaggaggggaaaaattaattttatttggggttcttgagatatctatgctgttctttaaatctacagcaggggtaaacattcatctgcagtgtgcatcaatttaaatcatatatcctaaactaaaagcacaattcatacttcgggaatattttataagtaatatatctttaaaagaaaattaccctttgacttttataatcaacataagttccaggcccagtatggatttacaaaatctgtgtcagttgtacattcacaggatccacagcttaagttactaatgtttcttgtgtaaaatcctgttggtagtaatagtaaagcattgtatttcccttcttcaaattaattacctaccaaaaaatggaaaagaattttacatgcactttaaaatagtaaaatggaaagtgaatttttaaaatatatgcattaaaagtttactttaatttccagtgggacttcctttatgaaattttccataacctcttcctggagtattacaagatctccaacatctcataaactaattgtgatattagtggaaccataagcaaatrtatatttttagtggaaatagattatgaatgaaagccaagcaccttactttaaagccaaaatatgagattttcattaaaaacattggtcataatagggagaggttttttatttgttctgagcaaatcctttaacctctcctgatgatacagttcagagtacacacactttggtgatggatcaagagcaatattttcttatgtgaaagatagcttattattactattgtgacatacaactaatagtaacagttaacatcaacacttcatatataccaggcagcatgataagcactttattattttactgaatcctcacaacagaccactgaggtagggactattgccatcatcattttataaaaggaaattgaggtttagtcctcaagaagtcttggctattaaggggcacttatccatacaacctctactttttctaggcactaaaagggggaaaaggcttaatagccaaaatagttatcaaaagaccctaaagctggggtcctgtacaccatgaaaggattactttcattctcatgtaagggcatgcttttataaaaaacaaacatgggctaggcgcagtgactcacgcctgtaatcccagcaccttgggaggctgaggcgggcagatcacgaggtcaggagattgagatcatcctggctaacatggtgaaaccctgtctctactaaaaatacaaaaagttagccaggcgtggtggcaggtgcctgtagtcccagctactcggaaggctgaggcaagagaatggcgtgaacccggtaggtggagcttgcagtgagcagagatcgcgccactgcactccagcctgggcgacagagcaagactctgtctcaaaaaaaaaaaaaaaaagtttaaaaattagccaggtgtggtgatgtgcacctgtagttccagctactcaggagggtgaggcaggaggatcacttgagcccagaagttcaagattgcaatgagctatgatcatgctactgcactccagcctaggcaacagagtgagaccctgtctctaaaaaaataaaaataaagcaagcatataataggttaatccagatggagttaggagggtttataagggcagacacatcctagtaaagaggaaataggcaaactaatgctgttttagtgtaataaggaatgcttataatgatgaactttagtcataaagaaaaggtgaaattatattcagtaacccatgttaggaaagcagaaaactatttaatatgcttggaaagattccaaccagagttaactgaataaaaaccttggacatttgaagagaaaagcatttagttctatctaatttcaatatgcacgtgaattagttcatgttactctaacaatgtattcttactgtccttttttatgaaataggaaagtaaaactgaaagaactatttcttgtgtttttaaaactagccttttctaatatttgatatctaattaaagttagataatatgtaatatgcttttgaacaataatctaaccagaaaatattgtataataaattaccaagaaatcattacattaattataaaaggaacatgtcaatacaacaaatgtttatttaacacctactgttactccaaatactgtgttagaatttgactattcgaagatgaataatagtctttgccctctggaaggccacaatgtagaagtaattctctgtatcagatatttccttgagtgttaagtgtattagtaatcatgttgtaaatcccagtgtaagtcaagaagcaatatcaccaccaccacctccctatgattttgtgataatttggcattttcaatgcttgttaactttcatgttttcatttttatgaaatcatgcagagcttgttataatttttagtggggtttggattaaaatgcttttttgatgtagcagaagatacattttttcccattttacattgttttccttaaatattaagaataatgagtaaaataaactgattttaaaatcaccaggagatgcttcatttattaagtgaaacattcagattaaggaatttttttcatataattcacacagtacccaggatatttagttattttgtgtaaaatgaagagactagattttatcattttcaaacttttaaaaattatttttagcaagaaaactttttaaatctttttgtttttgagccaggttctcactatattgcccaggctggactcaaacttttgggctcaagtaatcctcctgcctcagccaatggagtagctgggactgcaggtgcaccatcagcttatttgtgttttcatctgtgataatcggaggatttaaaattctccactaatatacgtgaggatagaaatcaaaatgcctaatgagtggaaaaaaactcatctttagtgttgaaatggcaagcaactttcaaaagcatttcaactactattaccttcacattaaaaaattaactgattttgcatatttctaaaaccacaaagacattttccccacacacattcaatcctccatggttccaatgaaatagataagaagttaacactttatattgaggtatagtgttgaccctaaaagattgcaaaagactgatagtaaacatgcagcaagaaagcttttttaaacaatatattgctgggcacagtgactcacacctgtaatcccagcactttgggaggctaaggtgggaggatcacctgagcccaggagttctgaggccagcctgggcaacaaagtaagacctcatctttacaaagaaattaaaaattagctgggcatggtggcacacgcatgtggtcccaatatacatgggaggctgaggcaggaggatcacttgagccagggaggtcgaggctgcagtgggccatgttcacatcactgcaccatgacctgggcaacaaaaatatataaatgggctgggcgcagtggcttacgcctgtaatcccaacattctggcaggctgaggcgggtggatcacctgaggtcaagagttccagaccagcctggccaacatagtgaaatcctgtctctactaaaaatacaaaaaattagctgggtgtggtggtgggcacctgtaatcccagctactcgggaggcttaggcaggagaatcgcttgaacccgggaggcagaggttgcagtgagccaagatcacactatcgcactccagcctgggaagcaagagcaaaactctgtctcaaaaaaaaaaaaaaaaaaaaaaaaaaaaaatatatatatatatatatatatatatatatatatatgtaaaatttattttaatatttataaatgttgcatttataaaatatataaataatatatattacctggcattcctccaactcacaaaggtacagttgctctaattaaagggactcctggttaagccgtggctttaagaacagtttgaaaaccttcttgcttttaaaagacataaaacagcaagtaaaatggaaggacagacagacctctagtttggtttgactggagctgtatgcttaactaaggagctgaaaaacagaggcggaggttgcagtgagccgagatggtgctactgcactccagcctgggcgatggagtgagagtgactcaaaaaaaaaaaaaaaagaaaaagaaaaagaaaaacaatacctattaatagcctttatttgtgcgtgttagcaacagtttataatgatgcttccacatgctttcagttaggccctccttgtgaatgtgaccttcacttagacgccaactttgaagggaatcaatactacggccttgttctcattagggctgtactaaaataattgaaactgtcacacatcatcaaactcaaaattttacaataccttgaatgacactgtgcttacaaaactgacggtgatgtgtaatgatgactaatgtaagtcaccatgaagaatttttatgggaagtaaaaattcaattaagatggaagtacctacccttgcattgtgcaaggcaatgaagatctgaaggaagcctgccttcaagggcttggattttgacagcggacaggtacacaaatacagcaccaggtaaaatacggcctgtattatcatttatgggtgggtacagaggagaaattctgacttacggaatgatttcctggagaagaaattactatctggcttcttgtgaaacaaaggctctacactttacccttgccaacgtatagtatgaaggtctttaagcttaaaaaaaatcattaattagaggaccactgggcatcatctaaggcaagtgtatgactttagagtcgggagaaacttgcgcctgagctagaaatgcactagcctaccattatcacaagagcaagtcagtgacagaacagttctctgaccgccagtgcagtgccctcccacttgatcaatcagtcattaaggctcactggcaagcccttcgtacttcttccctctccggcactagcttccttaagtcgactctgtgaaatacctgctaatcttatcctgaaccagagtttcgaccctcggaacagtcttgcccacatctttgggacccgattcgtcctgctgattccggcactcgaggggcgggttggttggaacccaccccgccaggcccctctcaatcccacacggtgtccacccttgcccgcaggacggcggcccggaagtgacgtagtggaagcggaagtggtgtagtggtgccgacttcctgttgtttgaggccgggttgggggtgtgcgattgtgtgggacggtctggggcagcccagcagcggctgaccctctgcctgcggggaagggagtcgccaggcggccgtcatggcggtgtcggagagccagctcaagaaaatggtgtccaaggtgaggctgcgacgcgctcgcctcccagggcgcgcccaccgctcccttccgcgccctgtcgagtccgtcccggcccagccaagcaagcttcccagacgggccggaagccccggtgcagtccttagcgacctcctcagamccccgccccgaggcgcctgtcgcctggtgcgggaatccccgtacgggagctgggagggtgggggacggcgacagtcaacaaaggcgtggagcggaggctacctgacacctgccgcccacccgccctcctctcttccactgagtttggagctgtctgtggggcagtgtagtttttcgtttgtttttataaacacaaacaagggatcatacttagttgtagatctgaggcaatcctctactcctgtcccaatctagggatcctccagtcttagcctttcttttgccgacccgcagagagtgtggccttttcagttttgtattctccagaaaagaagcgaaaataccagtcccttactgccccaggtgaaatacataccattaccatttcagggattttctaagagtaactacttttaagtgtatgcttcttataacgcgtatttatttgctttgagcttaatttatgatcttcacggctcaagactagtgttttttttttcaatttttaaaaaagcagttaagcattttgtattttaaagccatgatttatttatataattacttcaaacgtggcacctcacaccagagtggaatggcttttgttatgttttgttgtaattttccaaaactatgtaaaatgattgagagttgagtcttgaccagttcaacgtgttagcttgggatagttttgtcaaagcaagaatggtagcaatcagcggtttaagcggtttcaatttttaataaaacacactattatgtgtaaaacttttttaaaaacagactttttccagttaaatcgcccccatagttcttgattgaagaccaaataatctctaaggagaaaatgacagctttcaaaataaagcatatattggttgtgtaatcgtatattttaggcttcttggttttgttttgataaacttgttatccttagttatagaagacatatgggaagccatagaagattgtgacccaggtaaagatccatgttgtaacttttatatatcactttttgaaaaaaacggtatattgttttacatagtatgtaactgaagagtatctgttccatgactcttttttttttttttttttttttagagtcttgctctgtcacccaggctggagtgcagtggcgcgatcttggctcactgcaatctccgcctcccaggttcaagcgattctcctgccttagcctcccaagtagctggggattacaggtgcccaccacttcacacagctgattgttgtatttttagtagagacgggatttcaccatgttggccaggctggtcttaaactccagacctcagtgatccaccgctttggcttcccaaaatgatgggaatacaggcgtgagccaccacacctggcctccatgacatttttgatctttaaattgatagcatagtcattaagatttagtccttgggctgggcgcagtggcttacgcctgtaatcctagcactttgggaggccaaggcgggtggatcacctgaggtcacgagttcaagaccagcctgatcaacatggtgaaaccccgtctcctaaaatacaaaaattagccgggcatgatggcgggtgcctgtaatcccagcctactcgggaggctgagatgggagaatcgcttgaacctgggagacggtggttgcagtgagtcgagatcaggccactgcactccagcctgggtggctgagcaagactccatctcaaaaaaaaaaaaaaaaagatttattccttaatgtatgtatattcatataaagagcaagaatattcaaatattagcttattttttataccctaattaagtttcctaagcttccctagagaaacctgccatcaaagacaaaggcaaggcatgttcagaagatattttatacctctacctgccttcccc

SEQ ID NO: 93545 - DNA, 12958 bp, Homo sapiens
cttttagttggcctactcaaaaaggaagagagtcatattcttttcctatccttatttttactatggtaaaaatggagtgttgagtgaagaaaccttcaagctgccaacagtaagaccatcctaaatattgttactgagatgtctcctttaatgactcatgccttatggcttgttatctttctcttttttacttaatttggtgaagagtatagccttgtattagaaattaaatgtcttaacctgctttgggatgttctgaattcggatatatggtagaatgcggcagtggacgtgttgacaattttcctttaaggacctcacctttccatacctcagctcttatcaaagaacacagctggggagaattccacaagagattagcaataatagcatggatatacaacattcagtgctgccactagcttttccaggtatttacatgtgtgcaatccttttcagctcttctcaacagtcacccataggttgtgttattagccaggggagaaaagtcaccwgtgaaaagatgaagctgaaccacctagtgacacgggtttagtgactgccaaagttttcaagatatattagacaaagccatgaatcaaatttcaaatgacttcttcagattcaatatgaattaaccagaaagatagttagagtttctttcatccagtcacatcatgacgtccataatctgcctccatgatcactaatctcaggtggccccaggaccaggttatttcctcctttgccatctgctcataggggacaccgccttaagaccatgtaacacatatggcttagaagttgagagtatataagctgagagggaggcatccatgcaacaggggtgggtggcatgggaatcggggcaccagcttatgtgatttgtgtaaactactttggtattacttagacctgatccctattgtatcacttccttcaaatggtgggttgctgctgtgtcctcctaactttaagactgagaaagcccaggttatgatgagtagctctagtcacaccatcctttgaaattccatggtcaggctgggcgtggtggctcacgcctgtaatcccagcactttgggaggccgaggtgggtggatcacctgaggtcagaagcctgaccaacatggtgaaactctgtctcttctaaaaatacaaaaattagctgatcgtggtggcacgagcctgaaatcgcagctactcgggaagttgaggtgggagaattgcttgaaccccggaggcagaggttgcagcgagctgagatcatgccactgcactccagcctgggcgacagactccatctcaaaaaaaaaaaaaaaaaaagaaaagaaattccatggtcagatactcagtctctaccagggatcaggtgctacttgctacttttcaaatgttttattgtttcgtgctgcatttagcattgccttgcactagraccctarggttctgtgctaagactccctattggggcttaccaaggattactcaatagagctttattggcacaaatatctgggactctatgagatccattaggtcctgtggcccaagtggcagggctggttatacaacatcttcacctgccacagagccttctcttaccctgggccccactcaaaactgacagccttcataatcacccaataaataggttgcagcagaatttccaagaatggtttgcaatgtcccccaaacctgaagagcactaccaaattttcattgtctttcaactctgaatgaaagtctcaatatgcctcaaaccactggaatcctaaaaaccactcatgtgatgggtttctggatctctgtaggatttacctctcaccctctgaggcacatatgtattacttagacattcagagttcctttgacttctgctcatcatgtccagttaacattatgtcgtcaatataatgcactaacatgaaattcacattttaagtactcaggtgcccaagctggaaaactgggcctcgtttttagctccttttgctccgagggtgaccaatttctcacgaagggctgataattttaactaataaagttagatttcccaaatctaacttattttctgcatctatactacttctgactagttcagggcctggctggataccttctactggcccctccaggcgcatgctccactctgttccatgctcttggaggctgagctgtgtggatgacatctcacttccagaagggttttgctaatagagaacccgatagatcagaggaaaggagggaaatgcggttgtggtatttattcacatggtttccttctgcaggggtgtctctggcttactatgacacttaaccaaaggtcacagcccctgacaggcagccgtctgtttttgtccttgttggggtaactcacttcctcctcttgcactttcaggcctggatggtattaaaacctccctgtgcctggctccagtgctgcactatctcttgtggttaccccatactttgcctcttaaatagccccttcatgaaactctcttcaatttacccaatttaaatatgccatctatttcctgacagtatctgatgggcacaagaccttagtatctcttgctgcaagaatctcctggctgccacatcaaataagtgcacctgcatatacacacatgctaacgttgtctctatatggcaaaaatctgaccatatcaatatctgacccctttgcatttcttattaaatttcagtaactcccatttgccctctacgtaaagtctaagctttttgttttggcatgcaataaccaccactatccagcccttgaccaattctatagcttcatctccagccactccccatctcatacttgctgttccaaggataacaaactcttggtagtttctctcactctgcgctgtttttctcccccttgcccttacacgtgctaacttccttgcttggtatgcccttctatatttccaaactccttactccattctccttcaagaataagccctgaaaaatttaaaaaaaaacaagtcatgtatactgtggtcccattcatgcaaaattgaacacatagctattatatgacaatggctatttggagaggtgacttaaagaatggcaaaataataataatagttaacagtgaaatatcaaattttttcttatgttggataatttttgagaaggtaagataatgactcccatacaaatgtaaaatgaacaagtgtcaacatttaaaaaactcattaattaatgaggggaaccacaaagccattacaactgattcaaaggtaaattcaaagaaccacacatatataggacaaagggaagagtaaaataagtttgtttaatagatgcaaagctgatttcctccagtgtagaaggaaaattgaatctcctccagatgaaatttatatgcatctatggatagatgcaaatatttattagttatctaaaactcttgagttgtaaatagctcaaaggcaatgtaagatacagagaccccacagaatcaggtcacctagaagagtagctagataacacctagtttttcactgaagatacccagagtccatttcaaagtcaggtctgttttagagtcttttgcaacttttccctcaactttcttatacatttttacaaatattttacaaatattttaaaaccaatttataatgaacatatatccttttttaattaaaaaagcatgcctcctaaaaaacaaacaaatgcaatattagaagctccttttcctcaattgacttaggtgtcaccttttccagattatttatctaaccactgccaccccaaggttaagttaggcgccattccttctcctgtgctcccataaaattgtgtgactcatatgttcctcctaccacaatgtattatagtcatatttttctgcaggcccagctcaggctgtgagtgctttgagtaccaaaatcatgagtcatctttgtattctggccgcccagcccatagcaggttcccagtagatgctcactgaatgaatgaagagactagggcatgcatagattctgtatattttgccaaaattatatatatatatatatatatatgactggggcagagaaggagagagagagagagagagaaggagagagagagagagagagaaagagagagagagagagagatgcttagcttttaaaaataaactgtttggagtgacattaacaaaatgttgagtaggaagagaaggaaacccaacactgttttgaatccttggctacaagggaggtagggaaccataatgaatgagcagggattgtaggagccaaatttcagagaaaaaaagaattgtgaatttatctttaaagtttgcttcaaaagcatttatctgctatgatatttacctaagatttactaaggttgaagtacttaaataagggaattgggtttatgtaaataagttcatagctacagatttgtgaagatttgaacagagactcagtattctaaatatcaggaaagcactagttcacagtgtacacaatgcctgatgccccccaaagcctgaatacttaaaaatcaagaatgggtactttacgataaatgctttaagaccagagctgaactgacaccactgactgcacaggggaagggtctgacatgcagtaactaaggaatttgacctgtaggtccagtgaggcccctaagaaaccattacatcactgcagccaaatctgcattcattcattcattcattcattcattcattcaacaaatacctatgaagccattgctaggtgccgggcaccctgctagaagtgacaaatgtaacacggtcacttagagttagaaagatgaatgtgaggagtaagcacaggagggcatcaggtcacatggaggagacaatgaatcagctttggggtgtcaggaagactcccctcatgtgctgaaaatgaagacaagtctagaagaagaggctgagggatgaaaagcaggcagagcagagagcactgggagcagggagtcaaatgtgtcttgaagcttgaggctagagactcatggaggacaaaatgataaaacacatcactcttaagcagctgtggaactttaggcacttgatagtttacaaagccctctcacatcttaatttatttgggcctctcacaacaaacctgtgaagtagatgttcattatcctagtggttctcaatgaataaatatttattggatatgttgacctaagagaatgaagctgaggcaaaattaatacaagcagagagtttatgtgggccaagcctgaggattgcaacccaggagcatagattcaagttgccctgaatatacgctccaattagcagaagttacaagtggatttttaaaggcaaaaaatggggaaggaaatggactgttacaaaactgtttgtcagaaattctcattggtttacacaaagaacattgattagtgactggctacacatttataaactacagagtgtgtgttatagtgtctggtgtggcattattaagttaatttccagctacttgtggcaatagcaagcagtgtcaagagatgaatacttagctcaaagaggggagtagggtgtgggattgtggcctccttttaatgtctctctgggcctaataattaaaaagatttgtattcctcagataaaaattatttcttttctcaaacctatgtgtgcatatgccagaatttgataccagataacagaagccactcaagctaatttaaagagaagagatttcacatatgaaattctgtgttcataaaatcactggaaaggctaaaggagcaggctcgaggttgatcttccgggagctattcccagacccacccagttctagcccaaaactgcttattgcttacaagaactgcttactggaactgtgattgcctttttagaggctccctccttggactgagttcaacaagaggaagatcaaacagaaaccaccatgtttacttagacctctgaccctgggttgggcggcctcatgtcccccgtggctccactctgcatgagaagcaccagcagtggagccaactataggctcaaactagccatcaaagytgccatgatcacaggatctacaaacaggtgagagcaactctttgggaatttgggaactgtgggtatctttgggtcttgttgacctcattttcttaggctcatccccacaaagcaaagcytactagatttaactgctagtagatttttgggaaggtgatcttaatgagaaatattgaggaaaaggaaaggaaactggaaaaggagacaaaaccagtgcaggatgtgtaatggagtcggcccactataggccactgggtgatgggtttcaaaggtcttctaggaagcaggaaatgcatctcagaggcatctatcagtggaagaggagagaattcctccgtcagtcaagagttgccctatgtgggttaatgcctcacactttcaagctgcatgccggtgagcactcagtggtttcacatgcctgaggcagggagctctctggttgcagctgcaaagcaaaccaaagccttgaggaactgagaacgagttttcatagtagggattctagtgggaggggaggccaagaagatctgatgtggacataggaggttcaatgcatctgtggactgacctatttcctctttatctcttctggtcctctgaccatccatagtacagcatgaggttagctgctctgagttagtggagagaattcatttggtgcctcagggctagaaatgcagcaagaaaagtctcagtcctagtctaaattgtcacctcctcctcatctctgcccccaggttcggcttcgccattgcccagcgtctggcccacgatagggcccacgtagtcatcagcagcgggaagcagcagaacgtggactgggctgtggccacgctctagggggaggggctgagcatgtgccagacaccctgtgccacacggggaaggctgaggactgggagtggctggtggtcatggtgagaggcatagaaggaggtgcagacaggctcagggattctgatactatgacccacagtagggcagagggataaaggcaccatcacaggaatcgggtcaactatgtgtcacttgagccttgtccacgaggcccagtctccagttaacagacctgggcacagaaaggaccagttcagggagggcgtcctttctccacccaggtttgttctctccctcagggagagagggagtgcatgtggcctgggactcagggagatgttggggtggggaccatgctggtaggaaagaggaagctggcttctccaccagctccgtggagccagccaggccctcctggaagattcctgaggaggagtctgaggggacagagatgtacagaaggaagccctcatcttacagtcagaggtagagtgttcagggaaatggagaggggacagtgaaatttcaagacacagtgcaggtgagagatgtgtttggggacgggtagcaaacagtgcctgggactagaaggaggatgtgaaagggtactgggtgatgctccaccgctttttatccagaagctccgtacctggctcctaaaggaaaagagataatctccatcctcacatgatattgctctcctgtgctttgaacttgacctaggtacagcctctgggacattaaacaggagtcaccttccactgctgcagacaccttcctcttccgtaaccttattcctttatgtccctttctcactctcaggccctggaacactgtgggggtgtggacttcctggtgtgtgtggcagggatcagtcccttggtgggaagtgccttggggatcagtgagcaggtctgggacaaggtgaggtctggggaagccaggaaggggcaggccggacttcatcctcaccttcctgccatgtaaccctctctccatctaggctcacacatccagagctgatcctcagctctcacacatccaccttcccatgacagattcattgatgcagagtgaggcctggggcttggactttctgagcctcaatttccccatctgtgagatggatgtaggagtgtctaagtggcagttttggtccccactgttcaggagctaccagtctgcagggaatgtccaaccaaaaaccaaatagtcacaaaaaatatggggcacagagaagggaatgacagcctaatccctaacacgggtacctcctggctatcaccccaaaatctagccttccccagactcagctactgatgcctcctctgctccagatgaaactggtgtgcttggaaacatggggagacaacccatagactctggggtcttctgctggaagagtcttcagcctaatccacttactcctgtatcttcaggatgcccccatttccatgaatgcacaggaaagccaacactccacccacattatgggtgtcagaggccatcatgcccacatcctaacctggtacatttcctaatatggtgagactgctggactgactgcatctccactcccccatctcctgtttgctctgatttcagatcctaaacatcactgtgaaggccccagcctgctgctgagccagctgctgccccacacggagaagatggggtgagggtgggaaatgggaatagggaggtagctgcttgatatcaaacaggcagcaggggaactagagtgagagggggccgatttgagagttagacattcctactgggaaacaggcttagctgagccggtcatacaagaatggtgagtgtgtggctttcatgcttctgggtcagctaaaaaaaaaaaagttctatccattagtgtcaatctctcacatctggagtgcccagggggtctggcaaggacttgactggaataaggaggaaggatccacagacagaaggtcccagagtcctgacaacagtcttggaatcagagacccttgggctacaggagctctggccacaagagttcaggctgatgaccctgagacaccccatagccggcctgtaactagagcagttgtttcccagtcccactcaactcttatccctcctgcttcctcttacacctgtcctacccgaccttttcccagctcccaccagtcagttcccaaattaggaagcctgcttccttgctgtcctcacagcccgtgatagaagcatcacctgtgggatgggcctacggctgtctctcgctgtcaattccccactggtcttggcgactcgggatgttcccagatgttctccccatgccatttgtcttagggttggaacaatctgcctgtgctcctgggagttcctttttcattcttggatttcagcccaatcattagaaggtttcatttttctgaccaccttaggaacacaccttaggcctgtctcattcctgctctaaaatagatccctctggccatgccccagcctcttaaacatctcccctcacttagccatgcctcctctgaaggtcagggccacccagttatctccaccagcattgccctcactctcttctttaaaatggtcagtggaggtaaagtgaattttcctcagtctcaggtaaagtgctttgcagatagatgtagttttaagactcttttcccaactgttttgcttcccttcagttcccgtattgacattctggagcagccactgaattcagcaagcatgtactgagcagctagtatagactgggctgcttctctggacttgtgtgatcatctgtgaaacacaaccaggacttctaactaatgaggacttctgaggccccttccagtgctaacacagacatggtgtgatattagattgaatctcagtggtcccgagtcactgagaacagtggggaattgacaggaagagacaaccctaggcccatcccacaggtgatgcatctaccatgggctgtggagagagcaaggaagcagacttcctaatttgggaaatgactggcaggggctgggaaaaggtcgaggaggacaggccagtgtaagaggaagtgggagggacaaaaaatatcatttttgttgatagaaaatggccaaatacagtaatttatgtggttgaacacaatacaatggttttcaaattgtttttaatggcagaaaccttttgtcaaagaataacctccataggagtccaatatataaaacagacaaaagcagaaatgcccagcttaaaattggaataggggcctggtgcttaaccatctggtccctattcctggtactgggcacctcttgcagaatctggcttcacaaaacttgttgcaaactacaaatgtaatgaagacagcatgggctttggagtcagagagacctacctttagaaccctgctctgtcactagctacatatgcttgctaactaaactctctgggcctttgtttccttacctattaagtgggataatgatgcttggcagacctcttgtggacattaattggcatgataaaatatgttgattatgcacatagtaaagactgtgtctatatatatttactagagtaaataataaacattggccgggtgcagaggctcacatctgtaatcccaacactttgggaggctgaggcagaaaagtcgcttgagcccaggagttcaagggtgcagtgagctatgatcacaccactgtacttccaactaggtgatcaagtgagacgctgtctcaaaaaaaattattggaaaatgaatattatcattttcacagctacaagaacgtcacaaactaaagttctttacaagtgaaagaactttacatcacaattaaaagaactagagaaccaagagaaaaccaaccccaaagctagcagaagacaagaaataaccaaaatcagaggtgaactgaaggagattgagacacaaaaaaaccattcaaaagatcagtgaatccaagagttggttttttgaaaaaacttaataaaatagactgctagctggactaatgaagaaaaaatccaaataaacaaaattagaagtgacaaaaggggtcattgaccccacagaatacaaatagctatcagagaatattatgaacacctctatgcacataaactagaaaatctagaagaagaggataaattcctggacacatacaccctcccaagactgagccaggaagaaattgaatccctgaacagaccaataatgagctccgaaataaaatcagtaataaatagcctaccaagaaaagcctaggaatgacagattcacagctgaattctcccagctgtacaaagaagagctggtaccattcctactgaaactattccaaaaaatttagggagaggaactcttccccaactcattctatgaggccagcatcatcctaataccaaaccctgtcagaaacacagaaaaaaaatgttaggccaatatccttgatgaacactgatgcaaaaatcctcaacaaaatacttgcaaactgaatccagcagcacatctaaaagcttatgcaccatgatcaagtaggctttatccctgggacgcaaggttggcacaacatacacaaattgagaaatgtgattcatcacataaacagaattaaggacaaaaccacatgattgtcttaatagattcagaaaaggcttttgataaaattcaacaccatttctgttaaaaactctcaataaactaggtattgaaggaacatacctcaaaataataagagccatctatgacaaactcacagccaacatcatgctgaatgggcaaaatctggaagcattacccttgaaaactagcacaggacaaggatgtcctgtctcatcattcgtattcaacatagtattggaagtcctagccagagtaatcaggaaagagaaagatataaaggacatccaaataggaagagaagaagtcaaacgatctctgtttgcaggtgatatgatcctatattgagaaaaccccatagtctcggcacaaaagctccttaagctgataaacaacttcaacaaagtttcaggatacaaaattaatgtacgaaattcactggcattcttatacaccaacaacagccaatccaagagccaaatgaggaatgcaattccattcacaactgccacaaaaaatacctaggaatacagctaaacagggaggtgaaagatcactacaatgagaactacaaaacattgctaaaaaaaaaatcagagatgacacaaacaaatggaaaaacattccacactcatggattagaagaatccatattgttaaattggccatattacctaaagcaatgtatagattcaaggctattcctattaaactgcaaatgacattcttcacagaactagaaaaggaactattttaaaattcatatggagccaaaaaaagagcttaaatagccaaagcaatcctaagcaaaaatagcaaagctggaggcatcacgctacctgacttcgaactatactacagggctgcagtaaccaaaacaacatgatactggtacataaacagacacatagaataatggaacaaaatagagagcccagaaacaaggctacacacctacaaccatctgatctttgaccaagctgacaaaaacaaaaaatggggaaaggactccctattccataaacagtgctgggataactggctagacatatgcagaagattgaaacaggatgccttccttacaccatatacaaaaattaaatcaagatagaataaagacttaaattaaaacccaaaactataaaaacactggaagacaacctaggcaatatcattctggatgtaggcatgggcaaaggtttcatgacaaagaagccaaagtaattgcaacaaaagcaaaattgacaaatgggatctaattaaacataagagcttttgtatagcataagaaactatcaacagagtaagcagacaacctacagaatggaagaaaatttttgcaagatatgcatctgacgaaggtctaatatccagcatctacaaggaactaacacaaatttacaagaacaaaacaaacaacctcattaaaaactgggcaaaggacatggccagatgcttttcaaaagaagacatagatgcga

SEQ ID NO: 93546 - DNA, 13300 bp, Homo sapiens
gctgaggcagaagaattgcttgaacccaggaggcagaggttgcagtgagccaaggccatgccactgcactccagcctgggtgacagagtgagattctatctcaaaaaaaaaaaaaaaaagaaaggaatattagaaaaagttaaggtaaaccacaaagactcactaatgaatgaaagcaaaaattaaacattactgaaattatacatttttaaatagcagtactatttatgaaaatttataaaaattcaatttacatataacattttcacagtcatctaatggacaaaataaaacacacttgtacttcaatgtacatccaaattaactccaggatacaaggtgatatgtaataattaatgaaaaatgttaaatgatctgtattaaccataggtttttgatgcttatacctctggggctttactgactctagagtgaatatgtccttcccagggctagccagttcctagagacagtaagtgactagcctgtgagcatgcctttcatattcaaaccaaccagtccagagcccacaccgctaccacctcctccacactcacattcagggtgactgctcctctgtcctaattacaaaggggctgggtaccagacaactagggacaactcttaacaatctacagcccactggaattattcaaactagctaatcctaaacttgcttaatctgggttgcctgtttcttcccatagaaaccataataaagactcttgcccatgttttcccctgttctctctgcctcctgaccaactctggtgcttcccccacatagcccttgtggcatggcatgccccttcctcttgggaactgtgagtaacaaactattatttcaacagctttcttgatctgctgacttcaccatacctgaataataataaaagctatgttttaaagcattgccttggattacccagttaatgaatgcacagacatttgaaaaaatacactaagagactacatagagagcttaaacctactgacggataacatcccatgaatcttactttcttgaaggttgagtggaggattaatgagattatctaaagttcgaggtccatgttcagactgtggtgctgaaaatccagggattaagcatgaaaacatccagagctgttctttgctacagttattctgaagagcttgcaaccatagtaagaaaagacgaacaccttcccgcctaatctaaaataaaatgaaaatagacagtatttttatttataatggaaatattttcttcctttgaaaaacaaagttctctagatgatgacaacagaatgatactttcgagaggcagggtagggaaggaaggggaagttgaggagaagagagacagcatctattgaaatcattatttagaaatacaaatgcatggatttttaacaagtatagaatgaacttgttctctatttaaagccatcaggtaatttttattctgtaagttccatttataaaaattagaaaatcttttccttcttgtctacttccctccttgcctacctcccatcaccactagtctaaaccaagaagcgagagagagcaatgactgttagtggtgagaatgagtttggtaaaaggaggaatggttatggggatcctggcacactgcgaattcaatgttcttgcccctgaaaagttctgaaattattaaaattattaagttacaattaaattattaaaaataaaatgatttaatttaaataaaaattatttaaaacctctctgcaattatctcatgtacttattatttgattctaagctccaagataccaactttgttctactctattaaagcatctaaaacaataccctgtacacagaagacaataaatattttaactgattaatgaacattctctcagcataaaaacagtaaaagagaaatagaggaaaattcaatctctgacaagcaaaacacttagtcttccactaacctaacctcactgatagctttgtaaattaccttaccagagcttgttcatggccactgtcaaaggtattcaactgctgttactttcatggttcagccagataacaggagaaaagctacaggaaggcttattcctttgtacttttatacccaagccatgatgccaaaagcacctgtaataatgttactttacctaacctacagcaagatattttcggaatgggcagcttctcttactacagtacaatggcataatgaaaaagaaacaaaaatgtttatatatatatgtgtatctcccctacttccctctacatctaatagtggctatggtggaatgaagaataatctgttgaatgactaaacaatgttttccttctggggaccataaagaggaaagattgctggtgaatgagtccattgagtggcaaagtacaacagttttttcaatgtccccagtcaacctagaatggtttgtcaaacaaactcttgctacgttttttttttgtttttgtttttgtttttaagatacagtctcactctgtcgcccaggctggagtgcatcggcttgatctcagctcactgcaacctctgcctccagggttcaagcaattctcctgcttcagctgcccaagtagctgtgagtacaggcacgtgccaccacgcccggctaatttttgtatttttagtagagacagggtttcactatgttggccaggctggtctcaaactcctggcttcaagtggtccacccacctcagcctcccaaagtgcagagattacaggcgtgagccactgcacccagcctcttgctacattttaagggaactcacttcaattaaataaactgaagacaattcaaagatctttaggaaaaagcttaggtaggaaaagtgttaacaggtgggatgtatgttctactcagtatttttaaagtcatggaaagtaaacatagttgtacctttaaggagtttcctgtgtgaagtagcttctttaaaatcaatcctgaaaagaaaatatgattttaaatattcacatcttatctatttgtaaatgtcagagttctcggtcggacttgaaaacacttttaaataagtccttggcaacctccaaattattcttggtgacctttatatccttctgccatacttgggatcagaagggcatataaaaagaatcaccttttcaacacatgctttattgcaattaaacatgatttattttattaacaaaacctaggcccgaaattgcatttaacacaacaatctattataaatctcttatttagactaagaataaaataaaatacttttatcactatccaaatgaaatccactatagaaaattttcatttagttaaccacatgaacatccttaactgtaatatttcctaatgaatatttccattatactaattttctaagttttgaaaagtcattaatatttccttttttcttttaaattatgaaatatttcaaacctataataaaatactgaaaataacatgaacaaacctgcagaggaccaccactcagtatgaataaatctacacgtagttccatgtttatttcacttacctgcattatctccaatgttttacttaactgtacaggtatcactgaggcccaaatcatattgttcctttcttccccagaggaaaccattatctaggctttggtattaatcatttcaaaaaatatttttatattattactacacatttataaatccataaaaaataatataaactgtttcatataactcatttatttttttaaaaagttatttatatgttacttttcacatccaacattagcttaagaaatttatctatacttatctatgtagctctagttaatacattttaagaggtgcatactattccaccgtatgaacataccaaaatttatttatcgtctttatattaagacatttggtttttttcaaatttttgctattccaagagtaccgtaataaatagttattgttcatgattccctgtacacacctgagtttccccggggtgtgtatatatatatatatagagagagagagagagagaggaataaaattactttcagctttaccaaatattagataattttctccaaagtagttgtaacaattaacagtactaccagccgtatatgggagggctctagtaccatattgttggcagcacaaaacattgacagatgctctaatatttgataatctgatgtatgttaactatcttaatgttgctttcatttgatatttcctagtgacactgaacatcttttaatttggctattcaaggtttccttgttttatcctttgcacaattttcaatttagttgttctttttttttttttttaaagagatggggtcttgttctgttgttcaggctggaaaatagtggtgcaatcatagatcactgcagcctcaaactcctgggttcaagtgatcctcccacttcagcctcctgagtagctgggactacagatgtgcaccaccaggtctggctaatttttgtaatttttgtagagggcttcattatgttgccaaggctggtctggaactcctggcctcaaggatcctcccaccttggcctcccaaagtgctgggattacacgtgtgggccactacacctggccttctttatatacatatatatatatggagttccttctgtattactaattctgtgtctatttctatgaattgaaaatacattatcccaaacaattcaatcatgtttttgttgggtggggaggtggtatcttctgatgcagataagttttatttatttatttatttatttattatcattttgagacaggttctcactctgtcacccaggctagagtgcagtggcatgatcatggctcattgtagccttgacctcctgagctcaagtaatcctctcgcctcagcccccagatagctgggactaaaggcacatgccaccatgcctggataatttttgtattttttgtagagatggggttttgtcatgttgcccaggctggtctcaaactcttgagctcaagtgatctgcccaccttggcctcccatcccaaagtgctgagattacaggcataagacaccatgcctggccttaaattttaatataatcaatttgccagtgtttttctttcttatgtgttctttgtatgtctaaagaaatccttccttacattaaaattataaaccaaatactcacttcaaaaagttgttatgtgttgcttttcacatgtaggtcctgaaacctatcagaaaattatttccttgtgggtggaacagaatttgttttttcacaaatggaaaaccaagtgtagtactatttcgggatttatgatgttcaaatgaactaaaatgccatctcaatcatatttcaagtttccatacataagcttaggtctttggctgatctccatgttccttttcattcatccatttgtccatccctacatcagtaacagtgcctttgttagtataactttataatttatcttgttatcaggcatgaaaatagccaacaccaccaccctcttggtccgatttgttattcttccaaattgctttggcttttattttacatataaactttaagatatatttgttaggctacatttaaaaatccctataggaatgttaagaattgttatatgtgtgtgtacatacatatatatgatatatatttgatatacatggtatatatatttaatattgataaatattgtgtgatattgatatttatatatatacttaacaaatttatttgtttgagacaggttcttgctctgtcacccaggctggagtgcagtggcacaatcatggcctactgcagccttggcctcttggtctcaagttatcctctcacctccccagtagctgggaacacaggtgcacactaccacacccagctaatttttgtatttttttgtagagttggggtactgccatgttacccaggctggtctcaaactcctgggctcaggtgatccacccaccttggcctctcaaagggctgggattacaggcgtgagccactacagccagccaaaaattactgtcttacatgtgcatcaaatatgctgaaaggtaatgctatagtagttccgaaattgttggattagggagctctactaatggaaaaacaaatttagatgagtttgctatgagatctggaaatgcagaaggcrtatttggaccagttaaaaacccctggagttattcaaaacaatatagagaaaagaggaagcagaatctcyactttgagaatgaagattcagactggctgataactggaggaagctcaggtgggagtgcagttgccatatcggcattcacatgctatgcggctttaggatcagatactggagggctgaccagaaatcctgctgcctactgtgggcttgttggtttcaaaccaaactatggcttagtttcccatcatggtctcatttccctggaggatttgatggaagtgcaaggaatcttaaccagatgtgtggatgatgcagcaattgtcttgggtgtactggctgaacatgaccctacggattctaccacagcacaggatcctgttaaaccattcatgattcccagtttgacaaatgtgagcaaactatgtataggtattccagaggaatatcttgtactggaattatcaagtgaagtacagtctctttggtccaaagctgctgacctctttgagtctgagggggccaaagcaattgaagtatccttttctcacattacttattcaattgtctgctaccatctattgtgcacatcagaagcagcatcgagtatagcaagatctgatgggctacaatatggtcacagatgtgacactgatgtatctactgaagccatgtatgctgcaaccagacgagaagggttcaatgattttgtaagaggaagaattctctcaggaaatgttttcttgttaaaataaaaatatgaaaattatttcatcaaagcacagaaagtgagatgcctcattgctaatgattttgtgaatgcttttaactctggagtatgctaactcccaccaccttgagtaaggcagtaccatacctggaattcatcaaagaagaccacagaacaggaagtgcccaggatgatatttttacacaggctgtaaacatggcaggactgtcagcagtgagtaaccctgttgcactctcaaaccaagcgttgcccacagggctgccgtttactggacatgcattttgtgactagcagcttcttacagtagccagatggcttgaaaaacaagtaaagtttcctgttattcaacttcaagaacttatggatgattgttcatcaatccttgaaaatgaaaagttagtctctgtctctctaacacagtagagataaatatatcatgcaaaatttttaaaaattattgcctttatactatcaagtttatttcctatgaatattgcataaaattctgtttattcaagtcctttcttgttcttcaatgatcacataattgccatacattaataatttttattgaatatacaacatgctaaaatttatgggatggatataaggcaaagcttagagggaaatttatagttttaaatacctatatcagaaaagaagaaagctatcagattaatattctatggttacatcttaaaaaaactagaaacagggccaggcgcagtgactcacacctgtaatcctagcactttgggaggctgaggtgggtggatcacgaggtcaggagatcgagaccatcctggccaacatggtgaaaccctgtctctactaaaaatacaaaaattagccgggcgtggtggcatgtgcctgtatagtcccagctactcaggaggctgaggcaggagaattgcttgaacccaggaggcagaggttgcagtgagccaagacagcgtcactgcactccagtctgggcgacagagcaagattccatctcaaaaaaacaaacaaataaacaaaaacctagaaacagaagagtaaattaaacccaaaggaagcagaatttctctcttttttaattaaaatttttttttattgttgagacagggtatcatttttttactcaggctaaaagtgcagtggcatgatcttggcttgctgcagtcttgacctcaccaagttcagatgatcttcccaaatcagcctcccaaggagctgggacgacatgaaggagtcatcacgtctggataatttttgtatttttttcctagatggggtttcaccatgttgcccaggctggtctcgaactcccatgctcaagcgatccacctgcctcaggctctcaaagtgctgggattataggcatgagccaccacatctgtccttattttcatgttttagagattgtgtctcattctgtcaccccaattggagtgtagcagtgtgatcacagcttactgcacccttgaatttctggacttaagtgatcctcctgcctcagcctcctgagtagcagggactacaggcacataccaacaagtgaggctagcttaaaaaaatttcttttgtctttaaagacagagtctcactatgttgctcaagctggtctcaaactcctggcctcaagtgatcatcctctttcagcctctgccaagtgctgagatgacaggcatggggcatcatgcctgccacagaatgttttataaaatataaaagaggttgagtatgatggctcacacctgtaatcccagcactttgggaggttggggtaggaggatggcttgaagccggaggtttgagaccagcctgggcaacaaagcaagaccccgtctctacaaaaaataattttaaaaagtgagctgggcctggtggtgtacacctgtggtcccagctacttaagaggctgagtagggggatggcttaagcccatttcaaggcttcagtgaaccatgatcaatcatggcactgcacttcagcctggtgactgaataagatcctgtctcttaaaaaaaatacagtactacaaaaaataaataggtagggcacagtggctcacgtctttaatcccagcactttgggaggccgaggtgggcggatcacccgaggtcgggagttcatgaccagcctgaccaacatgcagaaaccccatctctactaaaaatacaaaataagccgggtgtggtggtgcatgcctgtaatcccagctactcgggaggctgaggcaggaagatcgcttgaatctgggaggcggaggttgtggtgagccgagatagtgccactgtactccagcctgggcaacaagggcgaaactccgtctcaaaaaaaaaaaaaaaaaaaaaaaaaaaaatatatatatatatatatatatatatatacacacacataaaatatcaaagactagaatggaaaacaagaaaatagaaagcagaaaaagtataaagaaaatcaatgatatcaaaagtttgttctttgaaaagatcaacaaatatgacaaatagttagactggccaataaaataggagagaagacataaattaacaaaatcaaggatgaaagcggatatagccattaaaaagaatgaaatcatgtccggtgcagcaacatttagcaacatggatacagctggaggccattattctaaagcaaattaacatgggaacagaaaatcaaatatcatatactctcatttgtaagtgggagctaaacactgggtactcatggacgtaaaaatggcaataatagacattgggaagtactagagggacaagggttgaaaaacagttaggtactatgttcaccacctgggtgacaggatcagtcataccctaaacctcagcatcatgagatatacacatgtaacaaacctgcatatgcatcccctgaatctaaaaataaagttgaaaccattaaagaataaataaaaagtttatgtaatattaaaaaaaaagaatgaaaggggacatcactattgaccctataggaatcgaaaggattactctaaggaataacttgaacaactttctactaacaaatttgttcctagaaagaaacaaattatcaaacygactcagagagatatataaaatctgaataaacctataacaagaaattgaagtaataattacaaatatcacaaagaaaagtccaagtacaaatggtctcacttttgaattttatcaactatttaaagaagaaaatgttacctaccactcattcacaaactgtttcagaaaacaagagggaccacttctaaacttctatagctatcttaatagtaaagccaaataaagattgacaaactacaatacaatattcctcataaacagagaggcaaactgaagtaagcaacaaataaaaaggactataaatagtgagtaaataggatttacctcaggtatggaaagttggtttaacatttgaaaatcaattagtaaaatacataatattaatagaataaatgacaaaagcaccaatgacactgataatgatcgcatcaatagatggagaaaaagcatttggcaaactacaatgcacatttatgattaaaaactctcaaactagaaacagaacttcttcaactggataaaaggcatctacaaaaacactacagctaaaatcacatataatggtgaagactgaccattatctttctccctgaaatcaggaataatgcaagaatgtctgctctttcttgccacttttatttaatattgtactggaggcacaataaacagaaaagaaagaaagaagaaatcaaaggcatctgattaaaaaaaaaagtaactgtactcattcacagatgatataaccctacagtagaaaatccaaaggaatatacaataaaacaaatagaactagcaaacaataagtaaataaactagaaacaacacaaatgtccattctatttagcactttgcatttttcttccatctctgattcatagagatttctgatatcaggagatatttgtcttgatgctaatcttgcttttttgttttatagttttatcatcaatgttaatgtatcagaataaaggaagcagtggatccaaaaatttcctatggcattttgactgcaaatccttcatctataatttttcttatattcctagtcaatctgttcttgtattctttattttctttttattaaagcatcacctattaattcatttcaactaacaacccattaaagaacatttttcatatattatcctttgtttcaaatatgaaatacatatttgaattacttaccaatactatgaaactgccatcgctgatgaattctttctggaagaagttgtaaaattttctaaaaatcaatataaagagaaaaaaagaaaagaataaaaccaagtaatgagttcacatcctgcaaaatgtgaaaaattaaagggctcactaagtataacaaatacaaaataggccgggcacggtggctcacacctgtaatcctagcgctttgggaagctgaggtgggtggatcacctgaggtcaggagttcgagaccagcctggccaacatggtgaaaccctgtctctactaaaaatacaaaaattagccaagtgtggtggcaggcgcttgtaatcccagctactcaggaggctgaggcaggagaatcgcttgaacccaagaggcagaggttaccgtgagccgagatcacgccactgccctccagcctggtcaataagagcaaaactccgtctcgaaacaaaacaaaacaaaacaaacaaacaaacaaaaaactacaaaatagtccctgagctaatttgatagtattgacattattttagcactggcatgttgatcactatttgaaagcctcaaaaaacaacaagcaatactaaccagtacttagaacaagaaattaacaaaatacatcttttacaataatatagaaggtatatgttttcctaatgattaaatgctaattctaatatatttaaaatgcttatttactatttctagattttcttttttttccccctttagagacagagtcttgctatgttgcacaggctggagtgcactggctattcagaagcatgatcatagtgcatcacagccttaactcccagactcaagcaatcctcctgcctcagtctcccaacaaggtgggaatacaggcacacaccactatgtctagcaattcctagaatttctatattgtggatatcactgatgagtttcaattctttcagatattaatatttgtgacattttctctttcttctaatggttctttctcctatcttgataatcctagagaaagtattttgatttcatgagaaccccatcaaatatttatactgagttaatcatgtgaaactagaggtacttagatgctatgatggatataggtatgagagcaaattttttttttaagaggtgggggtttcaccctttcaccctggctggagtgcagtggtgtaatcataactcaccacagccacaaactcaagggttcaagtgatccactcgtctcagcctcccaaataggactacaagtgtgtgccaccatgcccagctaaattttttttactatttttgtggagatggagtattactatgttgtccaggctgcgcccaagcttcaggcctcaagcaatcctcctgccttggccttcaaaagtgctgggattacaagcatgagccactgcacccggacagagagcaggatttaaaattttaggagccctgtagttaagctaacatatataggtttccattaattggtaataaaatctttacacaaatatgttcaaaattctgccttttatttcccttaatattatacctgtttggattattctcgatcaagagctaccttactgctaaacagtgctctcaatactcatccacttgctgaatgacatttttgtgtgtttgctgttattgctgttcttactattatttagaactccattaaatgaatgctaataagggccaaacactaggcactttattatatatgtatattaattaatataccttgcattaatccttgcaatcattccaaaaggagggtttatctcattcaacaaatgaagaaatgggttaagtagtgcacttaggttacaaagctagaaagtgaaagaacagaggttccaaattcaatacgcctatttctaaaacctctgccttgataatatactgctcaaatgatgacatgcatattttatatttccttgtcttctcgttgatatcatcttctttagtaaaccccatatgaaaggatgataaagaaattttaaagttctacacagataaatgctggtcccacatgagacacataaactcttytacctttgtcctccctatgtctcccacagctggccaacaactgcataattatatttatttttgtatagaaagagataaacttatagaaaagttgaaaagacaaatttgtaaactattcaa

SEQ ID NO: 93547 - DNA, 12498 bp, Homo sapiens
agtttaaaaatagcatatttgaaaaaaatgcactaaaaattattattagaacttcacactcaaatctctaaaaagttatgaacattttatattgtaatacacataaattctaaagaatatcaaagtataatatcagagaaacaatatgtgtaagattataaaagattagagtattatctgtttggatttttacatgaattatttatgcacttaaaaacatagttgaagtgaggagaaacataaatgataacctaatcacattctctgagtttccctcctaggtcactggctgctccttctcattttcctgactcccattattcctaacctctaagtgttggactaccctaggaggggtataggacttttgtctttctctattcactgtctaggtcacaggtcagtaaactctacctgcagaccaaatgtagcttaccacctattaatttttataaataaagttttattggaacgcagccacacccattttcttaattattgtctacagctcctttcacaatacaaggtaaaaattgaatagctgcaacaaggactagatagtgcttctgatcctttacagaagaaaaattgccaatctctgtctaggtgatctcactaaggtgcatagctttaaatataatgtatatcctgaaaattacccaaattctatcttcagtcctgactcagatatgaatgacaacttctctacattatatttggatgtcttataggcatacaaatttaacatgtctaaaaggtaaaatttgctttctaccacccctgccactcctttgcctcttgtatctcaatacacaatttccattcatccaattgcttaggccaaaaacttcagaatcctccttgattcctctatttctctcatactccatatcccagccatcaaaaaagtacatctttaaaatatatccagaatctggccacttctcagccactccaatgctaccaccctaactcaagtcacaaccattttcacctggactattgtagtagcctccttactgggtccctatttctgttcttggtcccttacactcaatttttacagagcatctagagtgatcatggaattccattactgaaaacacttcaaaagccatgcaaggtgtggcctcttgttatattctacctttcctccctcttactgactctggtcactccccacatggtcttttactgtcaagcatggtcctgccttagatctttgcatttgctcttctgtctggaaaagtttcccccaacttatctaggtggtttaattcctcattttattcaggtctctgatcaaagattacctcaagttagaggtcttccttaatcactctctctaaattagtgactcctatcaattctatatccctgttaataggtggattccctagaaaacaggctctaagattctgggatttgcatgcattttggggagtgcccttaggaacaacatctgaaagggagtgaaggaagcaggacaggcagagaaagaagctgaattgcagtgtggttctaacagaggtttaagccacaggaacctctgcagtgggtatagtttttgaaaattatcccacatgaggaaaagagacagggtctttgagccgacatatacataatgaaattcccagtatccccagagttggggtgtaaccttgagtaagacacataaatatgtgttttagggaaatgcaaattaaatccaaaataagatactactttacacacactaggatagctaaaatcaaaaaagataaaaaataacaaatgttggtgaggttgtggggaaaatagaaccctcatacactgctcatgggaatgtaacatggtacacacagcagctccggaaaacaggtttggcagtctcttcaaaagttaaacataaatatatcacacaactcagcaataccatacctagaaatctgcctaagagacatgaaaacatatatctacggaaagaattataaaagcatattcatggtattattcataatacctaaaagcaacacaacataaaagtctagcaaatggtgtgtggattaacaaaatgaggtgcatctaaacaaaaaataatattcagcaaaaaaaagaacaaaatacagatacatactgtaacatggatgaacctcagaaacattacactcagggaaagaagccaacacaaaagaccatttattgtgtgattctttttaaatgaaatatccagaaggggaaaatcaatagaaatacaaaatagattactggttgcctggaggtaggggtaagaaataacagtaagtgcaaatggccatggggagtattttcaggatgattaaaacattccaaaattggattacagtgatggctgtacaaccctatacattcactatatcatcaatttctatacttagcatgagtgaattttatgaaatgtaaattacatataaataaagacataaaaaagaaaaataaatattactggctgattcttaaattgactaataataatggtgacaataactactactcactgaaaatttgcttaggttcaagaattgttctgagtgcttcatttgtattaactcatttaatcttcaacacaatcctacgaagcaggaactattttattcctatttcagagatgagataactcaggcatgggaaaattaaatagcatgctcaaggtcatagaactaaatatatattaattaacttataaaaataaaacattctaccttaaatgctaagcaacagcacttatctaaaacaaaccaaaaaagtagaagataataccatatgtgtacatacatggtaagttccctgtaagtagcgtatttaagattttccaataagtgaccaacttgcaacacttctgattatctgtatagccattgaaacaagtaataagtataatatttattataagacagcttggccagtacttggtgcatattcagtgagagacttaattactgtagacaaatataaagaatgctcatgatctaatctactgaatcactatgttcatacagacacagaaatatcactatgggtacacataaatacaactttattctgcaacagtcacgcataaacacacacacaaactctaagtcacacaatctctataataaagatttttctagtgcatcatgtcacagaactgcaagcatatcattttgttcctgtaactgaaatgtacaatgggacaagatgagatgacagtgtgttttatctttttcatatgaaagttcagtaataaatttcacatggcagtaagccaatatgaatgaaatacttggagatactaacttctcatgtatctaccaataaaacactctcaaatttacagatacccctagaaaagacagctgataaccacattgtatgtagttaatattttttttaaatatgaaggcatataaatgatcagcaagcctgacatttagatatttgacaacaatgtattttaagcagtctaataaaacacaaagcacagatgtagaggaaggaagatatgtaactaaaaccacattcaccttcaattcctttgcagactagcactgaaaaacctacatcagcactttctgtctagatgatatattgatacaaagctagaataaaaatggtgataaaaagtaccatttgtaattgaaaataaatgttgctaagtgctgacaagcttctgtcagttaaattgtttttatttagaaatattttgcatttcctctattattcttaagaaactttgtaattaatttttgttccaaataatgtttttgtgtattgattacacaaactagtaatatttacatttaagacatccatttaaagttgaagaaaccatttcataatagaaagccaattcctacccttaattctcttaaaatttaacgtccacctagaaagcaatgcatcagtaataaatttatgattcaatatggttatcagcccacagctaaaaatttgcagatctgtataaccaagcatattaaaagtccccatggataacatataaccatgagtaactctcataattcaacatgcactacagtaagaaccattacaactgcatgttttcattgttaggtcccaatccatttttaaaagaagctgtacatgtacatcaccaacttgcacatacatgcaagtaaaattaaattacctaaagggtatcttctgaaaaacctgagagttttttttaagacatcagtataaccttggttaaataatcttatggtctctatataaagatttgaaatttctgaaaataaaaacatacagtaacataaagcttgcttctaagagtagccagattcaatattcagatttagaaaaattacattcattaaatttaagtgaaacaaataattatgctgaacttctacaggattgccctcaaaatcctatacataactagaaaagtggacaaaatatataaagctatttcagatagtggaccaatggcagaagaggcatgtgattattaacaaaagggaaacaaatcaggtgatatctaagactgcccctattccaacctagatgcaaagtccaaactgtggtataagaatggggaactcagagcctcatggtccaaataagttgagaaacagattagagtttgaagacactgggatggctggaatttgtgggacatattaaagataaaaagaacgctatgcagagattggcataagaatactcatgaggctttgaataggaatctgtgctgcatagggtgaaactccaagcagccaagtgaaaaatagcaggaaaagatcaatttcaggggagttataaagtgaacaattccaagaatgaagagcccttgttgttgaatacccagagtattctgtagagactccagaaagctcatgccttagtagtgagtctaaactagctctaaagattaccctagatcatccttgaaaagcacaaaaatagccttgaaatgagcaggctgatctgcaaataatttaaatgcctaccaaaaaagtggagggtggtggggagagagaccatttaaaagaaaaaccaaaatgtaattagtactacattagtaaccaaaaagaaaaaccaatgtaaattagtatgtacattgttcaaattcagctgaacaatgtaaatactaatattcaatgcctaacagtgaaaaaaaaaattagagacagacaaataaaagggaggaaaatgttgcccacaactaggagaaaaatcagtcaataaaaacagatccaattaacaaagataacaaaattaacattaaaaggccttaaaacagctattaaaataagttcaataagattaaagacttaaaggaaatatgaacataacgagaagacaaagagaacatattgagaatcaccaaattaagtgtctaaatatttaaaaatatttttgatacgaaaatgttgcagataagacactacagaaaatatcagtgaagctggaaacatagcaacataaattattttaaacaaagtatgaaggaagaaaatattttaaaaataaacagtcttggtaacatgtgagggcaacaacaatctaacatttttataattcaagcactaaaataagaggaaagaggtcaagaaaatatttaaagaaaacatgcccccaatttttctgaatttaataaacaatatcagcctacaaatccaagaagttcaacaaagcccaggaagaataaagaaaaaccatgacatgatataatcaaattgctaaaaaaaaaaaaaaaaagtaacaaagaaaaaaatcttaaaagtacccagaaaaaaaggcacataatataggagtaaatataataacacatgtcttgtcagaaattatgcaagctggaaggaaatggaatgacattcttagagtgctgttagaaaaaaactgtgagactaaaaatcatacagccagatcaaatatttttcaaaaatgaacacaaaggcaaagatgtcattaccgatatacccaggacctagccaaagcccacaacacccctgaaattctcaagatcaagttcaaaaaaaggggtccccgtgaaagtgaccatcaagatggcaccacctcaccagacctccttggagctcttcgtgtacctgaacraagtcacgggcaagcacggcatgggctgtattgacattatggagaactgcttcattagaataaagtccagaggtatctacaagaccccagcaggcaccatccttcaacaggctgatttagacatcgaggacttcactatggatcgggaagtgcacaaaatcaaccctgagtgtaaatctgtccaccattgcatcaccaagtcccaggagcaaatggaaggaaaagtgyaggtgcccatcttcaagggccaggtgcacatcctcagccaggagtctctactctctctctrcaaggaggagctggtgagcgtcaacgtgcaggggaattatgagccaatcgatgccaccrgtttcatcaacatcaattacctcagactgaaggaatatcattatttccagagtaaggtcactgycaaatagacccatgtacaatggagacctggggcctcctcactttgcagctctcccaactacaggtgctaattgttgtgacgatttgtaattgtgacttgttctccccagctggcagaatagtggggctgccaggccccaactttgttccctgatctccctgaagcctgcaaaattggtcatcaaagggaagggtggaggacaaatgcaggagtaagctataaaatgacaattaaaaaataacaattctaaatatttatgcacctaataatgaagcttcaaaacacatgaagtaaaaactagaactgaaaggaaaaaaaagaaacccataataatagctggagatttcaacactactctctaggtaattgacagaacaaagagaccagaaacagtaaggatataaaatacttcagtggcaccatcaacaagttgacctatttgatatttacagaacactcacccaacaatagcagaatacacataatttgctaatgcacgtaaaaaaattaactaaaatagggcatattccaggccttaaaaaaatggattgaaatcactcaaagtactttctttgatcacaaaggagttaaaacggaaatcaattaaggaacaagtcctgaaatatctggaagtcaaacaatataattctaaataatcaatggaaaaaagaaaccacaagggaaatttaaaaacatcttgaataaaatgaaaacataatataccaaaatttgtgggagaaaactaaagtactgctcagaacagtgtttccccaaatgtgctacacactaaaaatcacatagggagtttttaaaaatcccattgtacctcatatcaatttaatcaattaaataaaaatatctggggatgggagacagaattattaatttttaaggattccccagacaattccaattggcaacaaaatttgagagccactggtttagaagaaattttttttttaaataaacttctacgttaacaaggtagaaaaagaaaagcaaattaaaatcaaagtacatagaagggaagaaataataacaagcaaataatcgaagaaataaaaaacaaacccaaagctgctttttggaaaacatttttaaatgataaatagctagatgaccatgggaataaaatagaaaagacacaaattaacaaatatcagaaataaaaaaggagatattatccagatacttcagacatcgaaacaaaaacagaggactattgtgaacaattttataccataacttggataaattaaatgaaccaattgattaaaagacacaaattataaaactgaatcaaaataaacccctcatcaatctcaaaagtttaactcataattaacaatcttcccaaaaagaaaattcctggaccagatggtttcactggtcaattctatcaaatatttaaggaagaattaaaccctatacaaactttttttagaaaagaaaaaaagaagaaatacttcccagcttgtttatgaagccaccaagcctccaaatccagatagagattacaaaaaaaaaataaaagacagaccaatgtatctcatacatatagacataaagaaagatctttaacaaaatattaccaaatcaaacccagcaatataaaaaaaaaatacatcatgatgaggtttggcttatccaggaatgtgagatgggtttagcatccaaaaatccaatcaatgtaatttaccatattaacagattaaaaaacaaaactatatgacaatatcaatagttacagaaaagcatgtggcaataatccctcagtcctaatttaagaaaaaaaaaaaaatctcagcaaagttgaaacagaaagtgtgccagttatcaacctcttgcctgtcagctccaaatttacccttccctgtcctgctttgtgatgtgggagctagaccctgtatcttttctttgccagctgctgtaacactaaattttgttagcagagggtgctggagagaacaatgcaagatgaaggagcttctctttctgcttccgatatgctttgttctcctgtttttcttatggcaatcagcatcacaaagatacccagtgatactcacatcccagcaagttgcagcagcacctccataagcaacttcccagccagttccactagcatcccaagtggtttcctggcaagtcgcaagatgttccaaccagcagtttcccggaaagtttcaaaaacacccccatgagaatctttgcagtgaacttgaccccctcctcaggggctggctcacttccaccacataccacagaagcaagaagagaataaagtacactagaaccagaaagagaagccccttcctcctgttcccctgcaggaagattccgagtgaatttcaatgtcacctctgcaggcaatttcccagcaagtctcaaaaagacccagagggtagcttcctgaatcaacaaactagggtgcatccatgtaatcaaatattagtgagtgatttaaaaaatcataacctataaagccatggaaagacatgaaagagtcttagccagcatactgctgaaagaagccagtatgaaaaagctacatattgtatgatcccaattaaatgacattctaaaaaagacaaaattgtataaacagtaaaaagaacagtagtaggagtaatgggcaggaggaagatagagatgaataggtaggagcatgggatttttagggaagtgaaactattctgtatgatatcacaatgatggaagcatgacatgcatttgtcaaaatccatagagctgtacaacacaaagaatgaaccctaatgtatagactttagttaataatattgtatcaatattggttcatcagttttaacaaatgtacattaatgtaagactatcataataggtgaaactgtgtacagggaaaaagggattatatgagagctctctacaaaaatataaaactgcactaaaaaatacagtctattaatttttaaaaaaacacattttcaaattttcccatagcttcctgtagtgggcagaattctaaggtggcatcccagattcctgcccactggtgcacacactctgaagattcccttccccttgggggtgggtagggctttaagtatgatagttttcactcccagtatgatgttacattatatgacaagcatgaaaagattgtattaacgtaattaaagtcccaaagcagttgtcttcgagtttgtcaaaacagagatgattctgggagtccttaaaagggagtgggtcctccttgaaggataagcctcaaagcttgagagagcttttcctgttggtcttaaagaagggggcctgtataggagccatgtagcaaggacttacaggaggggacctctagagaccgagagcagtctccagacaagagctagcaagaaaatgtggacttcagtcacacaatccccaaaaactggattatgccaacaaccacatgaacatgaaaaaggatcctatgagatcccagatgagattatagcccaggggagaccttgactttagtatataagaacttgagcacaaaattcagctatgcccagacttttgccctacaaaaagtctgagataattaatttatatttttacaagccactaagtttgtggcttattaaacagcaatagaaaactaatacagtctgttaccttcaggttgacaaatcaccaacgtcaacaaaataggctaaaagaagacattttggaattttgtacattttgacaattgaagtgaatttcatagtcataaaaatttacttattttgcatatagttggcatttgatattttgaaaagccaaattataactagtatatatgacacaaccacagcctatagaaaaaaattacacacctgagaataaaatgcaacaacaaatctatcaggaagtaatttaggaataaaattctcaatttcaaagaaatttcacataacaacttaaaattctacttaggattttacaaattgctaccaagtgataattaaatgtttttaatttttaaacatatacaggttttaaacaacaacaacaacaaaaaaacagaaaaaaaattttgaaacctgcaaataaaacatatcatgagtcctaaatttctgaaaagagatttgcataattttccttaattgtacactttaaaatggttcataatattatgtgaacttcatctcagttttaaaaagttaatctgagcattctaaatattaattataattattacatgtagatctacggagaacatctattcccagtttttgtcaacacccaactacgcaaataaaatcaacagcacataaacagaaaatcatcagctatcccattaaagtacatattgaaactttatatacgatgcttgaaaggtcacctgttcactgcattaaaaatttcttccccgtgctaggcatacaatgaataaaatatgcagtctttcagaaaactgtatgtaatgatatgtcatagcagttcacacaattgtactaaacaatatgcatgctttctgtttttctatcaattaaatattcaggaattactgtcaaatgccatgtcatagcatgacagagatttagcccagattttgaaatctggtttgaaccactagaattagcaaactaagcagcaacataaaatattaagcatgtcaaccaaataatccactttccctctgtctttggagatgccttattaaatttcctaagagaaaaataaaagtacttcatgtaaaaagttttaacccctgctttgaaaacacatattttagcccatcatataaggttttttaatatgattggttctaataatcatatttttaaaatcccaaccagaagaagcactttaaaagtattttttcagtttaatatgcacaggtctgccagcataatatttgtccataattaagaaaattgcttacttgctcagtaggcaatacatgaatcatatgtagtataaaattagaccacaattgagagtttaatccctaaacaacatccaaagttaagcagaatatggtatgatacataatacctttaatataattaaatgagccttaattttacataaatatattaataaattagatatatactatccaatacagtaaccataaactacatgtatctatttaaactgaaaataatttaaagtacataaaattaaagattcactttcttagttgcactcaccacatctcaagtattcaacaaactaccatattaggtagcacagatatagaagatttctatcattgaagaaacagtacttatttgacagagttgagtttaccataaaactcatcataaagcttaagcttcaggcctcctcatttgaaaatgtccctgcaggtaccctagcaatgtgtccatgattatatattttagtaaaatttgtaaaagtaagatactttgccaatgaaatatctttctccacttccccttcttctccaccaatctcctgttgtcgggtggagggcgtcacagtgagcaacctggggatcatgcaaagggtgatatattcagtttgggtgatacattcagaattggtagcacattgtttttagtgggatatatgtaagtggttcttggtcatttctatgtgtaattagtttaccatctgttccagtataggaatggcttctaggaatacatccctttcccaactgtgctaactcacatggggtcctgatatgaaggttcgtagtcagaggtctatgaagacccctcaatgtgtaacctctgtcacgaatgtgtcccatggcaacgagaactaaagatttgtggcaaatgggagagaagcagagactgaaatttatacagccagaagctactctgtggaaaattcttccaataaggagacatgaaatagaataagcagataattccatttgtaatcaatgcctagtcaagttttctcttattaggaatagagttgatagtgcatatacaattataaatgtagcagacatttcttttttctttttgatgggactcacaatgaaatagaacttttcagacactgcgtttgca

SEQ ID NO: 93548 - DNA, 14808 bp, Homo sapiens
ctaaaatattctagccaaaataaaatctcaacaaagggctgaatttgacctgaggatgggaaggagttaggtgggacatggcgcaagtactaatccactatttaatgcatacaatagtagtatctaataaaaatggtttatagaatgaattaaattcctctcatatatttaaagctgatcatactgatttacaatcagtaatataagtctaataccttggattttaaaaaattactattgctatcatttgttattatattttagttttcaaaagtaagagattttgttgtaatctacttcaaggttattatctggatggaaggaaaagcattttctccactaaatgtagctagtctatatgagaataaatccagctatatcattttcatatttccatcatacccaaccatctaggccagacagcaaatgaatatgataaggtatctgagtgttttctatacataaagcccatgtaccaagtttaaaaatcctagtttttgaagagatagtcaatgtaataacaacaacagcaacatagcaatagtaattatacaaaaaagaccaaagttgtaggtgtgtgggtgggaccaggcactgagaataaaaatactgagtaaactacattttctagagccccttctcttctactgtgagccgtcttgattgtttttcttgtttttttccctgattactagacttacaggagcttgtttaggggatctatttttgtatctcccagaaatgttttcagttgaagataacagaaactcattcataaagtgggaatatttaatttttttcttaacaaggagtctagaagaagctggtctcaaggcttgtggacccacgaagttatgaagaactcatactttctatttttccagtctaccgtactaagcacgttaacttttatctgtaggttttttttttttttaatcatggagtctcactccatcgcccaggctggagtgcagtggcgccacctcagctctctgcaacctccacctcccaagtttaagcaattctcttgcctcagcctcccaagtggctgggattactgatgtgcagcacgttgcccagctaagttttgtatttttagtagagacaggctttcaccatgttggccaggctggtctcaaattcctgccctcaggcaatccgcccacctcagcctcccaaagcgctgggcgttagccactgtgcccggcctgcactatttattttaatttcttttaggtttacaggaaaagtggctaataattgatctacagcgcctggccttatccttaggcttttggctgctatagctccaacacatcctctggtggtggtggtagaggggttgaaaagaatggctgggcgtggtgtctcatgcctgtaatcccagcgctttgggaggcggaggtgggcggatcacctgaggtcaggagttcaagaccagcctagtcaacatggtgaaacactgtctctactaaatgacagagcaacaagagcaaaactccatcccaaaaaaaaaaaaaaaagaagagatcacagttcttcttgtactctctcctgtttaccaggaagaaaatctttaatagaaattattaccagctgggagaccaggcaggaggatcacttgaggccaggagttcaaaaccagcctgagaaacatagcaataccccatctctaaaagaaagaaacgatgagaattattacacccaaagcagacttttacttacatcttattgaccagaactgggtcaataagtgctgactgccattactagccaaagggaatggcattgtgatgctggtcctacattaattatgattttctcctgggactaggagctgggccaagtttcttaaatttgttgccacctctctcttctgccccttctctctccaccgcaaaataaggacttgtaactgtggaaaaagtgggatagcatcctacagatgcatcataatagcatctgttaaaattttcaaagcaataatccaggaagataaagtacatttttctttccaggagacttattgccttacacaagaatcttattctcatttgctccatactttagcttccaaagccaaccaaatttaaacagtggaagcaaaagatgaattcagcatttatgtattttatataattccattttaacaaaacttaacagtttaaataagatttaagtaaaatttcagcgttcccaactcctaaatatcactcaccctcacatggcaaaatatctattttcacaaatcagtgtagacctactcagtaatcggtaattgtgtgttctgttttctctgctgcagctcagtagaaattacacttatcaattgctactatttaagtttttccctcatagctacttgtattggtaatcctgttagattttgttttcatgtgaagtacacgctataatgaatacttttagatactatgagaaaaaattaagtgaaaaatttaagcaaagttaaaacaaaaattattgctgcttttaaatagactttaaattggggtcaaaagtggcagcctgaaggtatattttatttttccaacaaaatgtttatacgtttttcaattttgaatgcctttaagtggtcttgtattctccagtttaacacaggcccctctaaccctcttatagctgacatccaagcactcgtggtaactccttatcccagtaggcacttgaatttgccaatctctgctttgtctggataaaccaagattaataataaatgaataatgttttcctatttgcagaacatttttgactggcttccaaaatgatctctaaaatgaataatgaacttttctccaagacaactacatttttggcgtgctggtttaaaagtttttggctgacattttgtcagccaaatagggtttggctcccctattttgtcttctaaataggggagaaggtggtatcacgtctttgtttgatttatttgacgaagttgtgttcccagccatattgggtaattttgcattatgaaattgtgcatactttaaacaagttgagtattctttagttgaaattatttgcttgagaccagaagtgttttggatttcaattaaaaaaaaatttggaatatctgcattatacttaacaacggaacattccaaatcagaaaaatcccaaatccaaaatgtcctttgagcagttcccctgagtaacatgtcagtgctcaaaatgtttcagattttggagcattggaaacatcagattttcaaatttgggatgctctacctgtatttatatattttcaattgtatattttaaaatatatttcaaatttaaaagactaaaatgcttaaagaaaataattaacagcttatatatgttatttatataacatattaatataaaattaattttatataaacttaatatatattacatatattgatatgagtttttatatataatatatatacttttatatatagtatatctttccagatattttactatatatatacttttatatatttttatatatatatatatatatatatctttccagagttccttttacaaaatctcagaatggtttataagtattttacacataatttataaaatatyattttctatatagtataaaaaattcacacggtctcacagaatgatagagggaaattcacactcactatctagggtattaaatctccaagactacattcttctcttaataaaattgacctttgctaatgttaaaatttttttatttaatactttaggaaatagctgtgcaatgttttaaatgagtgaaagaatgtgggaacttggaaagaaatgttaagaagtcccatgtttttattcatgggaacattgcctcataaatcatttttgtactatcatgtttactaattgtgtggatttattagagttctttttggccaaaataatggtgagctacctgtgtttatattaactactttcctgtcagcctgtagtagtttgctattattttactgtgattattattttttctctaattcccatcttctgtactaccagttctagcctagtctgcttgtatttcctcctcctttatttgtctaaaaagataaacaagctttaatttgcaaaggacatggagagttatggatacatgatgacctcttaagaacttctccaatgccaacattcctgcaacaagtcttaaaatcagtagtgtcatattattactatttattctaatatgtgtccttaaaagttaaaatgatagaactagttgaaatagcaaataacatttgaaatatttttctgagatataatgcaagagataataagtataaagagtaacaacaccccctgagttagttgtttacaaccctgactgaacattgaaattgcctggggaagattttaaaattactgacgcctagatctattgcctagaaattctgatataattggtctggagtgcagcatggacatgagatgtttttaaaacttcccagataattctaaactacaactaatgttgagaaccactggtctcagactatctccagattatgttattaaccttgactacccattataatcaatggatgtattttagaaacatagcttcccagactccaggtccagaaattcaaattctatttttctgggatggaaccaggcattgtgtttcttatgtgccctaattttaacgtgaagttaaggtaagaattattgctcaagaaaccaagaggtttaacatcgcaatatgggaaggtatgatatattatcattgtgttttttttaattgttgttttattgatgacaaaccataaccttggcctgctagaagagttcaatggcacaaatttagttttttttgttttagacggagtctcgctctgtctcccaggctggagtgcagtggcacaatctgggctcactgcaagctccacctcccaggttcacgccattctcctgcctcagcctcccgagtagctgggactacaggtgcccatcaccacgcccagctaatttttttgtatttttagtagacacggggtttcaccgtgttagccaggatggtctcgaactcctgaccttgtgatccgcctgcctcggcctcccaaagtgctgggattacaggtgtgagccacagcacccggcccacaaatttagttttttaaagtaagtaactttgtcttaaaaatgatttgtagtaatagtcattaaaagataaactgaggcacattaaaatattaaagcatttatttgaccattcagtgattcatgaatctggtagctcctgataaaggagccaaggagaaggcttttatagggtgaatttggaagcaaaggaaagatatttgattggttaaagtggagtactagacttatttgggtcatcccagtggaaagtccccagttagaagttagctggcagtttctgattgattaagcttaaatttcctttttatcatttacactgatttgggtttcctttccttaggtaggaactcatggagctgaagctacctcagcctactggccttctaattatttcaacacagaaatagtactttacggcacactggagttgcaattctattctgcaattgggtggtttcagatttgttcttcctataaattttggtcaaattagtcattgcatttctttctataagtctgagattcagatatttggttgctctgagaaagtctctgttgagatagcattgccatactggtcagattgaaagtgactttgtatcctttctattaatgttctgatatgaaagagtgatgactcggatatagtgttaatgcattaaaaaagcacagcctgacaaatcgcttcctataatacacagaaaaatgtctagtcttgaatttataacacagggaaaggtaaaaaatttaattatgcttcctaatgttgaacatgcacgtgacaaagtaaatactaaaaatccattcagctgggcgtggacagggagagggaacggtgcacatcagagggtgcaggctactccaacgtttccgtttcctcagtctcgcgggaagctccgttgtgggcgccccggctggtggctgagctcaggccttcaggcagaggggaggcgagggcggggcggtcacgtgagagcactgccgcggtgggttgtgggggtgctgcggcgccgtttgctttgccaaaccgacaaaagagagatgatggccaacgacgccaagcccgacgtgaagaccgtgcaggtgctgcgggacacagccaaccgcctgcggatccattccatcagggccacgtgtgcctctggttctggccagctcacgtcgtgctgcagtgcagcggaggtcgtgtctgtcctcttcttccacacgatgaagtataaacagacagacccagaacacccggacaacgaccggttcatcctctccaggggacatgctgctcctatcctctatgctgcttgggtggaggtgggtgacatcagtgaatctgacttgctgaacctgaggaaacttcacagcgacttggagagacaccctaccccscgattgccgtttgttgacgtggcaacagggtccctaggtcagggattaggtactgcatgtggaatggcttatactggcaagtaccttgacaaggccagctaccgggtgttctgccttatgggrgatggcgaatcctcagaaggctctgtgtgggaggcttttgcttttgcctcccactacaacttggacaatctcgtggcggtcttcgacgtgaaccgcttgggacaaagtggccctgcaccccttgagcatggcgcagacatctaccagaattgctgtgaagcctttggatggaatacttacttagtggatggccatgatgtggaggccttgtgccaagcattttggcaagcaagtcaagtgaagaacaagcctactgctatagttgccaagaccttcaaaggtcggggtattccaaatattgaggatgcagaaaattggcatggaaagccagtgccaaaagaaagagcagatgcaattgtcaaattaattgagagtcagatacagaccaatgagaatctcataccaaaatcrcctgtggaagactcmcctcaaataagcatcacagatataaaaatgacctccccacctgcttacaaagttggtgacaagatagctactcagaaaacatatggtttggctctggctaaactgggccgtgcaaatgaaagagttattgttctgagtggtgacacgatgaactccaccttttctgagatattcaggaaagaacaccctgagcgtttcatagagtgtattattgctgaacaaaacatggtaagtgtggcactaggctgtgctacacgtggtcgaaccattgcttttgctggtgcttttgctgccttttttacyagagcattcgatcagctccgaatgggagccatttctcaagccaatatcaaccttattggttcccactgtggggtatccactggagaagatggagtctcccagatggccctggaggatctagccatgttccraagcattcccaattgtactgttttctatccaagtgatgccatctcgacagagcatgctatttatctagccgccaataccaagggaatgtgcttcattcgaaccagccaaccagaaactgcagttatttataccccacaagaaaattttgagattggccaggccaaggtggtccgccacggtgtcaatgataaagtcacagtaattggagctggagttactctccatgaagccttagaagctgctgaccatctttctcaacaaggtatttctgtccgtgtcatcgacccatttaccattaaacccctggatgccgccaccatcatctccagtgcaaaagccacaggcggccgagttatcacagtggaggatcactacagggaaggtggcattggagaagctgtttgtgcagctgtctccagggagcctgatatccttgttcatcawctggcagtgtcaggagtgcctcaacgtgggaaaactagtgaattgctggatatgtttggaatcagtaccagacacattatagcagccgtaacacttactttaatgaagtaaactaggcttatttctaaaaagtcaagtctattggctttggcccaaaagcactggtatctttgtattaaattcatgtttattgtcacaaaaccattatttatacctatacagttgtactgtttcttttaaagcaaagccatttaacatctttcttcattcctaatttggaaattaaagtttacctttctgttaatctatgtataaatgttactctgagttattaatgtggattttaaaattgtaagcaatagaataggaaataaaacaactacctaatacaaatatttctgataagactacaaatatctgactgagctggggattaaagtagaggtaactgtatcttaaatgagtatgatttccttgtaagttaaaaaaattgaaatttaattgtagacttcaatagtccaagttttgaaggatgtttgagcttttgtataatgccatttatacctgcagttttacagataatgtttgactgcagttgccttggaaattcctccaaagtttgccttcatctctcctctacagtttggaggtgatggtgcagcagtggaacatctcttgatgcaccacactacttgtgttctgtgaagtgatgaaagtataactggttctagtttgcacactacacacatagttttgtgaagcttcagaaatgttttttcttttccttgtggccaaaccagtttgttaatctgattatattcatctgctaatgatactaaagttaatgtaataaagcatttaaaaatcagatacttcagtctgtgctgtgtatgtgggatttgatttcttcctgatgaaatcctaaataaggagaacttgtgtctaaataagaaacagagagagtcatgacccccagaagcaaacctggaaaaaggttgaagctggagataagttactagagaagattgtatggactaaaaagccatcccttaagcagactcctgacttttggctgtcagtgtgtaaatatatgcttggagtacaagaaagtaccagtcaggcaaatcatagatggacccaaggttccaaactaaattaaattactctgtgtctatgtcaggtaattatttccttacttttattaccctcattaagttctttggaggcataaccaatttgtctcagcaatcattgtcttaggaggtataatagagccaaaaaatattaatactaacctgggaattagagaaaccaggctctcctcatctgctactacccgttttctctaagctaatttcctcttttgtaaaatgattacgaaaattgctctgttttttcataagatttaaaaattactttgtagaaataaaaagttgacataaaatcattgcagaagtttagaaaatgcaaataagtaaaatatgtttaccccccgtttcacacacacaaaaatcatttaattgtattcacagcatgttttctgtacatgctgtgaaagtgggcatgtaaaatggtctgtttccaaccaaacatgcataagcacacctttaataatgacagtagatcagattctttatgtctaatggaatctcagacaccaccagaaattatattttttgtagctggaggggaagcccttaggaatctctcttgtaaagactctgttccacaagttatcaaccagaggctatgagctccagagagaagaaatagcaggtgagtcttatgtccacaattcttcaagtacgaatcatatccagttttgctatattgaatgttctctagctttgaatctgtgctgagatctttaaagtgtccatgggaatcttaggagagaatcaacctgacatatgctaacccttgactgctaaagcttatgaagatgtacttttgatgaacaacatgatcactggtttaactctggccttctattcattgtttttgctgtgaaggtctattagattatcaataacctggtgatattccagggacagctgttgacaccagcagctgccttgcttatgtttgcagttctaaaggctgcagtcatctgagagtgacactggtcatttacatggtgaatggctccctggtcatttcctgatttctgtgaccctcagagatagcaaaagaaggaatcagtacactgaactttcattttatgttaccttatttaaatatatcaatggctcttaagctatatggaacttcaatggagagccctatttgggaaaaaaatataattttttaaaaagtaagaatcaatatttctgattttaaaattatgtaagagtaatgtgaactactcactgagttttagttatctcagtttcctgaactttacaggaatcactaaattctccagagtccaatcagagaggggttggtttgggaagttgagaagtattgaactgttttggtgacccttactatcatgatatggaagaaaggtcctggcacatttttgtggtagaatggaagagtgtactgttcttagagagaaactatcttctccatcctcctataagatagggaaggaggcactgaaccaattccctttactgacattggtaggggagagtttctataagagaattgctcacaaggtttggagttaacaccaagaaagggagacaggtatttcattgcaaggttggatgttgatttagacagggcttggtttcctgaccatagatagaactcctgggttagagcagaacaggttggcaaacactgacagtaggcaaaatctgccaccacctgtttttatataactgtaagataagaatggtttttacattttaaatggttgaaacaattagaagaggagtactatttcatgacatatgaaattcaaatttcagtgtccttgaataaagttttattggaacatagtcatgctcattcaactgggtatcatctgtggctgctttggagctacattggcagagttgagtagtaataatagtcaccttatagtctgcatagcctaaaatatttacaacctgactttttattattattattattatactttgagttttagggtacatgtgcacaatgtgcaggttagttacatatgtatacatgtgccatgctggtgcgctgcacccactaactcgtcatctagcattaggtatatctcccaatgctatccctcccccctccccccttcccccaccccacaacagtccccagagtgtgatgttccccttcctgtgtccatgtgttctcattgttcaattcccacctatgagtgagaatatgctacaacctgactttttagagtaaacgtttgcaaaccctgggagagagcattggggagagatgagggtgacagtatagacatgtggaggggataagggctcaccccttgaggcccaggcctccaggccacctctatatttgactacagagtgttaataagattggaggttgcaggcttgtcagagatcaccacactaagagtagagaggtacatgcctcagaaattctgtgtgatgcctgcaattgggaacaatagaaaagggtcccccagaaaaggaccaccaactgttagagtatctacttgctattaaacccttcagttgggatcagttggctctaaaccttgctgagtttttacatagatttgcagggttgtttaacagagagtgggcagtaatctatttggagaaactattgggaagagagatggagaaaagttgtgagagaactctcttcaactctcactgttataacaacgggggagagagggaaaactgagattgtagatttaaagggtgtatagttaaattttaatacaataaagctgttttaattactgaaaatgactgaaagtgttatgaacttacagacaacattaaacgtaatttatacataatgggtgggatacaggaggtttcaacagaatacagatgatagaggttaatgtaaaaataaaactattttgtgattacatataccagagttgagtaactgcaatcaaactggttatcctaagaagaaacataattctttgtacaatatttttagctattataaatttcatatttgtaatattgaaatatttttgtaataagttcatgaaaaaatgatttatgataagattaaaacaaaactttatttttgtttcccactatccctttaaaaggaatttaacgtgggtaaactaactgtggttctggatggaaagttggagagatccagtgactattcccatttgctcttaggtaatagaaagtactatagctactttacatcacaaaaatccaatctggattcagtgattacaatgtgtccagcttaacatattgcgcaatgcttgtcttgactaatattaagacttttgctttactttacctgaataaagagctatggctagcagctgctgaacctcaggaaaggatgtgttgttgccttcagtttcctattcccttcccttctccaagcctctacaacttgctagctgtagttgtagatcagaaaagggttggtaggggcaaaggagagaggagaaatcactctcatttggctggaagactctatgttccttgagttttgaatgtggttaaagctggtgcatcattgtacttatatctgtattttgcatatgcaagtatttctgaaatttagagaacctcatcactatgtcgtacattagaatgaatgcaaactgttagaaccaaatctgacagatatacaaacattcatttgcaagaaggcagaaaagcagccatgcaatgcgttgtaagctcagggaagttgccactctctaatatgaggcactttgaccaacaccctggataaatgtttgctccaagaggggcatgagtagattttgtaaaattcaaaattatgcagcagccactatggcatgggcacctaccactaagaatggatgctgacctaatcggaatctccctgcctgaaaggatgttttccttccctgaagacacatgaccacacagagctctagacttggagtacggatcctctaaaataagactgttttattttagatatccagattcttatatctcatggcttcaaatggtgagtgatatgcatacaatttccagtcaaatccatatcatggacacaacgtattcccccaattaaaaattattttaatatactgattaacaaaaatctatgttatgaattacagattagtagttttaatttcaaaagtaaactaagtatcctaagcatgtgtatgaaaactaacatacacacagacattcattcacatgtgtgtttatcatactacttttgctttttttcctttttgagatggagtctcgctctgttgcccaggttggaatgcagtggtgcaatctcagctcactgcaacctctgcctcccgggttcaagcgattctcctcccctagtctcttgagtagctgagattacaggtgccctccaccacatcctgctaatttttgtgtttttagtagagatggggttttgccacgttggccaggctggtcttgaactcctgacctcaagtgatctgcccgccttggcctcccaaagtgctgggattacaggcgtgagccactgcacctggcctatcatacttcttatacttaaatgttttaaagaaatttactagatgaatagtaaatggtactgtattgtcattttagagatgaggaagccaaagtgcagataaattatgtattcaaaatttctccaaggtcacatagctagcatgttgtagagcctgaatttaaagttatgtatctcatataattgtaacaataattttgaaatatgtatttcattattatccccatcatcacatatgagaaaacttactctcagaaagaaaatgttacttgtctatttgtttctaaaacttatttttcaattgcattatacctctttgcctccacatatttgactttccccctgaattacgttttctttctttctttttttttttttttttttgagacagagtctcgctctgttgcccaggctggagtgtggtgacgctatctctgctcactgcaagctctacctcccgggttcacgccattctcctgcctcagcctcccgagtagctgggactacaggtgcccgccaccacacttggctaacttttttgtatttttagtagagatggggtttcaccatgttcgccaggatggtctccatctcctgacctcttgatccgcccacctgggcctcccaaagtgctggaattacaggcgtgagccaccgtgcctggcctatgttttctatttaaatagattttttatgcagtataaatactaattttataaagacaaaatgttacaaaatagcaatagtgtggctccagctttaccagtgtgaccaatttctggaattataggaagaaaaagggaggaaatgcaaatttattctactgccttggcataggtcaagtctttgcacacatacctaacctctgcaactactctctaggaaaggaattaatgccaaatatatgttagatgttcattatattaaaacatctaattcaaccagctaacaagtgaattttatttattagaaatgaaatttatttattagaagtttgctgatttggttaattggtrcttttaccttctttctggacaaacgcaaagatgttggaatgctttaactttatttataccaacctgccctcacagaaatggtgttgttttcatgtacattaaatctttttcatgtatttttgaattaaaaatctaataaactcttttgatgtctagcattcaaacaataaagtacacaaatcatttgtgcacagctcaatgaattttcagcaagtgaatacat

SEQ ID NO: 93549 - DNA, 22965 bp, Homo sapiens
ctcactcaggacaagctattatgaatgacaagtatctactaataatatgctctttcatagacatttcattttcagagggggctattgaaaattaaacaggattcaaagcaatgtgtttctgtgtgaaattttgggtatagtctgatgatagtaataaagatatagaaatcactcaagaaataactgtggattgattgaaaaaatgaaaacatgaacaaataaataaaaaatattttggaaatggatgccttaacagaattatttaaaccatttgaagatggtatccctggacctgattgctattttagaaactgaatactctaacctattttatacatatctttgtttttcagcaatgcctggggaagctctggaagcgtaaccacactgggatggtgaaggggaattagtcaatgactttgggtaacacctggaatttgacctgcagactggaatacagcttcctattaaaatgtttcattcttataagtcttgtgtgcatttacggctttaaggaagaaattctctcaggcttaagacataaattaaagccatatagtgtcagtttcaataagagcctctgtttttcaaattttttgactttcacttagaaagacaacactgtactaggaggttactctttttgatcagtctcaacatttttctagctgttctcaactccccttcaaaagtatttcccactagaattacatgaatgttgtgcccccaaggtgaatgcagtgtttggaacaacaaaatattgatttcccattgtgtaacttccatttaatttaaaccaaaatgcaagaaggggaaagggttggtaggagagtacgctgatataaccctttccagtgatccttaaaaacttcacacatttccagtgctgaattttgttgacagacacttatttcaatcacatttggtcttacatatctcttcaaaagtctagtttaaaaaaaaaatctaaaatctttaaaagcctggcttcgccagccaagaattgatatggtgagcattaagccttagttgtttgctcaattcagtctcattcatcatagttggtctaagtcttagggcttactccaaaatagcctctaaacttactggctgctccataaatgcaagaaaaagacagctctctaccacctccagcatcatatgctttgcctttgcaattccattatcgctcctgtctaagggaaattgaaaaccctcttgagtattattctaccattttgcctattctattatcttactcaacattttctgatctgcttttctccccatcccctaggtcaatgctattttcctatgatatttttgtcttgtaaaattattttacaaaatcatagtaaatgtatttaacattggttattttgatatctttttctctgccttgtttatatgagtaattgttgaagttcttgccatctgatttcttttttaggagatatactgagtatttttaccaggttttgtcatttttatcatttaatggataaagtagtcattctttttattattaatttctatatattttatgcatctatttgttaatgcactcctttaaaatttcatttaaataatgaaaaaatagctaccttgtaccaaactgctaagcactttatgtgcatcaataattttatgaggttggttctattatccttattgtatagctttaaaaaactgaggctcatagaagttagataatttgtctaaacttacacaggtaaatatttaaagcagaactgcaaacaataatcttcatttttaagcctgagatttaactttcatacaattctagatttatcatcagttggtcactattttgagacatgaggttagcttgtaggagagaaaaataaattttaaaaaagatactgccttcacaaaacttgcactatacagtaatgaagggaaaaatctacatacaccaaaaacttgaatatctcacatgaatagaatacaccaccgggaaagaaaaagccctttgaacattaagaagctgaaaagatccttgataattcaaaatggtgggtcttgctgttcccctcagctgaactaccttcccttgctcttctaacttcttagcaaacttcaaagctttcctggttaccctgccctaccatgctatctcattttgctaaattctgatagaattccctgcagctcaggcatatttaatatcactgattttactgttgggtatttatcttgtgtattacatggtttgtctctttaacctgatcataatcttcatgagcttactctctgaataacctggctagttgtatattcaaaataaagggcattggtaattgcaattataaacacgtggttcattttggtagagcaatgcttctcaacctgttcaggtgatggaaaagcattaaggtcatcatgctgtaaaaggagacgtcaatatatctgattttattaactagatatattatcttaccatacattagttactatcccagaatttatatattgtagataagtaataaaaagcaacaaagattgaaggagaaaaaaactttgaagaggaaatatataaaaattatatgaatgcatgttattcatgtgttttttctgttgtattttgccttgctttgttttttaataaagtggggaaacataaaagccttttaaaaatattggtggccgggcgcggtggctcacacctgtaatcccagcactttgggaggccaaggtgggcggattacaaggtcaggagatggacaccatcctaccatcctggctaacacagtgaaaccccgactctactaaaaaaatacaaaaaactagcctggagtggtggtgggcgcctgtagtcccagctactgaggaggctgaggcaggagaatggcgtgaacccaagaggcagagcttacagtgagccaagattgcaccactgcactccagcctgggccacaggagagactctgtctcaaaaaaaaaataaataaataaattaaataaataaataaataaatataaaaataaaaaaagtaaataaaataaaatattggtgatattgttgcttatattacttggcttcaagtccttggagttctatgaagccacatttggaaacctctgtcacagtggcaaaatgttgtatttattcttacatcaacttgtaaggtagctaatggctacaggtgttattaattacaaaagaattcggacttgctcagttacttcgataggagcatggtcgcaaaatcagatctaatcaattccagagacaatgctttgaaggtttagcacttcttgttttgatcattgagatatttaatcctatattcttattttcttagaatgctaaagaagcatatagatagatttaagtggtaaacaattttaatgctgttgatatctccctagaaattttttatctttaattacaatagaagggggataagaaggcaccaacatttacttagctccagttatgtgccaggtactctgcataacttaattgacatttattcattccttaacaaatatttttcaacagctggcacattacaaaaaagtgcactcttgtgataagcaaaaatagacatgctccctacattcatgaaaggtacatattccagtgttagacactaaccaaattcataattgtaaacaatgctaggaagaaataatacataattttatcctcaacaatcctttaaagaagtacactgtcccctattcataaattaggaggttaaagagcttgtccaaatctacaaggctagtaaaggtcagcatggctgccaggtatggctcagcaagtgttgcctgaaacccttctgagggcagggggcattattcacatccactataatgtagctgaggcttctagagttttgaagtgtatcacccgcacaatcataagtgtggccttaagtgagagcggaatcagccctcagtttctccatttgtccctaattattgtagtttctcagggtaattaaatttgaaatattttagtttgttcatcgaacctacagtatattaaaggtaaaatatgtaggacagcatctaaacaatacccaattgaacgggatacaattctcattcaattaataaaagattgtttgagtgcctggtgtctgtaaaaaagacagtatgaaagatgtttcctggcctcacacttgccagtagaccaggaaaataaatgaaatgagattgaccatcacgccacaatgcacttagaaggcatttcactgcctgtgaagaatttgtttttgcctctcctggcagccatatcagttgtgagatggaagtttggaagatagctagaatgcttcgacgaaaaactttgaatgatctaacctgggcaatggtggatccctgccaatttgagggcataggaatatcatgtgcatcacaatgttcataatggttactccagcagtgtgaaaacccatgaaggaaactccaagactcagggaatccaattagaaagctttcacaaaagatcgacatgaagtgacaagttcttggattatggtggtgaattttttttttaattggaaaagcatgttctatttggaagaaacattgaagtctcctttcctcctggtttgctgtagttgcagctttgtgtggcaagtaacacttagtaaatcttccttacttttttactgtactataaatgaactttcttacatagcttgtttctcagccctttttaattagaatcagaataggagaatgggtatctcaggctgtgagtaatttgatatagaacttttcacctccaggtcagtggtaagtgaaacatatttatatattttaagtgaatttattgctcttgaagggatcccagttgtaatccttgacaccagaacacttattgccagaaagcccacgggcgttgaaaacattgatcagaaagtaacagagagaagrggttcaatttcaaccgtttttcactgtttggcttcccttacaagaccttcttaaattgttttaattaatcctagttatgattctatttttaaaggctgatatctatctgatgacaaattggatatgaatcaataagatgggcttatttcaatttagagtatgagctatcctgttgcttaaaaataattacccatatctgaaaaagcaaggaatttactacggtattcactttgcacyagggggaaaaaggaatgagtgataaaaattgtattacaaatttcagtaataggaatatggcttttacaattagaaaataatagcactgattacattgatcttggcatcaagggaattagaagttactttttctggatgtgtgtgcccatttaacacccctagaaatgaccagaatggattcaaccctgtccaattcctcagcttccaaggcaacacatccatggcaacaactaagcatcattacagtttctcaaatgtgaaaaaaataacaatttcttaactccctttaccccaagcacattttaggcaatgtaaaaatataagaaaaaatttcagttttatcatcattgattatatatatactctgtcagatacattactagaagatgggcatataataattaataaaacaaattacctgtgtcttagcttgaagtactctgaatgcataacctagaaaaagagcttgcatgcagaccattagggacaggaacccaagggacaggaatgagagagaatgaaacgcaggagggaaagccaaaccaaaaatgaatgcatcggccaccactataggcaaatggtgttccatcctgccagactttctaaggaggcttatgaaatgtatttcagaattgttcacctggaagataaaatggaaatgattttttttttttccgtgggctccggctctcctattgtcaagcgtgacctaatggacgtgaacttccccacactaccaagttgtgtgactggcacagacgtgccatgcagcagcatcagggagtccctgtggaacctaagaaggacactgtcaggttcacctgtgtgagcttggccagaacctacgacagactatatggtgcagctgactggtggaagagatgaggctgagaagacacgaaaggcttatggtacactcttcccttagggtactcaatattcaatgcataccacaaaggcataccttctctgaaagaaagaagttaaagacttgcatccttttagaattattctataaagtagataggcacagattaaatagatgagctttggagtcagataaattgtggtttgaacattcttggtaattcttgctctttgtgcagcctagatcaactcatttagcattttctcatcggtaaaagggagggtggggtatggtaaaatagtttctattccatgcaacaattgtgaatattaaatgagattatgtatagcacctagtccattgttgtgcataggtaccatatyaaaaacaaatttctagaggtgaagatcggcaatctttctattttcttactcccatccatatttatgcatcaaatgatgccatgaagcataacatatttttaatgatatgaggattcctaagatagaaataagccttctcatagtgctgagaactgaaaaaaggaaagctatattttgtctcaagtttatcagagctcaaaatagaaagtgttttaagcttcattttcaattcataatgttcctctaaattctattttctgagagaagccagcagatgatttggtttcctaattgttaaagtaactttttaaaatttgaagaaaaaaaattgatgtttggctaagctgtttcttgaaacatcagtgaccctgaatgcaaggtctttacaagctaagaattccctgaagcttgataggaacgttgagatcttaacctacacaacagaacagcaggatcaggcaagtcactgtgctgagataccacttggggccagattttaatagctgacaattcataatggattgacaaaagcaaaacatcattaacttgaatctacaaagtcgagatttccatatgcaaataggagctggcacatatgtgcctgtgtacaagtctcattgcttgtttagttgtctgtatgtcctttcctttgtctttaagatcccagtggacaagaaccacgtctaataacccactttgcaaaacaacaacaggtgcacagattgaggcctcactaaatattttctatggtaatgatggcagtattgttgattttctctctcgcataagagtaaggcctacagtctaatgtcagcaaccagaagtaataagatagtcatgaatgatacatttgagcaatggaacgtgaaagttacattatatttatgtaacaaggatagactaaactcaccctaagggtgtggtcaccagaaagagcccttactctgattttctatattttactttaagttcataatatcaattcttataaaacatgtttccttcattgcaaggtagataactctttcatatttattctgagaataatagggctgtgaattttactttttagtgtaaatctgcttggttcagtaatatatcatacaagaaattatagcaacagactgccagactgattctggcttacgggaaagtgattttacctctctagtattaagttcttcttgaataattgtaacctatcttatagacttgttgtgcagatcagataagatcaaacaagataatataaagtgctataaaaacttaagctattgttatccctgaaaacgtatcctttggcctgggcttaggtgactttaggaaatagccaattatactatttcccttatgaaaatataatcttggacttattgttcagcatgcctgtgtgaacacactacgaggacccgcagcctcttaagatttctcactctactttctttctccatgttccccagggatctgtctttcttggsttgtctttccttttctgctgtgtatacaaatgctgtgtgttaagatcaaggagtggamacctggtttgcttctccaagttctrtcgctcagtctcataaagattttgctttgggcattgcagctggcattcttttctttctcttccttgctgctgaacggttacacaggaaagaataatgaaggcttaaactctgcgattctgcttcctatctaccttgcatcctcctgttaccaaagggggaacacatgtttttcaagctcaatttttgctgatgaaaattttgttcagtttcacagcttgacttcagaattttcccaagtgatggtaaatttcattcccttgccaaacaaggaaataacctacaagaatgtttggaagaaaaacttagcaatccccctgaagctttagtatcagatgaatagaagaaagaaaacaaaagtgttatgccagcctctctgtcattcaaaatactgatatggtttaaacattgtaaatttggggagaatatttaacgttagtcaatagaaaatattgttactaacttgtaaaccttgaagtatagatatttatagtaatggtagcatttgaactctgaaaagacaaagaagtgaagcttacacatggctcaaggttgaatgcatatttggtgaatcaattacagttggagacaataaactagattttcttcctctcgtacattacattattttgtttagaacattcatttaaaaaatatcttatgaaaacttaacttctcttatttccttgatggctaactaaaacactataattctaagttcttttttattttcttagttcaccatagcccaggtaaaagtcctttctataggtcactttcattaaaggtgtgataaaaataaatgacttgtaacaggtagagaaaacatgaaccaggaggggcaggctgcaatcctatttcccagcagtgctacagaaagcctccatgttcttttgggttttatttctgtgttcaattcccaccaagttacaccgctccccgaccccatccccatcttcctgcctgggtgtcaagggctgacactgaaatagacaaaaggcagaagagaccttccctccctgggaagggttttggaagttagctagtttatttaatccccaggcaaacctgcagtcaagttaatcagaatgagagaaacagcttcctacatacgagctaggactgtgagaaattgtttttcagggtgttttatagccaaaagccttcaagagaatggaagagctctccaaccaggggcacaaatattcaaggagagcttgtttgttttatggttatttttatcccacaataaacagcttaaatttgcagactatactttttgactataaagtgggttatttctcaagatgctggtgctttcccctaacagatggaataaatagaagaaaatgctgagaataaaccactgaaattctgatttattcaatcattaacaaaaagaagtgcaatttcaatggtaatagaatgaaaacccaactgtttctgctttccttctgaaaacttgttttctatggagaatgctgctcttaggcaaacacctatttaaacctcagcaatgtataatcttaacttcaggcagcatggttgtataggtttggtaatttgtaatacctctgcaamtagggataaaatactaactttcaataatataagcagtatctgcagtacaaatactaaaagtgctacattatatcccaggaaagatattttataaaaaagactttgcacttggttttaaatgcttctctaggcagttgctttgcaggcttgttagaggaaacacagtgtatgtacaaccttcggagacatggcactaagtagacaaccagtcagtccagtatgtctttttcaggacacaaataagaaggcaggaaaacaaaagccatttaagtgcaacaataacctcagggaggacacttccgtgttggaaaccacactaaatgcttcttggaaaaattgcttgattataatgaaaccaaataaaatattgttgtaagtctataagaaaagcagaaaacctaaaattaaaaaaaatccatgacataagtatatgtataaaaaaaatccatgatatacacacgtgtgcacgcactcgtgcacatacacagggtatgtaagaacataaaacatttatctgtgtattttgcatatcacaaagaactgtaggatataaagatttcaacatatttgtgcacaaactttttaaagattttgaagtccttgagctggagtttggctctgtcgttaactaatgttgtgacctgggtttactcatattttttaaatcctaagattatttttgcagaatttggtaattagacttctaaatgatctataaggaagttctttccagtttaaaaatactgtaatttcaaggttttccttttttttctgtttgcttgtttgttttcaactaagtatttctttttttcctttaggtttattattaataaaaagaaatcaacacagaattatgtttgcaatatgcaatcacctatatttagctgaagagagatgtttatgacacaaacccttcagtttcctcgtttgttatctttggtttacatcagatgaaaatctccccagtagcaaggtggcagttacaatctatggagcctaaaattaaaatgaaattaagttattttagaagacatctcatttaatagattcttctattcacttattcctctctctcgtcttttatctctaacccagcacaattcttaaaatcttgaataagaacagaacttcatgatagtcttcccaggagttttaacaaagctctgtatagaaacagtctggttgaacattttttaatctatatattctgaaagtggatgtggcttctcctgtcctaatcatgtaagcagactgcaacaacattactgctcaaaccaacgaggtcttttaaaatgtgstgcccgtttcctttttcaatccaccgaatagctgcagttgtttctaaacctctttagttctctatgcacacacagtatcatgcctatctctttgtgcaggtgtatgttttgttgcggtttgtttacaattggcaggggttgattgtaaaagccctgtattatgaataaaccaatgcctgaaatgaagtggaaccttgatttatttgggtaggactgttttccagtactgtaaatcatattttggtgttcatttacctttgcattctttttgagccaccggcactgagactgacgaatgggaatcaaatgaagtgtgctaagtgcttctgctggagggtttcagttccccatttgccggggtgtgatatatctctgcaatacatcatgcaacttattttcctttacttattttatttagcattgtcacaaataatatcaattggccattgcctatgaaccctaaagagtagtaaattaatgaaataagctgcatgtacagaactcatctgtccccaatttgattagagccactttggttgcaccaagccatttactatagatgagcttcatttattaaacaagcagcttcatgagttcttggtaaattgttatgcacagtatttgcagtgattttcatgaaacacttaaagctgactcttttatatctcaatcactaagagtattttatgcctgtgaaataggcattttgagtcatcttgtgactttcatctgactaactccatctgaagtagttgtctatttrtggaaggaggtgtcctttatttttgtttctagggaacacagtaggagcaagggaagggcagaggggcttatttcatataagggcttcttgtcgcctgaactatggttgaagttccctcacagaacagagcagctggtcacagctctgcccaggcatttctgtgtctgcatcttcctgctgtacttgcatatcaagaagcatttcagaccacaggaatgcaggattccaaggcgccaatttaccttggaatttgaaaaggtaggtttcacaaagcgaatggctttttaaaaaacaaccagaatcattcagatagataatgttggtgtttctttgtggctttaacaaacctggggaggccaaacatgttccagaaaagcactgcaaggtaggtaaaagctgtgaatcagaaacagggaaaacataagtgactttggtatgaaacaaggtgacagcttctgggcactggggaaactgcctcaaaaacaggagaaggggtgaggggcacaatgcggggaatgtgtatccagaggctgcagtgagatgtgccgatcacataacttctgtgaagggcagaggaacgaagctgagagacaaagaaatcatggtggatgagataagaacattccggagaagtatctgtgtgagagtaaagcagaataaaaattggaaacatttggaagagcttgtctctttccagagcttaaatgaaggtgggtggtggtgatgtaacgcagaatcgtcctatatgtctttgctaagaacatatgtcctcctcatgaatccactgcagtcaataccgataaaaaaaagtgggaggcaatcatagaaatgcttagtgttaaagttaaaagcatattcaatattcctgttttactaaagaattttatgcatgccagtacctcaaaccctcacatgttttcaaagaaatttagagccccaaaatactagagcttacaaagtggaaatgaagaaatttagatatcccagtcccacagattttgttaatgatgtttcctgagagttactttataattttttcagtatatagttacagttgaaatctaattcrctggtacaagttctttattttaaatgaaaattaaagagtccattgaaacagtctcctaattagagagaatatggaaggaaggaaggaaagaaaaggaaggaaggaaagaaggaaggaaggaagggtgggaaggagataggtgtccaaaccagagtgacctcctcttgaataggggctgggtaaaataaggctgagacctactggrctgcactcccaggaggtcaggcattcttaatcacaggaccctgttgataaagaggatgtggtaaagaagatggccaaatcccaccgaaacccaaaaccaagatgtcaacgaaagtgacctctggtcatcatcactgctcactttatgctaattacaatgcattagcatgcaaaaagacactcccaccagaccatgacagtctacatgccaacatccggaagttaccctgtatggtctaaaagcaggaggaaccctcagttttggaaattgtctgtctctttcccagaaaattcatgaataatccaccccttttttagcatataatcaagaaataactacaaatatactcagtcaatcagcccatactgctgctctgctatggagtagccattcttttgtttctttacttttctaataaacttgctttcactctactctggacttgcctcaaattctttcttgtgggaggaggaaggaaggaagtagggaaggaaggaaggaaagaaggaagggagggagagagggaagggggaaggaagaaagaaaggaaggaaggaaggaaggaaggcaggaaggagaggaaaaaaagactggcagttcctgtatgtatacatcattattattattaagtgattttttttgtgctcattatataacataaaaatatcatggaacatttgagataaaaggagctggaaaatattaaataaaatacatcccactcaacaagtccaaaggtgagtttcacgacaaaaatgatatcttgggcaaagtgttttgaaaacaactgctaccctaaatactactttcatattcacagttgcacactaataagagattctgaggagtcctgcagtaaagaaagtgtctgagtttgttttaacttgcatttcaaaaatatgtttgactagggtaattttttttttcatataacagctattaacagactatgtactagtgctccattgaacatatcttgggaaatgctactctcaacacttcggcataactcactcacaaattctaactcttttagagattatacttaggaaaatgtgtccgtgggtagaactacctctaagaaaagtaaggtttatgaagggaattctaagctctggaatcttcagacatgaccaatgagggaataaaatctcattctgggagttcccaaactccagatgttttattttttctataactgaacttgaaattgaaaagtcaatctttaaaaaacaatagtatcatataaaaaaaacctatagataggatactcatatttagcaatgctctttttaccatttttgaagttgtaaacatgactagaagccaaaaatactgattcctactcaacaacttcctgtgttacctgaattccgcatcttctctatcaatcaaattgctgaaatctcactctaaaattagcaattttattctgattatttctcagcttcatttcccttgatctcttgtgggcatttgacagatcaggcccatttttcaatcccaaattcaaatccattcctctcccatgaagccttctctgattagcttgtcctgttctcactgacatatatctctatctatctatcatctatcatctatctatttatctatctatcaatcatctatcatctatgtatctatcatctatcatctatctatctattttttccccaaaaaattatttaatatttgctggatactgcaattcatgcattatctttttccattttttacttttctattttagactaatttcaaataaatgttttgtttattgaagcctagaactaagtgttcattacaccccgggtttctcacttgttttgaaaataatcarcatcctaaagtcaatctacaagacttcctttagaatttttttttatgttggtctcaatgcaagaatctgcaacaagaaaaaaggtatctaaatttgttgagcataggccaggcacaggggctcacgcctgtaatctaagcactttgggagtctgaggcaggtagattgcttgagctcaggagttagagaccagcctgggcaacatgatgaaaccttgtctctacaaaaaacttaaaaaattaaccgggtgtggtggcatgcacctgtagtcccagctccttgggaggctgaggtgagaggattgcttgagcccaggaggcaggtggtacagtgagctaagaatcatgccattgcactccaacctgtgcaacacagctagatcctgtctcaaaaaaaattaaataaataaaaattattgagcacttatgtgaaaaaccctgtgctagatggatctatgtataagccttatcataccactgtggcattattgtgattcttattaatatcatcatcaccactgccatatcaatataaggaaagtgagttagaaatacattaaataggctgggcacagtggctcacacctgtaatcccggctctttgggaggctgaggcaggcagatcacctgaggtcagaagtttgaaaccagcctgatcaacatggagaaaccccatctctactaaaaatgcaaaaattagccgggcgtggtggtgcatgcctgtaatcccagctactcaggaggctgaggcaggagaatcgcttgaacccaggaggtggaggttgcggtgagctgagatcgcaccactgcactccagcctgggcaacaagagcgaaacttcgtctcaaaaaaaaaaaaaaaaaaaaaaaattaaataattgggttttcataatgccccaggcatggttctaagtatgagtgcaaaagtaatattgtggtttttgcattattggaatttaccgtttgatattggaatacattcttaaataaatgtggttctgttaaacatcattttaatgggcatttctcactttattttttttgctaatcacttattacttgttgtttattttgtgtttattttagatgatggaaatgatgttaaagaaaaagaaaattcgagtgattttcttatttgaggtcaaaatgggtcataaagcagtggagacaactcgcaaaatcaacaacacatttggttcaggaactgctaacaaatgtacagtgcagtggtggttcaagaagttttgcaaaggagaggagagccttgaaaacgaggaaaacagtggctggctataggaagttgacaatgaccaactgagagcaaccatggaagctgatcctcttacaactgcgtgagaagttgccaaggaactcagcgttgagcattctagagtctttcagcatttgaagcaaattgggaaggtgaaaaagctggataagtggatgcctcatgagatgagtgaaaatttaaaaaaaaataaaataaaaaacaaaattgtcattttgaagtgtcatcttctcttactctaagcaacaacaacaaatcatttctcaatcagtttgtgacgttcaatgaaatgtggattttatacgacaactggtgatgaccagctcagtggctagaccaagaagctccaaarcacttcccaaagccaaacttggaccaaaaaaaggtcatgttcgctgtttggtggtctgctgctggtctgatccactattgctttctgactcccggcgaaaccattacatctgagaagtatgctcagcaattcaaagagatgaaccgaaaacttcaacccctgcagtcagcaatggtcaacagaaagggcccaattctccacgacaatgcatgatcgcacattacacaactaaagcttcaaaagttgaactaactgggctacgaagttttgcctcatccaccatattcacctgacctcccgccaaccgactaccacttcttcaatcatctcgacaactttttgcaaggaaaacacttccacaaccagtagaatgcaaaaagtgctttccaagagttcactgaatcctgaagcacggatttttatgctacaggaataaacaaacttatttttcattggtaaaaatgtgttgattgtaatggttcctattttgattaatgaagatgtgtttgagcctagttataatgatttaaaattcacgatccaaaaccgcaattacttttgcatcagcctaatatgaggaagtaatagttgaacagaataattctttcctggaagtctggcattttgcctggggagaaggatcattaaaaacttaaacattttaataaaaccatttaaacaaatgattttgttacaatgtctgatagggtgatacatgctgttgaaatgggaaagttcccttgttccctcacagggctggtgatgggggtgtggctcgcttcttccgtgcctcactgctcaaacctctaggggagcatacagaccggcagctgtggggctctgaccccacggcagtgtctagaggtgagtgtctacagctgaagccccagtgggtgtgtgttacagggtactcttttagtttgctgtctataggcagcttgtgttaaccagctagattagaccctctaccttatcccaaggacagagggctttctgtatcctgggttcttgccttggtgtaccggaagaatcggatcacacgtgggcttggagaatgaatgtaaagttttattgagtggaagtagctctcagccgatgggggagccagaagggagatggttttcccctggagttgggctgctcagtggcccctggctctcctaagacttccccaggccaaactccacctagtcctgctagaggacggcctggcctcctgccggcgtcagtcagtgtgctcttccattggtgtgcttccctcaacatcctctcaatgtccggccacttatctttttccgccgatgtgttcctctcgccatccagcagcttctgtctctgccttgctagggtctcaggtttttataggcccaggatggggttgtggtgggccagagcggtcttggtaaatgcaacatttctgcctgtcctcacctaggtccgtgggggtagagccctagtcagggccctcctctacccaacacttcccttcccccctccatatcatttaaagggaccacgcccttcccttcctggcactcttgtatcactataaaaataaaacagtataaaagcttggaatgcaaagagcagtaaacgctgagctaggatgggaagccaggctctagatcctctgtaatagcccctgttattcatcagtctcaggtacaactgggaggtcacaattcaacccataatgaaagcatctctattactggcatttgaggcctccagtaatcactccttacctacataatctaaggtaactcaagtcatcaacatcaaatctctgttccaatcaagtctacttatcttcacttaaaatgtactcactatgactctgtgccttggctcacgctgttcctttagcatgtgtgcacacgcactcaggcacacattcacacatgctttcttttgactttaatgtaagttcaatttattctataaaacattccctgtttattagagtaagagttacatcttcagttttgtttgtaatttttatcacatgtactgtgattctgaacaatctataaatatgtgttgacagagcagaatttatctgagctccaagccctgaaaaatgataaaaagaaaccaatatgcaaatatttcagaagctgaggaactataacttcgggactagttttttgtcgtgtctgcattgacaatgatttttaaaattaaagtgtaaaatctggaaaaaagtattaaaaatattgaacctactggtcaagaaaaaatattgaggataaatacaaatatgatttgcatggcattagactttggagaatttaataacattaaattcaagatacctttaaatctttgtgtattaatattatttaatttttatatccttcaattccaaaaaagaatataaagaaataaatttgaatgtttattcacattatttcagccattaattataatatacagttgacccttcatatccacaggagattggctcctgaacccctgaggttaccaaaatccgtggatgctcaaatctctgaaataaagtggcatagtatttgcacataacctacgcacatcctattatatactttaaatcatctctagatgacttataatacctaaaacaaggtaaatgctatgtaaataattcttatatggtattgtttcctcatttgtattttttaaattgtattatttttcattgtttttttcccaaatatctttcagcttctgatggttgaatctgagaatgcagaagcagcacatatggaggactgactgtgtatttaaaagtggtggttcagtcatagtgaagagaatgacttctttctaaataaaatgaagcaggtgtattcatcattaaagtgaagaaaacatgtttgagaaaagcaaaatgccaagaattcatatgacatttgcaccatctcaaactaaagctgaagtggccttgccaatattatttattctaaataatcacacagaaaaacaaatggcttctcaataaaaaaatactccttctagttccaacaataatagagtcagaaacaggacttgactaaaactgcagttgccattcctgctttccacctttttccaactttaaaagatttaaatacaatttgcttgtctttataaacaacagaactaatcaccatccggggtagcaaccagcatgtgttgctaaatttggcagactcaaccagaataaagaatataaagaacagttaatagaatcttaataaagttgctggtgtttataggcattacattagtttgctatggctgccaaaacaaagtactggaaactgttggaaatttaatgactctcagttctcgaggctaaaagtctgaaatcaaaggattggtaggatcggttcctttttagggctgtgagggaaagatctgttctaggtcattctggtttgtagattttcatacttacatgtcattctccctgcatatgtggctgtccctaaatttcccctttttacatggacacaagtcatgttggattgggacccaccttaatgcccttattttagcttgattaattctataaagattctatttctatacaaggtcacatttgtaggtagaggggttaagacttcaacatatgaactggaaggtcacaattcaacctataacaagcacttttctcattttcatttggagcgtaatttaaaattttatttttttgtgtaaattctatgggtaacataaatacctattcggaacaataattaagctgggtcttcaaaactgtatatatttaaaataataaatgaaattcctaacaggttctatggttgttttaatcttgacatatgtaaagttcaaatgagcttggaatcatgatatgactatatattaaaaatgaggaattgaaaagttacctaaacattgctatataagttcatgggcaaagtaggcagctgcctatgatgtgcaggacctgctagtaattcctcatgtctccaaaatctgtatattgtcaatttctggctaatatctaatattccatcaaaagagtccctcacatgaaaatacatatattgaaagtaatgggaggtgaagccaatggttaatcaccaaaattgtattgctacactgtcaccttcaagtacaatgtaccaacacctttcacctgaattgctaaaatagggtcttaactggatgcataccttcattcctttgtttagcaaatatctgtagggcttctgccaagtaccaagcactgtcataaatgtttagggtatctttgtgaaggaaaaatatacctgtccttgcagggtttatctagaaggatatggaaatgtctgttttttttttttttgtctctttccaattcatcatctacaaaatatccagagtgatcatttcaaggagaattctgatcttgtcacttgctacttaaaaccttttcataattttctttgctttagattaaaatcccaaagccctgacatggctctcaaggccctgtgtaatctgcttcctccttgactctgccaccccatgcatataagctttctatcccatccactctgctccaaccacactaccctgctaatctaatggtgatgatgaacaaatctctcctacactcagagcatttgtatatttatttcctttattttaggagctcccttgtttttcaaatgtccatttccaactcatcgttcatatctcagcagaaatatcatttcatggatgcttccctaatgcaccaaaccaagcacagtttccctctgaaacctatttataacttctgatttataataattgtgaataagtatgtgtataatgtctagaataaagattatgtatttttataattttctctttatacttagcacggtactggataaatggaaagaactcaaaacatatatattgaatataagaggattaaggtagaagggaaaagagagagactaccctgactcttggtaaggcaaaaattaaactggaattaacttgaacagggatggacactaatttaatgggtagaagtttgggccctaggcagaaaactgcaatttactttagtcagcattttccaagtacattcaaaaacaggttcattcgaggaagtgcttctcaaaaacatgatgcaatggtcaaataagtttgtctgcctcttagatagtgcctattagagtctcctattaggagctctaataattcttctaggaaagaaacctgtttaacaaacccccctcttcctctagaaagcctaatagcattgaagagtacctccttggaaatactgttttaaggtataacaagtctgttccactcccttgtctttttaagctatgtagatggaaaatctcaatctgcattttttcttatctcaaaaaaaaaaaaaaacctagaggccttacctttagaggtattatttttacttcccaatcaaaaattagtatgtaaaatcaggagttgtagccccctctttagaatatagtattttcataattttggatacttggtgcatcaatatttataaatttgtagtatcataataagtggctgcatactttctacctagaattcctttagcttaattattgtggtatagaccaggagtctccagatatgttgagcctattacttgtgtatttttatatgtaacataaatgtaccactacacttttatatcatttattttttgaaactttccctaaaataaaatctttaaagattgaggtaaaattaatataataagaagtcctaaaattttcttactattattcagaggatcattttgcatccaccttggattacatgcatgtacctcaccttagagataattcttaatactatgactggactagaacttgccagagcatgataagacctaggaataaggaattattccatgcacttgaagctttattgttttcatttaccctgaaaattactcagctaccgtttattggatgtggcttatttaggtgagtagagagaactgaattcggaggctttaaagaagatataggaaggtgaacaaaagatttatctttataaactttgtgtcgggattgaggtgttgcataatttactatcatgatggtattagactgagtcctgtcttttttactttggcttgggaccccaggagggtacagtttcaaaggtacacagttctcctagaagactagactataaagctgtctgatgatttagggcatgaatctaccagaagttcagaaaatagaagttacaaagaaccaattctaaattttattctattgtgttttactcagggacaatcctgaagagtaagttgtttcaatactcagaacactaacaatagtgtctggggcaaatcgacttgtcatattgtacagacaacttagtttgatcctctatcctggcagagactacattcagagaaacccttagaggggattcatcacagattcatatgaaatcgtaagtttgaagctcctgagttccaaagtcatttatcattagataaaagcatcatcatgatttagatgagtagtattgcagaatggttaggaatacaggccttgatggaaaacggaaatggatttggcattaatttccacattaaacaacttaaaggctatatgacctgggataggatatcttagaattacc

SEQ ID NO: 93550 - DNA, 49339 bp, Homo sapiens
ttgtaggaaacacttacttgatgttttatttgaacttttcctataggtttaacttttactgcatagaattaacactaggaacagtgtcatgaaatctgggttgaaggagaatacagtatatatgagaacacttaaagttcaaatagaaatcatttctgaagacaaaagcagaggaatattgtcagtgccaagtaatggaagaataagggcggcatttacactgtgcaagtattgagaagagtgcataaagacagggaactactctcatggagacagtttctctcttataatcaagtaactagaaggggaaaaatcatctaagttatgaaatccaacataggcgctatattacaaactgtgccggattatgcaaattgtagttgttactgatcaaagtttaattgcttcatttttgtttaaaaagggatactgatgtcagaaaatctgtaatatgttttattcaaaagatgtaaataatgtatacagacttgtatgtgatgggatgggaaatatttaaattctaggtgtttttttttttttaaagaagaaactcaatgtttataagaaaaaaatgaataaatagttacgtttggccatgaatcctgactttgcattactgtttatttttgctataggcattcccacactaaacacattccaagggaaatattgatggcatatggaatatgttgaacatttaaaatttgttaggcactattttctgtaatgttcacaacaaccagtgtcttaacatcttagaaaactaaagctcagaaattgtacaagtcactgatttggattagggttttaaaaccctactgtgtctgaacttgaaaccagtgtttctgttttacttttttcacttttttctttattctgcagtatgcaggtgtatgttttctataatatatactattacagtgagaacagttagcacagtaataatcatttgttgacctcttcaccaagctattatttaatattttgtcttcattgcagatcattaaggaatattaataatattggagaatcatttaccaagttccaaaaggaaatgtgtattttattttattttatttatgagacggagtcttgctctgttgcccaggctggagtgcaatggcacgacctcagctcactgcaacttccacctcctgggttcaagtgattctcctgcctcagcctcccaagtagctgggattacaggcatatgccactatgtccggctaattttttgtatttttagtagagacagggtttcaccatgttggccaggctggtctcaaaactcctgacctaaggtgacccatgagctttggcttcccaaagtgctgggattataggcgtgagccatcgcgcctggccaaaacgtgtattttagaagtcttctcagagtatcagaagtatttatgttagaggcatttgtgtttgaatcttcaggttaagaatatttaatggtagtagccacagttgctcaaagtcactaatggtatttgggagaaagactagttgaaatgctagccaatgctgttgtggactgtgtctgcatgctttaaaaacgccctgtgggccgggcgcggtggctcacgcctgtaatcccagcacttagggaggccgaggtgggcggatcacgagctcaggagttgagacctgcctggccaatgtggggaaaccccatctctactaaaaaatacattaaaaaattagccgggcacggtggcgcttgcctgttgtcccagttactcgggaggctgaggcaggagaattgcttgaatccgagaggcggactgtgccactgcactccagcctgggcgacagagcaagactccgtctcaaaaaataaaaaaataaaaacactctgttattcatttattgtgtgtaaagaaatatatattgtaaaattacctacattttgataattaggttcatttacctctgttgtactaaatgtattataagttgttaatcccttatataacatctgcaatgagcattttgcaacacaaagattctaattaattattcctctaaggtttaaacaaccatgtttagtagaagttttactaagaaattgtacatgctcctgttacagcatgatgaatacagtgtcacattttcttgatgacctcagtccacttcacaagcatgtagtaaaacagctttctttgctaagctgtatacatctgatggctcctatgctcttctagtatgttattttgctttcagatttcagatttgcaggaagcacactgactcccactcttgcatttatgatggcttctgtaccccgttttctaggcactaatgaagattacaaggggaaatttataaccaagcttattaagttgataaatatcattttacagaagtagttgagtttgtgtagacaaactcatgggctgtgtaaccactacttaatgttcagggtctcttattttttctgctttttattattttctgggttgatttagttttcctaataaacctgtatgttgtcagtcagaacgctgtctcattctttagttacactagaattcccacaggagaaaattcccaaattgaaggagtagtaaaatttctggtaagaaaggattaggtggcagcacgatcatgactggctgggtgcgctgtatcctgtctcttatctgcagtttcaaaacctgaaaagctcagaaaaccaaaatttttttgtttgtttttttgagacggggtctcactctcatccaggctggagtgcagtggcatgatcttggcttaatgcaacttccgcctcccgggtgcaagcgattctccagcttcagcctcccgagtagctgggaccacaggcacacaccaccacgcccggctagtttttgtatctttagtagagacagggtttcgccatgttggccaggctggtctcgaactcctgaactcaggtaatctgtccatctcggcctcccacagtgttgggattacaggcgtgagccaccgtgcttggccccaaaggtattttttttgaattcagtgcaaacttattctgaccagatgttaatagtctttatcccacttcatgttaacactctttgtttcactgcaaaatattagtgcatttgatttaacacctctgcagggggagtgggggtgcttacttaataattaatatacagtatatgcactgtatcgtttctaaagtttcgattccaaattttattattgagacggggtcttgctgctgtgtcactcaggctggcatgcagtggcgcgatcatagcttactaaagctaaaactttgcaggcccaaaccatcctcccacctcagcctcctgagtagctgggaccacaggtgtgtgccaccacaaccagctaatttttgtattttttctattagtttcgccatgtttccctggttggtctcgaattcctgagctcaagcattccagagtacctcccaaagtgctgggattataggcaagagccactgcgtccagccagttccaaagtttagaatttcttttctaaaaatcttttctaaaagttttaaattctgaaacatctggctgccagggttttagataagagattgtggaccaaaaatcaagatgttttgaaaagtgcttttctctgttctctccttgtgttacccccaggtcatgtaggaaaatgggaaattatgctggacttaatgccaaaaaagctagattctttgcttcccccatttactttgttgttgttagttgagacaggatctcactggagtacagtggcatgatcttggctcactgcagccttgactccctggcttcggtaattctcccacctcagcctcccaaatagttgggactacaggcgcctggctaatttttctattttttgtagagacaagagttttgccatgttgcccaggctagtctcaaactcctgggctcaagcgattcacctgcctcggcctcccacatttgtatttttcaaagtatactcttaagctcagatgaattcaagtttttgcagccagaaactggtagaactggtgtttgaaatctttcattttccagtgcttaaactcttcatcattgtaagatacttcttgtgtgggtcttttttgtggaaaccacacttggagatttctactccttaaccccaagcctctttatgacatccatccaggaccagctctgctttcctgttgaaggtctcaagagacttgccttcctcctctcggtagctgccagtactcttaccatttcatgagttttcccccaagcttggctgtgaaatgtgatacctattagcttccgcagcacctttctcccaacttccttgctatacctgatgacaactcttcaggcctcttatattcctaggatcttgctattaatcactatagggataagtaaaagtaatatatacaaaataattgcataacagaataatatagggcagttacatagaatgattcttgctgtttaatcctggaaaatgtgatccccgaggattcacattttaatttctgctctttatttctgaggatggagtcaccgttttccccttctggctacacatttagatgcatttcaggtctgatgatagttgcaatgtaaaaaagaatagcaaggcctttggtttctgtagacaatttggaccagataacttccagactgggtaatatccggtttattagtgttactggatgggaagtcttgactgagttgtctgggtttttggcgtgttgaacaaagaattgaacaaaacgtagaaacaaagcaacaaaagaagcaacgaaagacaaaacaacaaaagaacgaagtaacaaaagcacaaatttattgaagcgaaccaagtgcttcaagagtcccaattgcagtgttcttaagggttactaggctaaaagaatttggtaaatccctaggtgccctttacagtcgtccaattggttgcaccctatgaaggattggcctgygaccaatcagaggctgaaatggagatggccgaggacaatcagaggcgatgtggaaacttctgtcttgtaatcacaggagtgaaggtgtggcctgtatgctgcctagtcttgcctagaaattgctgcacctgctgttcttttgcttatgccttaacccttggttaccctaattccctattctcttgcctcattaggtctttaccctgactaaaaatgcactcatctagctgggacaaatcctacactgcatttgtcccatctagatgagtattctagcagagtacatggcacatgagtaggcattcaaaaattcaacatacagtacattttgttacctatgtgccaggtgtcgggcaggctgagttaacagctgaacagaaacctacctacccaacgtgctaacttctatacagcatggtcgtgcatccaaatcaaatggaaagcggtatgggagatctggaaaggcctcctgtgggtggcatctgactacctaaattcccatcccagtttcacttactgactttgacacttggaacaagcagcctctcagtgcctgttttcccactggcaggtaaatgggctaatgacggtatttctggcactagacttcgttaattaatgaaaagcacatagaagaaaacagcctggctctctaagtgggcagtgcgattcccaaggacggcacttcgcctgatagtcttcctctaggctgagaagccagagtaaatccatttgattttcctaccacacagtgccttctccccagatgagttcaaagctttaagtctatccagttctgtccagacgcgtctgttcatctccaacaggcccactagagaggcgggttttccaaagcctggcacggcccactgcaggtgacgccctctgccctccagcgccctcaggcctctggggtccacccttcctccccacccgactccggaacctcttcccgcgccctgcccgggcgcctggctgcttggggtagaggccttccgccacacgcgcggccccgccccggccttcacgtgacctggcgtgcggagcgcgcacgcgggaacccgcgctggaggcgggcgagggccgaggggcagctagggagcgcggcttgaggagggcggggccgcyccgcaggcccgccagtgtcctcagctgcctccgcgcgccaaagtcaaaccccgacacccgccggcgggccggtgagctcactagctgacccggcaggtcaggatctggcttagcggcgccgcgagctccagtgcgcgcacccgtggccgcctcccagccctctttgccggacgagctctgggccgccacaagactaaggaatggccaccccgcccaagagaagctgcccgtctttctcagccagctctgaggggacccgcatcaagaaaatctccatcgaagggaacatcggtaaggagcctccggaaatgtgggacgcaaggctggggtgtcgcggcagtggctgaagcttcccttcgccgcatctctctgcagcaactcggtgagggctttccctccagcctggcggtgtggacgcggcctcggcttcctttcccacccagagcatccttcccttacctcccgctccacggggtgactgcggtccccggggtcagactgggcgccaggcctgcggtctctgtgaggcgcgctttgaacctctgctccctctttgttgggaactcgcaaagggaagcgggggaagggtattagatttcttgaggtgtaacttacattaaattcaccctttttaggtgtactcttctatgaggtttgacaaacattatgccttttgctatcaccatgatcgagatacagaacattttcatcaccttagaaagttcctacctgctcctttgtattcagccccctccacccttcctattccctggcacccactgatttgatttctatccctgcaagtgttgccttttccagaatgccatataaatggaatcataggctatatcgccttttgtgtctggcgtctttcatttagcataatgcttttgaaattcattcatgttacttgtgtctgtagtttgtttctttttattgctgagtagtattccattgcatggatgtaccatcgtttatccattttctagttgtggacctcagggttgtttacagttttttagctatattattagcgaagcattgttttagctatattattaacgaaactcgaaacattcgagtacaagcaaagaggtctttaatgatcttaatagcatggagttcctcaccccttactccacatccaagtaaacattggattatgattcaaagaccactaacgtttctgttaactcagatggggggcagactaggccatgcctgtcactttgcaagatacacaccaacgtccgattcttctgtatctccaaccacaggaaacctacccctgaaacttcctgttttgatagatttaaaaaaaaatttttttagctccaggttgggtgctggtcattcatgcatacagcaaattttttaaaattcttaccacattcaaagcackgtaccttcttgaaaaaggccaggcaagcagatgctttaagcattcaaatgaatagaaaaactgcattctcaaagaggacttcttatttcattgctccagaattaaagcaccagtagaaagaccatatgatataattagcaatgtaagttatttgagggtgcatgtttactagtatggaatctctgacagctgcttactgaataaagaagaccatatataaagacaggagaaagtggctgaacaaagccatctgaaaagtaaatttgaggcagggcatggaggctcatacttgtaatcccaggattkggggaggcttaggcaagaggatcacttgagtccaggagttccagatcagcctgggcaacatagtgagaactcatctccacaaaaaaattaaaaaattagttgcatgtgttggtgtgcctccagctactcaggaggctgaggcaggaggattgcttgagcccaaagatcaaggccacagtgagccatgatcacactactgcactctagcctgggtgacagagcaagactctgttaaaaacacagaaacaaaacagtaaagttgaatgaataacccctcggatcaataccacaatacattcatcccctttccctctctccaatccagktaggtagcatcatatttagaaatatttcctcaaagcatctttaatcttttcagcagctgaaataatttcctaatatatcatcccatctccagtttctcttaactacttctgcaacggtctttttgtatgcaaatgtcatgtgttatcccctgcttaaaattcttcactgattttgcctttacctacactgaaagtagttgtgaactgatagcctgcaattgcacaatattggcctgcacaggttgaaaaaaaattttactggccagtggctcaagcttgtaatcccagtgctttgggaggctgaggcaggaggattgcttgaggccaggagtttgagactagcatggcaacatagtgagaactagtctctaagaaaaataaaaataaaattaggccaggcacagtggatcacgcctgtagctccaactactcaggcggctgatgctgatgtgggaggatcacttgaatgtgggaggcagaagttgcagtgagctgagatggcaccactgcaccccagcctgggtgacagagtctcaaaaaaaaaaaaaagccagttgtgttagcatgcacgtttagtcctagctactcaggaggctgaggtggagatctttgagacctatagtttgaggctgccgtgagctgtggttgtgccactgccctacagcctgggctacagagtgagaccctgtgtctaaagaaaaaaaaattaaatttgttgctaactcgaaaacgttttgagatttcccataaacaattagattcttggcttcttttgaaaaatctgaagatctgttaacaccgggcctgcatttctgtatgacaacaattggtgtttagatggagcatgttccttgccatttttcgtctccctgacactgagactttgttagttactgttcattattggtcttgcacttttgttcatgtctccttcaccttatttgccagatccaaataagctgtaaatgcacaaattgttaagctgtgcgtaaactattttgcaattcctctatttttcctagaatttgaactttacttggtcgttttagttttatatttatataacccatcttcttatgttctgtgttactcaaatgttcccttatgttagattgatggaggacttacctgcttctcatcttaatagtctgttcagaatgactttcagcattataatgcctgcttggcattaggaattctgttagtttccatgactttttaaagtattaacatcagtgtctttggttcttgttctcctttgccttcatagaaaattaatttattaaytagcttattttctagctcccactttgccccaataagttaaggaactagatgtgttagtgtgattgggaactctagctgttattactctgcttgaactaaatgtaactgttattactcttagactttttaagtatgaccatatgaatttttctgcttgtaagcagtgtcagaagaaagttgaatgctgtagccttaagtgctttcagactctggtggatgcctaatttttttatttgttccttgggtgctatttctgaacatcatgttctcctttccctcttccatctagctcagtgaatgtggggtgttctttctatatgctttcacttccacttaacattcttctaaatgctgtacagtccctaagcttacactctccatactaaattttggtggccagtgtttttaccatgattaaatctcactgttatccagtttatcgttaaaagtttttctcctctcctctggatacagtttactttgtgtttttcttctaaactgtctacctgtgtcaccttcttyactgcctcgctcctgttttttctctgtgtgtaattctttaaagttcttccaggtttttcttcttttctattgccctgtctaatgtcctagatttaaatatagttctgcaagtcaaaggtaagttctttctactccccatggatctaatttataaggaagaggaagctttgcttgtaagtatattgaagttatttatatgttcatctgtgtgtgtgtgcacgcacacacagggaaagagagagaacattatgctaaccagagatgtctaatacaaccacatttggtgacttcagatataaagggtgtggtggccattaggagtattacttctaggtcaagactgtccctactattaaatataatatattgttaaactaaacgtaataaaaaacaaatgtgcttaatgaaattgggcagggagccttttcattttcttctaaagaaatatgaagagaaagtttagaaagttgaatgttttgggctttttatgttgcttgctattgtaaatcttgcaaaagctaatgactacttgacatctttttttcctgacaacttttcttcctcaattttatctttcctcacaacagctgcagggaagtcaacatttgtgaatatccttaaacaattgtgtgaagattgggaagtggttcctgaacctgttgccagatggtgcaatgttcaaagtactcaagatgaatttgaggtatgaaaataaaatttaagtagataaaagcctcttggtttagaggagcagtagtacttaatctctttttctttttctttttcaataaaactttcaaatctcgctttaggtatatatcttcatctaggtggtggttacatggatatatatacagttggctctccatatcaatgggtttcrgattgatatggattcaaccaatcatgaatagaaaatattcagaaagaaataatacaaaaaaatacaaataataaaggattactgttcatatagcatttacattgtattaagtattataagtaatctagagatgatttatactatttgggaggatatatgcagatactacaccattttacataaaggacttgagtatatgtggatgttggtatctgtgtggaacctggaatcaattcttgaggttactgaggggtgactatatgtttaaacatgcattgaggccggggttggtggctcacgcttgtaatcccagcactttgggaggctgaggcgggcggatcacttgaggtgaggagttcaagaccagcctcgttaacatggtgaaatgccgtctctactaaaaatacaaaacttagctgaacgtggtggtgggcacctgaattccacctgcttgtaaagccgaggtaggagaatttcttgaacccaggcagcggaggttgcagtgagctgagatggcgccactgtgctccagcctgggtgacagaatgagacactgtctcaacaaaaaaaaaaaaaggaaagtaaaatttatcaaactatgcattcaagatttatgcactttaagtaaagtataaaagttttctttttcataaaaatttctttttttgttgttatcctttaagttctgggatacatgtgcagaacgtgcaggtttgttatgtagatatacacatgccatggtggtttgctgcacccgtcaacccgtcatctacattaggtatttctcctaatgctaacccttcccttgcctcctaccccaccgacaggccctggtgtgtgatgttcccctccctgtgcccatgtgttctcattgttcaactcccacttacaagttagaacatgcggtgtttggtttcctgttcctgtgttagcttgctgagattgatggtttccagcttcatccatgtccctgcaaaggttatgaactcattcttttattatggctgcatagtattctttggtgtatatgtgccacattttgtttatccagtctatcattgatgggcatttgggttggttccaagtctttgctattgtgaatagcgctggagtaaacatacatatgcatgtgtctttatggtagaataatttataatcctttgggtatatacccagtaatgggatggctgggtcaaatggtatttctggttctagatccttgaggaatcgccacactatcttccacagtggttgaactaatttacactcccactaacagtgtaaaagcattcctatttctccacatcctctccagcatctgttgtttcctgactttttaatgatcaccattctaactggtgtgagatggtatctcattgtgggtttggtttgcatttctctaatgactggtgatgatgagctttttttcatgtttgttggctgcataaatgtcttcttttgaaaagtgtctgttcatatcatttgcccactttctgattgggttgtttgtttttttttcttgtaaatttgtttaagttccttgtagattttggatattagccctttgtctgatgggtagattgcaaaaattttctcccattttgtaggttgcctgtttacttggatgatagtttcttttactgtgcagaagctccttagtttaattagatcccatttgtcagttttggcttttgttaacactgcttttggtgttttagtcatgaagtctttgctcatgcctatgtcctgaatggtattgcctatgttttcttcagagtttttatgattttaggtcttatgtttaaatctttaatccatcttgaattaatttttgtataaggtgtaaggaaggggtccagtttccgttttctgcatatggctagccagttttcccagcaccatttattaaatagggaatcctttccccattgcttgtttttgtcaggtttgtcaaagatcagatggttgtagacgtgtggtattatttctgagggctctgttctgttccattggtctatagctctgttttggtacaataccatgccgttttggttactgtagccttgtagtatagtttgaagtcaggtagcatgaggcctcaagccttgttctttttgcttaggattgtcttggctatacgggctcttttttggttccatatgaaatttaaggtagttttttctaattctgtgaagaaagtcaatggtagcttgatgggaatagcattgaatctgtaaattactttgggcagtatggccattttcacaatattgatttttcctatctatgagcatggaatgttttaccatttgtttgtgtcctctcttctttccttgagcagtggtttgtagttctccttgaagaggtccttcacatccgttgtaagttgtattcctaggtattttattctctttgtagcaattgtgaatgggaattcactcatgatttggttctctgtctgttagtggtgtataggaatgcttgtgatttttgcccattgattttgtatcctgagactttactgaagttgcttgtcaccataagggattatgggctgagatgatggggttttctaaatatacagtcatcatctgcaaacagagataatttgacttcccctcttcctatctgaatcccctttatttctttctcttgcctgattgccctggccagaccttccaatactatgttgaataggagaggtgagagagggcatccttatcctgtgccgatttttgaagggaatggtatcggctgtgggtttgtcataaatagctcttattttgagatacatttcatcaatacctagtttattgagagtttttagcatgaagggatgttgaattttattgaaggccttttttgcatctattgagataatcatgcggtttttgtcattggttctgtttatgtgatagattatgttttattgatttgagtatgttgaaccagccctgcatcccagggatgaagccgacttgatcgtggtagatgagctttttaatgtgctactggattcggtttgccagtattttattgaggattttcgcatcgatgttcatcagggatattggcctgacattttcttttttttgttgtgtctctgccaggtttttgtattagggtgatgctggcctcaaaaaatgagttagggaggagtccctctttttctattgtttggaagtttcagaaggaatagtaccagttcctctttctacctgtggtagaattcagctgtgaatccatctggtcctgggcttttttttggttggtaggatattattgcctcaatttcagaactttttattggtctgttcattaaaccagagttcttcctggtttaatcttgggagggcgtatgtgtccaggagtttatccatttcttccagattttctagtttatttgcgtggaggtgtttatagtgttctctgatggtagtttgtatttctgtgggatcagtggtgatcctttattgtgtctatttgattcttcccgcttttcttctttattattctggctagtggtctatctattttgttaatcttttcgaagaaccagcttctggattcattgattttttgaagagtttttcgtgtctctatctccttcagttctgctctgatcttagttatttcttgtgttctgctagcttttgaatttgtttgctcttgcttctctagttcttttaattgtgatgttagggtgtcgattttagatctttcctgctttctcatgtgggcacttagtgctataaatttccctctaaacactactttagctgtgtcccagagattgtggtacgttatgtctttgttctcattggttgcaaagaacttatttatttctgccctaatttcgttatttacccggtagtcattcaggagttgttcagtttccatgtagttgtgcagttttgagtgagtttcttaatcctgagttctaatttgattgcactgtggtctgacagactgttatgatttccattcttttgcatttgctgaggaatgttttacttccaattatgtggtcaattttagagtaagtgcactgtggtactgagaataatgtatattctgttgatttggggtggagagttctgtagatgtctttcaggtctgcttggtccagagctgagttcaagtcctgaatatccttgttaattttctgtcttgttgatctaatattgacagtggggtgttaaagtctcccactgttattatgtgggagtctaggtctctttgtgggtttctaagaacttgcattttgaatctgggtgctcctgtattgggtgcatatctatttaggatagttagctcttgttgttgcattgaaccctttaccattatgtaatgccctttgtctttttttcatgcttattgatttaaagtctgttttatctgagactaggattgcaacccctgccttttttttgctttccatttgcttggtaaatcttcctccatccctttattttgagcctttgtgtgtctttgcatgtgagatgcgactcctgaataccgcacactgatgggtcttaactctgtctaatttgccactctgtgtctttcaactggggcatttagcccatttacatttaaggttaatattgttatgtgtgaatttgatcctgttattatgatgctagctggttattttgcctgttagttgatgcagtttcttcatagtgtcgatggtctttacattttggtatgtttttgcagtggctggtaccggtttttcctttccatatttaatgcttccttcaggagctcttgtaaggcaggccttgtggtgataaaatccctctacatttgcctgtctgtaaaggattttatttctccttcacttatgaagcttagtttgactggttatgaaattctgggttgaaaattcttttctttaagaatgttgaatgttagtccccactctcttctggcttgtagggtttctgccgagagatctgctgttagtctgatgggcttccctttgtgggtaacccgacctttctctctggctgcgcttaacattttttccctcattttaaccttggtgaatctgacgattatgtgtcttggcgttgctcttctcaagggcatctttgtgatgttttctgtatttcctggatttgaatgttggcctgtcttgctaggttggggaagttctcctggataataatcctgaaatgtgttttccaacttggttccattcgtcagtttcaggtataccagtcaaacgtaggtttggtcttttcacatagtcccatatttcttgggaggctttgtttgttccttttcattctgttttctctaatcttatcttcacgctttatttttattaagtttttcttcaatctctgatatcctttcttccacttaatcgattcggctattgatacttgtgtatgcttcaccaagttctcatgctgtgtttttcagctccatcaggtcatttatgttcttctgtaaactggttattctagttagcagttcctgtaaccgtttatcaaggttcttagttccttgcattgggttagaacgtgctgctttagctcagtggagtttgttattaacccaccttctgaggcctacttctgtcaattcgtcacacttattctccatccagctttgttctcttgctggcgaggagttgtggtcctttggaggagaaaagacattctggtttttggaatttttagcttttttgcactggcttttcttcatctttgtggatttatctacctttggtctttgatgttggtgaacttcagatggggtttttgcgtggttgtcctttttgttgatgttgatgctattgctttttgtttgttagtttccttctaacagtcaggcccctctgctgcaagtctgctggagtttgctggaggtccactccagatcctgtttgcctgggtatcaccagcggaggctgcagaacagcaaagattgctgcctgctccttcctcaggaagctttgtcccagaggggcacctgccagaggctagccagagctctcttatatgaggtgtctgccgacccctgctgggagctgtgtcctagtcaggaggcatgggggtcatggacccacttgaggatgctgcctgtcctttagcagagcttgagcgctgcgctgggagttccactgctctcttcagagccagcaggcaggattgtttaagtctgctgaggctgcactcacagccacgccttcccccagatgctctgtcccagggagatgggagtttgatctgtaagtccctgacgggggctgctgcctttctttcagagatgccctgcccagagaggaggaatctagagaggcagtctagcttcaggggtttgccaagctgtggtgggctctgcccagcttgaacttccaggtggttttgtttacactgtgaggggaaaaccacctactgaagtctcagtaatggcgggcacccctccccccaccaagcttcagtgtctcaggttgacttcagactgctgtgctggcagtgagaatttcaagccagtggatcttagcttgctgggctccgtgggggtgggatctgctgagcaagaccacttggctccctggcttcagcccccttggctccctggcttcagccccctttctaggggagtgaacggttctgtctcgctggcattccaggcaccactggggtatgaaaaaaaactcctgcagctaactccgtgtctgcccaaatggctgtccagttttgtgcttgaaacccagggcccttgtgtaggcacccgagggaatctcctggtctgcgggttgtgaagactgtgggaaaaagcctagtatgtgggctggatagcaccatccctcaaggcttcccttggctaggggagggagttcccccacccctttcaccttccaggtgaggcgatgccccaccctgcttctgcttggcctctgtgggctgcacccactgtataaccagtcccaatgagatgaattgggtacttcagtcggaaatgcagaaatcacccgtcttctgcattggtctcactgggagctgcagaccagagctgttcctatttggccatcttgcctgggaatctaaaagtttttaaaaagttaaataataaaagttttaaaaaatctaacagcaaattaaattccttcattgtcttttctaatttttttttttttttgagatggagtttcgcttttgttgcccaggctggagtgcaatggctcgatcttggctcaccacaacctccgcctcccgggttcaagcgattctcctgcctcagcctcccaagtagctgggattacaagcatgggccaccatgcctggctaattttttttactagagatggggtttctccatgttggtcaggctgggcccaaactcctgacctcaggtgatccgcctgcctcagcctcccaaaatgtttggattacaggcctgagccactatgcccaacccttcagtgtcttttcacattttgtttaaaaacaaacaaataaggccgggtgcggtggctcaccctgtagtcccagccctttgggaggcacgaggcaggtggatcgcctgcagtcatgaggttatagacaccctgctcaacatggtgaaaccctgtctccactaaacatacaaaaattagctgggcgtggtggtgggcgcctgtaatcccagctactcaggaggctgaggcgggagaattgcttgaacccgggaggtggaggttgcagtgagccgagatcgcgccattgcactccatctcaaaaaaaaaaaaaacagaaaaaacaaaaacaccaaaaaaaaaaaaaaaaaagcaaataagaaaaagaaaaactactattcagtaactgaattttacctttcaagccttttgtcatttactctcatttctttttactttcattcttgccagactttcactctgggcagaagttgtaattttgcagcattttaccgttctgcactgcaaatgaggaagaaagagaatgacagagttcagtgtcatttttttaaataccaaaatgtatggttgtatgtgtgagagagacgttgctaagattttcgtttctggagaaatgagaattgaaattgaaagcaaggccaggtgtggtggtttatgcatgtaatcctggaatttttttttttttaagtgacagcaagtttattaggaaagtaaagcaataaagaatggctactccataggcagagcagccaatcccagcacttcgggaggctgaggccagaggatcgcttgagcccaggagttcaagaccagcctgggcaacatagggtgaccccgtctctacaaaaaatttaaaaattagctaggtgtggtagcctgcacttggggttacagctacttggaaggctgaggttggaggactgcttgagcccaagaaattgagactgtagtgagccatgctcatgccactgtactctagcctgagtgacagcaagaccctgtctaaaagaaaaaaagaaattgaaagcagtaaggcagaaaccttaaaaatggaaatgtatgctarcaacttactttgatctgaggagtacagaaaattgaaaaaaaagtatctaaaaaaatttagctgttggtataaggaattctgggaataataattgaatatttaaaatgtaaatcacatatgcaaagaggaatcactagcaagatattccatggactttgagaatatatggttttgaataaccaaaaatactttttcatacaccttctatttgccaggcatagctaactttagacctagggcctaattcagtacaccccaatccttaggatatccaggactaaatcttaaaggggctttcttcccatatagacctcattatcttaagaaattgatgttttatatctgatttttggggaaaggcaaggttagtctacagtagaattttaaagtgggtaaatttgtttatttgattctttttaaaaacatttttgacatgatatatctgtagaaaagtaggtaaaagctaatgtacagtttgaagaacagttttaaagttgacatctttataaccattatccaggtcaagaaatacgacatcatcattccagaaatccctgttcgccttctccaatcactatatcttctttcctacgttactactccgctaggggtaattactcccattcttttgtgataataattttcctgcttcctaaaaattgtttgagcatacatgaacatacctctaagtataatttagttttgtctatttttgaatgttatataagtggaattacattgtttgccttttttcctctcgcttcttttacttaatacatttatgaaatttgtccatattatatgcagctgtagcttattttcagctatatagtattgaattttgttttttaaaaatattcttttttttgagacaggatttcactctgttgcccaggtaaagtgcagtggcgcagccatggttcactgcagcctcaacctcccttggctcaggtgatcctctctcctcagcctcctgagtatctaggaccataggccaccacgcctgtgtgccaccaggcttggctaatttttgtattttttatagagacggggttttgccatgttacccaggctggtttcaaactcctgggctcaagcgatctgcccatctcagcctcccagagtgttgggattacaggcttgagccactatgtggggcctrtagtatttaattttattcgtctatcactgtttgtccattttatacctttaattgatttttgagtgatttccaatttagttgcttatgtaaacagcattgctgtgaacataaattcacccgcatacatgcaaaagtttctgtaggaataagaagtaaaattactgggaatgcttatgatgcctgttttccaaactggctttccaattttctctccccccagtgtaatcaagctctcattaatctatgtctttgccagcatttagtagtgtctggctttctcatttttgtcattctgctgagtgtttactatttttttgtttaatttgtatttccccgctggctaatgaggctgtgttccttttcatatgtttattagtcattttgatttttgcaaagtgcccacttgggtccttttgcccattttcctctgagccatctgtcttctctcactgcatttttaatgtagcttttcgctgaagtacctactcaagtttgcttagcttttgaaggagagactggagttctaaaagcaactctttttccttttatttctggggtcagctgtcagtgcagttatcctcaggtggtagacagaaactaaccagattaaaccaatgttggaaaatagagggtattcttaaacagggtattggactaggtgacctccatttaaggtccgttgacatatttgtcatttgactctcagcatgcctcacattaaccaagggcacagaaactgacatataaaaccaaaatgccaaaaattttaatttgcagaaagaaatgtaatcattaaggtaattgaatttagatcagtttattctttatttggttcgtaattctcaaccagtggaaggaagtcataagaatgtctgagagctaaacagtttgaacacatggagatagagtgtggaaaaatagataacaataactgggaagggtaagaggaggggaagatgaagaggagtgagttaaagtgtacagatatacaggaagcttgaagaaataattcagtgttttatagcaaggtagaatggaaaaatacattgtactcaggtgatggacaccctgaatgattcgattactgcatattatatacatgtacaaaatttctcatgtattccataatttgtacacacaagaaagaatctcaaggattcgggtgctttttaaaataacaatcccttggaggttcaaatatgtgggatgcctcatagttaaaagtcatcaccctagtgaatcactgttaactgttgggagtatactgaactctttagttaggttgcagagaagttgaaaaacattgctttcgtatataagacaagacaatttataataaggttgtctgttgagcttggaatcagagcccagagggattagttaaatcatgttaatcagactgtgtcatcagactgtgatgcattaatacatttgtcttcattttaagacttaatggctttctgaatctgatatccatgtttatgggatggggcattttctttccatatacttgattcagaatgccaaactggccattctttataactagcatgcaggtgatcctattattattaacatattcttttatcaggccgtttattgtaatctggtcatgtcttcatgatgttacaatttgattacctttgttagagtttggtgcacattcttggaaggtagcttcagcttttttgtgtgtattggggactgctccgttgttaattctctgtacttctgtacagagggggtagtatttttgagatatagttgtggaatatgaggatggttgggtgggtggcttccctgtatctttggatattttcttccactaaactcaagaagtgagattttatttcttcatccagtagtccttcttccccagactcatccttgatctattccttgaggttatagtatgaatcacccactattcaaatgtcaatttttcttagaatgctgttagtgatgagaagtgactgttttcagacctaaccttggcaaggtcagtcctactttgatgttcttgtttcatcacacttcttggcatttgtagatttggaagaattgggcctttggtacctctgatctcttcgtttagcaacttactgtgcacccatatgcttagcttttgctgttttagctttttttttttttttttaacctgccacctagtggccgaaatgttgctatactattgataaggtactcctaattttggcaaaatagtaagaggcaaagcaccaaagattatgttctctcccttctccaaatctctcttggtgagaatgatctttaaaacataccactcagattattagcaatcttggtatggaacgtttttaaaaataataataatgtactttatgtggtgatttatgttattatttaggcccaaagttttgatttaattgtttccttttagcttatttttgagatatgcagtctgttaggaagctgtctctgtcttgttttttcattgagctgaattcttttggaggatcactattattgtgaagtactattttacttttaattaaaaaaattaagatatttttatttttaatttacagataaaaattatatttaattttatattatatttatatataaatcatatgtaatrtaaattatatacataagttatatataatataaaaattatatacataatataaattatatataatataaaaattatatttatggtatgcaacatgatgttttaaaatatgtctacattgtggaatggttaaaccaagctaattaacatacgcattacccgtactattttacttttatccaatacttcttaccactaataagccactgaaaaactagtaattgtgataaagaaggtgtaaaccatacttatttatgacagaacagcatattttttacttttaataagtcattctttttttttttttttgagacggagtctcgttctgtcgctcaggctgaagtgcagtggtgtgatgttggctcactgcaacctctgcctcccaggttcaagcgattttcctgccttagccttccaagtagctggagctgggattacaggcatgtgccaccacgcctggctaatttttgtaattttagtagagatggggtttcaccatgttggccaggctggtcttgaactcctgacctcaagtgatccacccatctcagcctcccaaagggctgggattacaggtgtgaggkctcttttttttttttttttttttttttaagacggagtcttgctctgtcccttagtaagtcattcttgaaaattagttaagaatgcttgataaagcacttccacttgtaccttttgaatagatgtgataacttttgttggcttgtatttttttgagtcttgctttattgcccaggctggagtgcaatggtgaacctcagcccactgcagcctccgcctcctgggctcaagtratcctcccacctcarcctcctcagtagctgggactacaggcccacrccaacatgcccggctaatttttgtattttttatagcgataggattttgccaatgttgtctggwtttgtctcaaactcctgggatcaagcaatccgcctgcctcggcctcccaaagtgctagaattaggcatatgagtcaccatgcctggcctgttggctattttataattatcttgtttggtagactctgatcttttacagttgaacttaattcaactcttttgcaatgtttacaaagattagacctagaattaaaagataaatgattttatagctgaccttgatatttctatttttcacttaccttgacaataatctgtacttcctataacaatgaagtattctttcataaagtgaaaatggacatatattatagagaacagaataaatgttattcataatcctaccactctgtatgtatcttttacatagttgaattaataatgtaatatattaaattttggtggaggtgatatgtaatttaaaaaatattataaagtaatacctgtttactgtttgaagttaaggaaatattagaaattatcaaaagaggggactaaaacttacctataaccttattatccagagataaccatagatcttacttgaaagaacagtatacagttttgtattttgtttcttccccaccccccacaatatttatatgtcaagagtctgagatccaactgcaaggcggcagtgaggctgggggaggggcgcccaccattgctgaggcttgggtaggtaaacaaagtgggctggaagctggaactgggtggagcccaccgctgctcaaggaggcctgcctgcctctgtagactccacctctgggggcagggcatagctgaacaaaaggcagtagaaacctctrcggacttaaatgtccctgtctgacagctttgaagagagtagtggttctctcagcacggagtttgagatctgagaacggacagactgcctctgcaagtgggtccctgacccccgaatagcctaactgagaggcaccccccagtagggggagactgacacctcatacggctgggtacccctctgagacgaagcttccagaggaacgatcaggcagcaacaattgctgttcagcagtattcgctgttctgcagcctccgctgctgatacccaggcaaacagggtctggagtggacctccagcaaactccaacagaccagcagctgagggtcctggctgttagaaggaaaactaacaaacagaaaggacatccacaccaaaaccccatctgtacgtcaccatcatcaaagaccaaaggtagataaaaccacaaagatagggaaaaacagagcagaaaagctgaaaattctaaaaatcagagcgcctctcacctccaaaggaacacagctcctcgccagcaacggaacaaagctggacggagaatgactttgacgaattgagagaagaaggcttcagataatcaaacttctccgagctaaaggaggaagttcgaacccattgcaaagaagctaaaaaccttgaaaaaagacgaatggctaactagaataaccagtgtagagaagtccttaagtgacctgatggagctgaaaaccatggcacgagaactacatgacgaatgcacaagcttcagtagccgattcaatcaactggaagaaagggtatcagtgattgaagatcaaatgaatgaaatgaagtgagaagagaagtttagagaaaaaagagtaaaaagaaatgaacaaaacctccaagaaatatgggactatgtgaaaagaccaaatctgcgtctgattggtgtacctgaaagtgatggggagaatggaaccaagttggaaaacacacttcaggatattatccaggagaacttccccaatctagcaaggcaggccaacattcaaattcaggaaatacagagaacaccacaaagatactcctcgagaagagcaactccaagacacataattgtcagattcaccaaagttgaaatgaagggaaaaatgttaatggcagccagagagaaaggtcgggttacccacaaagggaagcccatcagactaacagtggatctcgcggcagaaacgctacaagccaggagagagtgggggccaatattcaacattcttaaagaaacgaattttcaacccagaatatcatatccagccaaactaagcttcataagtgaaggagaaataaaatcctttacagacaagcaaatgctgagagattttatcaccaccaggcctgccctacaagagctccggaargaagcactaaacatagaaaggaacaagcggtaccagccactgcaaaaacatgccaaattgtaaagaccatcaaggctaggaggaaactgcatcaactaatgagcaaaataaccagctaacatcataatgacaggatcaaattcacacataacaatattaaccttaaatgtaaatgggctaaatactccaattgaaagacacagactggaaaattggataattggataaagactcaagacccatcagtgtgctgtattcaggagacccatctcatgtgcagagacatacataggctcaaaataaagggatgtatgaagatctaccaagcaaatggaaaacaaaaaaaaggcaggtgttgtaatcctagtctctgataaaacagtctttaaaccaacaaagatcaaaagagacaaagaaggccattacataatggtaaagggatcaatacaacaacaagagctaactatcctaaatatatatgcacccaatacaggagcacccagattcataaagcaagtccttagagacctacaaagagacttagactcccacacaataataatgggagactttaacaccccactgtcgacattagacagatgaacgagacagaaagttaacaaggatatccaggaattgagctcagctctgtaccaagcggacctaaaagacatctacagaactctccaccccaaatcaacagaatatacattcttctcagcaccacatcgcacttattccaaaattgaccacatagttggaagtaaagcactcttcagaaaatgtaaaagaacagaaattataaaaaactgtctctcagaccacagtgcaatcgaactagaactcaggattaagaaacttactcaaaaccgctcaactacatggaagctgaataacctgctcctgaatgactactgggtacataacgaaatgaaggcagaaataaagatgttctttgaaaccaatgagaacaaagacacaacataccagaatctctgggacacatttaaagcagtgtgtagagggaaatttatagcactaaatgcccacaagataaagcaggagagatctaaaattgacaccctaacatcacaattaaaagaactagagaagcaagagtaaacacattccaaagctagcagaaggcaagaaataactaagatcagagcagaacggaaggaaatagagacacaaaaaacccttcaaaaaatcaatgaatccaggagctggttttttgaaaagatcaacaaaattgatagaccgctagcaagactaataaagaagaaaacagagaagaatcaaatagactcaataaaaaatgacaaagggagtatcaccactgatcccacagaaatacaaactaccatcacagaatactataaacacctctacgcaaataaactagaaaatctagaagaaatggataaattcctggacacatacactgtcacaagactaaaccaggaagaagttgaatccctgattaaacccataacaagctctggaattgaggcaatagttaagagcctgccatccaaaaaaagtccaggaccagatggattcacagccgaattctaccagcagtacaaggaggagctggtaccattccttctgaaactattccaatcaatagaaaaagagggaatcctccctaactcattttatgaggccagtatcattctgataccaaagcctggcagagacacaacaaaaaaagagaattttagaccaatatccctgatgaacatcgatgcaaaaatcctcagtagaatactggcaaactgaatccagcagcacatcaaaaagcttatccaccatgatcaattgtgcttcatccctgggatgcaaggctggttcagcatacgcaaatcaataaacataatccagcatataaacagaaccaaagacaaaaaccacatgattatctcaatagatgcagaaaaggcctttgacaaaactcaacaacccttatgctaaaaactctcaataaattaggtattggtgggatgtatctcaaaataataggagctatttatgacaaacccacagccaatatcacactgaatgggcaaaaactggaaacattccctttgaaaactggcacaagacacggatgccctctctcaccactcctattcaacatagtgttggaagttctggccagggtaatcaggtagtagaaggaaataaagggtattcaattaggaaaagaggaagtcaaattgtccctgtttgcagatgacatgattgtatatttagaaaaccccatcgtctcagcccaaaatctccttaagctgataagcaacttcagcaaagtttcaggatacaaagtcaatgtgcaaaaatcacaagcattcttatacaccaataacagacaaacagagagccaaatcatgagtgaactcccattcacagttgcttcaaagagaataaaatacctaggaatccaacttacaagggatgtgaaggacctcttcaaggagaactacaaaccactgctcaatgaaacaaaagaggacacaaacaaatggaagaacatttcatgctcgtggataggaagaatcaatatcgtgaaaatggccatactgcccaaggtaatttatagattcaatgccatccccatcaagctaccaatgactttcttcacagaattggaaaaaactactttaaagttcataaggaaccaaaaaagagcccgcattgccaggtaaatcctaagccaaaagaacaaagctggaggcatcacgctacctgacttcaaactatactacaaggctacagtaaccaaaacagcatggtactggtaccaaaacagagatatagaccaatggaacagaccagagccctcagaaataataccacacatctacaaccatctgatctttgacaaacctgagaaaaacaagaaatggggaaaggattccctatttaataaacggtgctggaaaaatggctagccatatgtagaaagctgaaactggatcccttccttacaccttatacaaaaattaattcaagatggattaaagacttaaatgttagacctaaaaccataaaaaccctagaagaaaacctaggcaatactatttgggacataggcatgggcaaggacttcatgtctaaaacaccaaaagcaatggcaacaaaagccaacattgacaaatgggatctaattaaactcaagagcttctgcacagcaaaagaaactaccatcagagtgaacaggcaacctacagaatgggagaaaatttttgcaatctactcatctgacaaagggctaatatctagaatctacaatgaactcaaacaaatttacaagaaaaaaacaaccccatcaaaaagtgggcaaaggatatgaacagacacttttcaaaagaagacatttatgcagccaacagacacatgaaaaaatgctcatcatcactggccatcagagaaatgcaaatcaaaaccacaatgagataccctctcacaccagttagaatggtgatcattaaaaagtcaggagacaacaggtgctgcagaggatgtggagaaatgggaacacttttccactgttggtgggactgtaaactagttcaaccatgtgtaagacagtgtggtgattcctcaaggatctagaactagaaataccatttgacccagccatcccattagtgggtatatacccaaaggattataaatcatgctgctatacagacacatgcacacatatgtttattgcggcactgttcacaatagcaaagacttggaaccaacccagatgtccatcagtaatagactggattaagaaaatgtggcacatatacaccatggaatactatgcagccataaaaaaggatgagttaatgtcctttgtagggacatagatgaagctggaaaccatcattctcagcaaactgtcgcagggaaaaaaaacaaaacactgcatgttctcactcataggtgggaattgaacaatgagaactcttggacacaggaatgtgaacatcacacactggggcctgttgtggggtggggggaggggggagggatagcattaggagaaatacctaatgtaaatggcgagttaatgggtgcagtacaccaacatggcacatgtatacatatgtaacaaacctgcacgttgtgcacatgtacccaagaacttaaagtataaaaaaaaaatttatatatcagggcaattaaaatcgttgttaaaaatttactgtaaatgatttttaacagcagcctaatttattgtatgcatgtactattatttacttaatataaatgcctaataatagtggaatgataacctattcgcttagccttgtgataaatacctttgtggttaaatttgtattctagattatttcttttttttttttttttttgagacggagtctcgctctgtctcccaggctggagtgcagtggcgccatctcaacttgctgcaagctccgcctcccaggttcacatcattcttgtgcctcagcctcccgagtagctgagactacaggcgcctgccaccatgccccgctattttttttggtatttttagtagagacagggtttcaccgtgttagccaggatggtctcgatctcctgaccttgtgatccacccgccttggcctcccaaagtgctaggatcacaggcgtgagccactgcgcccggcctagattatttctttaaagtaaattttcaacagtggaattaattgggccaaaaggtacaggttttttttttcccacaaatgtagctaaactgctttctatctaaccatgttctaccaatttgtatttaatgtagtttcactctgacacattcatattttttatctggatagtttgcagaggggagaacttgataaaattaacattcagtttggtaaagatgatgcacagtattttttagattttttttttttttttttttttgagacaagagtcttgctctgttacccaggctggagtgcagtggcacaatcttggctcactgcagcctccacctcccaggcataagcaattctcccacctcaacctccggagtagctgggattacaggtgcacgccaccatacctggctaatttttgtattttttgtagagacagggtttcgccatgttgcccaggctggtctggaactcctgagcttaagtgatccgcctgcctcggactcccaaagtgctgggattacaggcctgagctgcctcacctggctggataaatttttaatattcttaacatttataattgcatacaaaaaaccctagcaatttgtctcaaatttcacgcataggatcaaaagaaaatgttttatatgactcataagttatcctgaggaaccagataatgataccctggcttactgttaattttctaatttgttacactattaaactaagagacaataacatcttcatagctgaaaattctatttcagatttttgattcagtttgaatttacatatttgtatttttagaactagtttattatttttttgttaggtgatgaatcaagattggttctctaagttattttaatatagtaaactttgaaattgctttgggcaagagagattatatttattgagaaattaaaataaaaggaggtatgtggtcttttttagttaatttttttgttgtggcaaaaatataaaatttatcatctgaaccatttttaagtatacagctcagtagtattataagcatatttaggtcattatgaacagatctccagaactttagcctcctgaaaagatccagagacccctggagcttctcctactatactttgaagaacctctatcttagagaatatattacttcatctggaaaagacagactcacagagaactctagaaatatagtcttttaaaacatatcatctaaaagattaataattctttttatcatcttatccggtctgtgttcatatttccccattgtctaataatgttttcgtaattttttgaaattaggagccaaaccaggttcacacacgttacatttggtggttgatataccttttattttttttttaaatttatttttctgagatgaagtcttgctctgtcacccaggctgaagtacagtgcatgatctcagctcacggcaacttctgcctccccagttcaagtgattctcctgtctcagcctcccgagtagctaggattacaggcgcgtgccaccacgcctggctaattttttatatttttggtagagacagggtttcaccatgttggccaagctggtcttgaactcctgatctcaggtgatctgcctgcctcggcctcccaaagtgttgggattacaggcgtgaaccactgggcctgcccttgatatgccttttaaattttaatctattgattgtctctttgtttataatttatttgttgaagaaacagggtcatttgttctacataattttcctcattctggttttggctgagtgtatctctggtaaaatttaacatgtttttcagttctctgtatttccagtaaatttataggtagagacaggcttgattagatttactttcaattcttttttggcaagattcctagttggtgatgtgtatttctttacatcaagaagatgtgttttgtgatgttaaaatcaaacagattagctgttgtcagattgattcatccgttgtaaaattcccaattaacttttctctaatgatagcatctattgctaattgttgcctcattgcagtatattagtaggtgttgtaaaaggtgatattccttctccagccttctgaatttattggctgggattcttcaggaaagaagacctcttcctcatataccactttattaccctgaaagtatttatacaggaaaggccaaaataaaatgggactttttttttctttttacctacatattcccagaataattaatttgtgccttaggagcctcaaaacatgactagagttttgtttgtttgtttagaattataaactcatggatttttgcctcccattcattttcgatgttcaaattattctttctttgaccagtggcagcttatttatgttggctcctttgtccttggcacaatcccagtggtctgtagtagtttcctaaaatatacaagatgaagctcatcttgtatattttcttccccagatttagaatcagaattctaattcctttcagtgggaaatggtatttagagattataatctgggtgatatttttgtatattcctacaatgttgtcattgtttataggccttttgatggacagaactaggaaaactttatagaaagagaaaaataattcatgtgttccagatgctatttcttttttttttttttttttttgagacggagtctcgctctgtcgcccaggctggactgcggactgcagtggcgcaatctcggctcactgcaagctccgcttcccgggttcacgccattctcctgcctcagcctccccagtagctgggactacaggcgcccgccaccgcgcccggctaattttttgtatttttagtagagacggggtttcaccttgttagccaggatggtctcgatctcctgacctcatgatccacccgcctcggcctcccaaagtgctgggattacaggcgtgagccaccgcgcccggcctgctatttctaactcagataaaagatgataagagtttttacttcattttaaaatttacatttgtatttttcctcaacatgtaaaatgtggttctaacaataagattattgaattgcaaaatctggggcaggaactattgtattatattagaagattggagggttacaaatacaaatgcctaaaggggccagacagccaaatgaatatatcaggcctgttatgaaaatcatccgggaatggtggggattaataagccagagagcatatatcccatctaaaggaggcatctgtgacttgattctagctgatttttgccaagagggaatatgggcatggtactgcttggttttttcatttttaaaaagaagacgtaatccctgcactttgggaggccaaggcaggcagatcatgaggtcaggagatggagaccatcctggctaacacggtgaaaccccgtctctactaaaaatgtaaaaaattagttgggcatggtggcacgcgcctgtagtcccagctacttgggaggctgaggcgggagaattgcttgaacctggtaggtggaggttgcagtgagctgaratcgtgccactgcactccagctggggcaacagagcaagactccatctcaaaaaagaaaaaaaagaagatgtaaatccaaatattttatgtgaaattatttagcttttaaatattgacaatactattgacaaactaagtcaaagttttaaaaaggacttttggaccaaacaatgatttcttccataggttattagtttgtaacctcttgtgagaaagatctaaggattttccagacctcagacaatctgaaaaatatattgggaaagagtatgagaaagggaacttaatcatcttggttttgctgatcatgattacatttatttatctgacttttattttttagccttaaaaattaaaatagccctattgaccattaattttgctttttatttctttttgcacattcaaaataggaacttacaatgtctcagaaaaatggtgggaatgttcttcagatgatgtatgagaaacctgaacgatggtcttttaccttccaaacatatgcctgtctcagtcgaataagagctcagcttgcctctctgaatggcaagctcaaagatgcagagaaacctgtattattttttgaacgatctgtgtatagtgacaggtatgtataaatggcttgtacgtggccatttgaagtttttatcttagaactggactttttttttttttttaatgtttcctgggaattagtaataatgaatggctgagctggggatttaagatggaaaatgacatttaaatccctcagcagtctggtactaatggcattagggaagttattgcatttataatcctcagcttccatagaaactgttgggaatatggtggtgcccatttcatttaaatttgcagagaagttgtttttccctctaacccttttaaaattctcatctgctctggttaaatctggatctatatcctagactcttacctggatcaagaagataaaagtctctaaggggccttagaattgccctacttatgctaggattcttttgacctccaaagttagctcagaacagaggttctcaaacatttgatctcagggcccttttcaattcttaataactatcgaggtgtccaaagagcatgtcctattgatacttaacattactrgaaattaagatgcacaaaaatgatttaaaattagcaataataaattcattacatattaatataaatacatttgacaaaaagttatattttctaaaataaaaagtagctagaagaatatcattgctttacatttttgcagatatctttaatgcctcacttattaaaagacagctggatttttatttatgcttctgtatttaatctgttatggtatgtttgtttgtttgaagtatattggtatatgaagtaatctggcctctcacagaaccccttagaagatcttggggacttaatggggtcctcactccgtattttgagaaccattggccaaaaacatgatggaaagactcttgtctttttctgctttccacggcactatgtgccactggatttaggagaatgtttcatgttcctgttctcttttttatttctttgttgtttttttttgaaatgatacatgtgttgatgaagactctcttttaggtatatttttgcatctaatttgtatgaatctgaatgcatgaatgagacagagtggacaatttatcaagactggcatgactggatgaataaccaatttggccaaagccttgaattggatggaatcatttatcttcaagccactccagaggtaaaacccaataaaaatgtgtttcactgaaaatttaaagaaatatttagaactcttttcagtggtatataatgagggcaatttagtttaactccagcctcccaacctcccactccccacctctaaattagaaacttgtaactgtgtagatagaagcattcttttttctcagcaaactggaatcccagactgggcaagttgctgttttaggctctttgtgcttcctcaattcttttttattttactcattatttctttctaacatttgcagactcttctcattcatcacagttaaagtaatgaatgtggtcaagcaactcctagaatataggcttcatgaggtgggaccttgggcattttgattactattgaatttccattgcctagaacacccagtgctgggcactgttggagcatatagtaggagctcagtaaatatttactgaatgaatggcaatgttgatggaggtccatatcaagaaatattttattatggttgtttgtgccttggaatgagtggataatggcagctatcgttgggaaaagacttagaggacccttgccattttccattaagggagctcacttgaaaaggtgctttttgtgataggttgtaacatagctattctagttacatatgatgttatataatgaatacaggatgaccaaatagatgcctttcataaaactaacctaaatattaagatcttacatttaatcagaagctttctggttttggtgcgtgcatttctattgtttctgttttttaattctcattttttccttaagtcacagggtaggcactgatgaatgtaaatgttatgacttctggcctaaaattagaatactgtgttgctgtcgaagctgggttttcaaagaaattaggtttcctattccaacggatgattttgttcttcattaagtaaagattttgttcttcattaagcaaggatttagcaattttttagcaatttcaaaagtgaattttgaaattcacttttatttttgaatttttttgtttttaattacaaaaatagtaaataaaaatgtgaaaaagaacataaggaatatgaataatttcattttgcttgaaacatttatagtcactattaagctagaatttagcaaatataataattttgaaattcacttttatttttgaaaaggtttcttaaagttatgaaaatagtacaaacaccaaaaacataaataatactaataatttcattttgatactgataatttcatcagtattgtttctgatatctttggatgaaaggattgtttaattattgaaaagagaatttagagtagagtttgaaacacagtttgtatgctgccatggtcttatgcatgtcatttaggttggaggcttttatttcttggaatgcatgaagagtttctcatggtatatgagcccccacaaattatacgaaattttttatgtatgtgtgcttttgggggaccgttatctagagctgcactgtccaatgtggctatttaaatttagggttattaaaattaaataaaatttagatatttagttccttggtcaccacactagccatatttcaagtgcttaaaaaccacaggtggctggtggctaccttatttgataatgcagatataggacaggcataaaacattccaaagttgttttggttgtgctgatatagagttttcatcacattaagaaccactgtctttagtggttttatgtgaactgaacatagatattttgtaatcaaggttggttaacagcaaagtaagattatgtttatagattggcataccttttagctgttgtctctgaacattttaagtagatgtttaatttttttctcctttttatcaaacttagtatatttcatgtgtggatggataccaaaaatttataggcttatttttgaaagtactgcttggcttagagccaccaagtggctgaaaagctcatggagggaaaaatgaattatttcagcttttaagaagtaataagtagagattttggctagcgtgagtagagagacacagaaaagaaaattttgatggcagcagacaagaataattgttccctgcctttttcttccatctcttattacttgcttttagacatgcttacatagaatatatttacggggaagaaatgaagagcaaggcattcctcttgaatatttagagaagcttcattataaacatgaaagctggctcctgcataggacactgaagtaagacttatttttatttactattcattttaaatacctttgttacctttgttaaattttaatctaaaatttggaagatatgactagcaatatgtaaaatttccagtcgttttgcttattggtatcttccagaactaggtatagattttcattctcttgattgcaatgagatcctatttacttaaagtttttataactagtatcccttggtggtattgatagcgtaatatgtgaaatttcactttaagtgataaagtaggaatatatctgaacattatttaggtactctttcagaaagaattttgacttgggagattgtatagcgtggttgttgagaggatagactttgttattagtcagatcttggctcaagtccagtcttactggygtgtgaccttggatagcctctgagcttcagaatgacaattctgagctttagttttctcatctttaaaaatgcagaaattcctactttattgactgctayttgtttttgaagagaatcatatgttacagtacccagctgtatatattttgtacctaagtttttgggctccatatggtaaatctagatgagaaagaaggggctgccagatgaagtactgcaaagtaactttagtgtaaatgattgacaacattttgattttccaaggacatacgaatgaatttttaatgtttctctcttttttttgttgaatttctgattattttattaatctctctttttaaacagaaccaacttcgattatcttcaagaggtgcctatcttaacactggatgttaatgaagactttaaagacaaatatgaaagtctggttgaaaaggtagatttagacagactacaaacaaatatttgttttttctwaaaaagtgtactgagtggtgagaaaacaattttctaacagaaaagcttccataaagttacattaagaaacagttaagagctttagaagattttggwctgtttaagattccagtcctgactaaattctagctttgtggcctgagctaaaataaagatccttcggaatctcagaatctgacagatcttagaaaaaaattaaataaataaaaataaaataaggatttttttttatcctttagtgcctctatctgtaggataggtaaaattataataacaaaaattctttctcaccccctttttctctgctttgtccccatttcttcctctcttccctacaccaccaatctttagatactttaataataaactgcttgtgaaattaaatttatctttttcaactaaattcaatatggaggatatttaaagttacaggatatggatctcatctatttttatgttggccaaagtcttgagattaagggattttagttttgagtttcatttgggatcatgtcaaggattaattgacattacttaatcattgagtcattgtcttaatcacagttcatttattgcccaaatcactgggagttgactrtattctgttaagtgagtggtgcccatattgataaagggaatgggtgagaatttattgatgaatatttgagagagaatagtaagggaattggtataacaaatatccctatacccatgttgataactgagtgattaagctataaagaagaaagcacaatttggtttagttttgagaaaaatttgatttttcctttcttttgtggcataatgtctgctgtttaatagagacttgacattcataagggatatatcaaggattttgaaaatcttgacattttatgtaactactgtagcgtatacatgtagttgtttttcccatggtatgaactaaagcttatctggaaaattccaatgacctcttcatactactaatgatgttaaaaatataggataaattcacttacaatactattaaatgaaaagtcagcattaagtattaacagccaaccatcaatttaactgactttgtaaatcactttttaattttatctaacacttctttgttttgactaagaatcatttcacattattatatttacttttattaataatgctagcagttgactttcttattaaggtatttttacaaggcaataatttttgtttcttgagaattattgagtagcctagaatatgtagagaacaagcatattcttacattatggtcagtaggctaggttcattgactccttacatgattttctgcacacactgacattgcaaagtatgtgattcacatatgtgcttcagaaayatgacaaatctactacatgtttgattttcaaagttgcttgaactattgtgcttattaatgttatcagtgttaaagctgcatatgtcagtggtctatgatatttaaatgaagagattataaaattggtgttacagctattttagaactatatctatcttagattgatagatgcagtggctcacacctgtaatcccagcactttgggaggctgaggtgggaagactgcttgagcccaggagttcctgaccagcttgggcaacatagtgagacctcatctctataaaaaacaaacaaaaactagccagacatgatggtgtgcacctagccaggagttcaaggctgcagtgagctttgattgcaccactgtactcagcctgggtgacagagcaataaataactcctaaaatgaccttttaggtcattcatcttttactactgaagtatttaacaatatttcttttttttttttctcgagacagtcttgctccgtcgcccaggctggagtgcaatggcacaatcttggctcactgccatctccacctcccaggttcaaccagttctgcctcagcctcctaagtaggtgggattacaagtgcacgcctccatgcctagctaattttttttttttttttgagacggagttttgctcttgttgcccaggctggagtgcgatggcgcgatctcagctcaccacaacctctgcttcccaggtttaagcgattcttctgccttggcctccctagtagctgggattacaggcatgtgccactatgcccggctaattttgtatttttagtagagaaggggtttctccatgttggtcaggcaggtctcgaactcctgaccgcaggtgatctgcccgcctcggcctcccaaagtgctgggattataggcatgagccactgcgcctggcctatttttgtgtttttagtagagatggggggtttcaccatgttggccaggctggtctgaaactcctgaccttaagtgatccacccatctcggcctcccaaaatgctagaattacaggcatgagccgctgcgcccggccttaacaatatttctttggaaagtaaatgcaatggcattgtggtagttacttatacagctggggtcttcaactattatatacttttaaatgaagatgaatattagatacctcaaattagtcaaggaattatactgatttttttttcttcctttcctcaggtcaaagagtttttgagtactttgtgatcttgctgaagactacaggcagccaaatggttccagatacttcagctttgtgtatcttcgtaacttcatattaatataagtttctttagaaaacccaagtttttaatcgtttttgttttaaggaaaaaagatttttaaaatgaatcttatgcaaaactttttgaycagtttcttttcttttgttttttttttaaaaaagacatttaaagacaaagacattatttctcatagcaggaaatgtagaggtagatggttccagtatcagcatagtgactaaactacattataaaagatccagcttccttctgtcattcccctcttttgtcttcctcagcaggttggcttttttccctggtgcctctcacttcgttggtgaccagtttcttaaactgaaagctttaatgttacatagtaaatggtagtgtgtcctgtgtaaattagtgtacctattaaaagttgcaaagtggaattaaaggaatccctagaataaggattctgaagttttattttaaattattatcttcttaacagtttagtcccacctcttacttcctgcctcagtctgctttctctactgtctggattaattaggcagcctgctataaagttaaagtcacacatttctattttgcaaacactgtgattactctttgctttgtagtttgctttgctttgtagggttctgcttttaagtttttctctttttcagacaaattactgataaaaatgatattgctctatatgtaatatatcctgaaagcattattttttgttgaataggaaataaaattaatgaagacagaggctagaaagcatccattaattaatgagacacacttaactacttatctctaaaccatctatgtgaatatttgtaaaaataatgaatggactcatcttagttctgtatataaatatattttctttctagtttgtttagttaaggtgtgcagtgtttttcctgtgtattaaacctttccattttacgttttagaaaattttatgtattttaaaataaggggaagagtcattttcacttttaaactactatttttctttccaagtcatttttgtttttggtttcttattcaaagatgataatttagtggattaaccagtccagacgcactgatctttgcaaaggagacttaatttcaaatctgtaattaccatacataaactgtctcattatacgtatgcatttttttagtttgtttttgtttggtataaattaatttgttaattaartatttcttaagtataaaccttatgaactacagtggagctacactcattgaaatgtaatttcagttctaaaaagatgtaataatcattttagaattaaaatttattctacttttaaataaattatgaatattaaaggtgaaaattgtataaattactttgattccattttaagtggagacatatttcagtgatttttagtaacctttaaaaatgtataatgacttttaaaatttgtagaattgaaaagacgctaataaaaatttattatttatttgtcatgactcaaaagttgtctcagtgtggtggtcataatagaattgagcctaatggtggtctggattatctcttggatctattacctatatcatgtcttccattagaatttatttattgctctttatagtttgctctcctagaaaggtaattaataatacaagacttatttttctcatccagaattttctcttctgctatgcctaaaacttgaaacttataccgagccacctagaacttaagtctgtcatatgttaaagaacagagttgtaaaatgtttctaaaatagagatatagatgttattgcctttgaaaaatgctagatacattgcaacattaagtctggtaaataatagccttcttcatttgactaacttacctcttcttttaattttttttttttttttgttttgagagagggtcttgttctgttgcctaggccggagtacagtggcgcagttatagtttactgtagtcttaaactcctgggctcaagcaatactgcctcagccacttaagtagctgggactacagggctttcaccaccatgatggctaattttttaaaattattttttgtatagatggcgtattgttgtccagtctggtctcaaactcctgggctcaagtgatcatcctgccttggcctcccaaagcgctgggattacaggcacgagccattgtgccctgcgctaaaagctttttttgaaatagctttagactcataaaagttgcaagaatattacagagttcctgtttacctgtcactcagttatttcccaatgataactttatttaacaataatattttatcaaaacaattaaatttggtgtactactattaactaaactacagacctaatttggattttaccagttttatgtcttactttaattcataaactttaaagcatctttggctggctcttttttcggactcagcccgcctgcacccagatgaaatagccttgttgctcacacaaagcctgtttggtggtttcttcacacggacgcgagagacatttggtgccaaagacccgagtcagagggactccttcgggagaccagtcccctgttctcaccctcactctgtgaagagatgcacctaccaccttgggtcctcagaccaaccagcccaaggaacatctcaccaatttcaaatccggtaagcggtcttttcactctcttctccagcctgtctcgtcaatctccctgtccttccaattccagttctttttcctctctagtagagacaaaggagacacattttatccatggacccaaaactccggcgcctgtcatggactcaggaagacagtcttcccttggtgtttaatcactgtggggacgcctgactgattattcacccacatttcattggtgtctgatcactgcagggagcctgccttggtgattcacccacattcccttggtggcaagtcaattgcggggacgtctgctttggttgctcacccacattgcagccccgggctgctcgcccacccccttccccgtgtctctacctttctctttaaacttacctccttcactatgggcaaccttccgccctccattcccccttctcccttagcctgtgttctcaagaacttaaaacctcttcaactcacacctgacctaaaacttaaatgccttattttcttctgcagtaccacttggctccaatacaaactcaacagtagttccaggtggccggagaatggcactttcaatttgtctatcctacaagatctagataatttttgttgaaaaatgggcaaatggtctgaggtgcctgatgtctaggcattcttttacacatttgtccctccctagtctctgctcccaatgcgactcatcccaaatccttcttctttctctcctgtctgttccttcagtctccacaccaagctctgagtcctttgaatccttttctacggactcatctgacctctccccttctacccaggctgctccttgccaggctgtgccaggtcccaattcttcctcagcctctgctcccccaccctataatctttctatcacctcccctcctcacacccggtctggcttacagtttccttccgcgactagcccttccccacctgcccaacaatttcctcttgaagaggtggctggagttaaaggcatagtcaaagttaatgcgactcatcccaaatccttcttctttctctcctgtctgttccttcagtctccacaccaagctctgagtcctttgaatccttttctgcggactcatctgacctctccccttctacccaggctgctccttgccaggctgtgccaggtcccaattcttcctcagcctctgctcccccaccctataatctttctatcacttcccctcctcacacccggtctggcttacagtttccttccgcgactagcccttccccacctgcccaacaatttcctcttgaagaggtggctggagttaaaggcatagtcaaagttaatgctccttttttctttatccgacctctcccaaatcagttagcatttaggctctttttcatcaaatataaaaacccagtgcagttcatggcccgtttggcaacaacccttagatgctttactgtcctagaccccagaggaaggccgtcttattctcaatatgcattttatcacccagtcagctcttgacattagaaaacttcaaaaattggaatccggccctcaaacgccacaacaggaattaatcaacctcaccttcaaggtgtacaataatagagaggaggtagccagacagcaacgtgtttctgagttacagctacttgcctccgctgtaagacaacccacaaccatgtctccagcatacaagaacttcagaacatccaagccacagctcccaggggctccttcaaaacatccttgtggaccttgcttcaaatgccaaaagcctggcccctgggcctcagaatgcccggtgcccaagattcctcctaagccatgtcctgcctgtgtgggcccccactggaggtcagactatccgactcacatcgctgccgctcctaaagcccctggagcccaaacccaatgttccttggccgactccttcccagctgtcctcggcttagtggctgaagactgatgctgcccgatcgcctcggaagcctcctggaccatcacagatgctttgggtaactcttacagtggagggtaagtctgtccccatcttaatcaatacggaggctacccactccacattaccttcttttcaagggcctggttcccttgcttccataactgttgtgggtattgacgtccaggcttctaagcctcttaaaactccccaactctgatgccaacttggacaacattcttttatgcactcctttttagttatccccacctgcccagctcccttattagatcgagacattttaactaaattatctgcttccctgactattcctgggctacagccacacctcattgccaccttttcccccagttcaaagcctccttcgcatcctccctttgtatctccccaccttaatccacaagtataggacacctctactccctccttggtgacagatgatgcaccccttaccatcccattaaaacctaatcacccttaccccgctcaatgccaatatcccgtcccacagcacactttaaaaggattaaaccctgttatcactcacctgtttcagcatggccttttaaagcctataaactctccttacaattcccccattttacctgtccaaaaaccggacaagtcttacaggttagttcaggatctgtgctttatcaaccaatggtcttgcctatccaccctgtggtgccaaacccatatactctcctatcctcagtacctccctccacaacccattattctattctagataaacctagctgaccccatagatcctaaatcctttcgccactcctttccgttccttaaaaacagccctagaagctgctcccacagtagctctccctaactcatcctaacccttttcattacacacagctgaagtgcagggctgtgcggtcagagttcttacacaagagctgggactgcgccctgtagcctttctgtccagacaacttgaccttactgttttagcctagccctcatgtctgtgtgcagtggctgccactgctttaatacttttagaggccctcaaaatcacaagctatgctccacttactctctccagttcccataactttcaaaatctattttcctcctcacacttgatgcatatactttctgccccctagctccttcagctatactcactctttgttgagtctcccacaattaccatttttcctggccgggacttcaatccagcctcccacattattcctgataccacacctgacctgcatgactgtatctctctgatacacctggcattcactccatttccccatatttccttctttcctgttcctcaccctgatcacacctggtttattgatggcagtttgatcaggcctaatcaccactcaccagcaaaggcaggctatgctatagtatcttccacatctatcattgaggctaccgctctgccccctccactacctctcagcaagctgaactcattgccttaacttgggacctcactcttacaaagggactaggcgtcaatatttatactgactgtaaatatgccttccatatcctgcaccaccatgctgttacatgggcagaaagaaatttcctcactatgcaagtgtcctccatcattaatgcctctttaataaaaactcttcttaaaggcactttacttccaaaggaagctggggtcattcactgcaagggccatcaaaaggcatcagatcccatcactcagggcaacgcttatgctggtaaggtagctaaagaagcagctagcattccaacttctgtccctcatggccagtttttctccttttcattagtcactcctatttactctcctactgaagtttccacctatcaatctgttcccacacaaggcaaatggttcttggacaaaggaaaatatctccttccagcctcacaggcccattctattctgtcatcatttcataacctcttctatgtaggttacaagccattatcccgcctcttaaaacctctcatttcctttccattgtgaatgtctatccccaatcctccactcttgactccctcttggagtggatagatgatctttgctgacaggacacaccccaacactttcatcctgatcaagtcctgttctttacttttatactcttattctcgttcccattcttatgccaccctctacctctccccagctatctccaccacagtatcaatctcactcactgtctcctagccatttctaatccttctttaacaaacaaagccagcaggctttgcattcctctttcctccaaaatcgccgaggcctcaatttattcactgctgaaaaaggaggactctgtatatttttaaatgaagagtgttgtttttacctaaatcagtctggcctggtatatgacaacataaaaaaactcaaggatagagcccaaaaactcgccaaccaagcaaataattatgctgaacccctttgggcgctctctaattggatgtcctgggtcctcccaattcttagtcctttaatacctgtttttctccttctctcatttggaccatgtgtcttccttttactttcgcaattcatacaaaaccgcatctaggccatcactaatcattctatacgacaaatgctccttctaacaaccccacaacatcaccccttacccaaaaatctttcttcagtttaatctttcccactctaggttcccacactgcccctgatcccgctagaagcagccctgagaaacatcgcccattatctctccataccacccgtgaaaattttcactgccccaacagttcaccactattttgttttgtttttcttattaatatatgaagacaggaatgtcaggcctctgagcccaagctaagccatcatatcacctgtgatctacatgtatacatccagttggcctgaagcaactga

SEQ ID NO: 93551 - DNA, 12291 bp, Homo sapiens
aagctagaacatcccagaaacaatgtggctaagttagttcaattgttgcttatatcacataaatagtttgaccatgaaacacttttggagcaatgctagcagcctagaaaggattggcccaccaaagccaagcagctggcagcccaggcttggaatctggcactgcttgtgatctttaatgtgaggttaataaatgaaatctatgaaacctcctgtaccacttgtagaatgtatttgaaaaagaaacactgattatatattgttttcttcatgggagcccaagtgtgtatttgtatgtatttgtgtgttggggagaaggatgttgatctctcattttagtaatatttgtgcagctcttgaataagtcctttgtttatgagccttataaatgtagtaatttatgatagttttgtcttcatgatgcctaccagaatataaaaactcaaattatttacccatttctaggacatgtgaattcagcctatgttttgatactgatcttattcctagtttcatcttttttcctactattattttcatttggctcacttcacttgcttattgtaaacttatttattattattcatgtgcatactatatgtattatatatatcttttttacattcacaatccaaaattatttttaaatgtaagtatgattaatgagattgcaaaagatcaagaatatagattttgtatgttgaagataagccagcaataaaataaagtaaaattaaagtctcaagggacaacagaatgaaataatcaataggatttatcttggtagagccataggaaataaagaagtgatatcagagatgaaaaatactaaagacttttaaatttttaaaygtaaacaaaataagcaaagggtctttcacctctcaaattggcaatggtgtttttaaattctaagacctaatacttaagaggcagagaaacactctcatatactggtcacaagagagtgaggtaacgcagaaatcacatggaacaatttctaaagcaaatcgataaccttaaaaaaactcacgcttttttacctagaaatttcctttctgagaatttattctgaagtaatatgcataaaggtttacaaagatttagttttaagaatagtcattcaataattttttatgatattaaaaatatataaaacatcctagatatccaaggaattaacaaggcatcatatctaaatactatggaatactaaataaccatgaaaattattattataacataataacatcaaagaatgaaaataattagatattaagtgaaaatcaagttacaaaataacagatgctagcccctttatgttaaacatattactaaatatacatttcagatacatttatatatatatatgtttgtgtatatatacacacatatgtgtattaaaattatctctggattgtggtataagatttttatttttcactgtctgtatcaatactaaagataaacatttttaagcagttgaagaagctataacataagattcctgaaattgaatatgttcaaggataacttatcccacagccatttcatagaactcctagacactattttaggcattgtcctcttctcaggaacctatatcctaaggtaagtccattacatgtaacatctaatatagtatacattcttttcaatattaaatattctcttaatcaaaatcaacctcaggtgaattagtaacaaattaaaatgttttggggtgcaatgtggggccacacagatgagaacagtagagctgtctgggtagcagctaaagccaacctagctagcctctcctactgcctcagtgaagatgtgtccagccttagggggcaccatgtccaggcctctgagccccatctggccagccctgagtggaagtcagggtaccccttctgtagcctggggcatacttcccatccccaggctgaacacatttttctgacttccgtctccccagttgggtcttctcattgatagtgttaaaaactagaaccagatcagggagagatcagatctaaatctcaggagcccctgcccacctcccacctcacctgtggatatgctgctgcccccctgaatgagcttggacagatccagctatcagtagagtggtcatttgcatccaaaatgtgtggcctggggtggaggcagcctgaaggagttgggggcttcatcaagagccactcscattacrgttcagcacaactctcccacccttcaatgcttccctgtaccccaccccaccctgctcaacatgttcacacaattctctatgttccaaggatctttcccagtgagcctatcccatgaaaagatggccacacaccacattctgctttatgcctccttcaaagtggggaaacttgagcttctggagtgctatgctatgggtccatatcagtcagagcccagtcaagagacaaaagccacttagttatttaacaaagagagtttaataggtaactataggaatcaacttccacccatagggaaaaattgctctccctagggagaacaacaggaagaagtgggaattattaaaacttggaaccttgaagctgaggtcctgtggggctgggactcagatctctgaaagataagtgtttcttgtagatgattgtgtctctgaagtggacacagtgaggctggttctataaactgatggagaaattgcaaagtggaatcaactgctattacagaaatgagctgctgctgcaggggtgaagaagcattgctaaatgatactcaaagaaacaggaatcagataggagagcacaagtccttctttgggctttgaagtctcccttcagtgcctcttattggcagatcctaatagagaactggtggaaaagtggcaatatagttgtcacatcataaaggagagtagaaaagactgggttgggagcggagagaaaatatcccaataagtggcacagagtctgagcagcccttggcttcctctgaacttcttatccacagagattgctagcaggatatacctgggagaggctgaaaccaagggctcaataaagctttcggctcatggttattgctctgtggcttcctaactctggtaaggctgggaatcttacttgtttgcaagctgtcttccagaattgtaacccttcttctctagaaaaagctggcaaaatgcttacattttcaaagctcttactggagagctacatctggaaatcaaccagtgagactactaaattcttgtgatccagtcctatctcaagcaccagtgaggggattttgctaagcctgggataagtcataattaattgagccaacattaagctggaatgcaaggacatcaggaatgtgactctattagtgcacccattgcgaagttgtctctattgccaagcctatgggtattcctccataacctttgagggatcttttgtggcctatccctgcccatctctaagaaaatatttacctggggaaggtgtttatgtgggatttttttcatccttttttttttcaagaaaaaagagctagatacagagaatgctctaatgtgtgactgatatcaataaaagacatgaagtttcaagaaattgatgtgacaaagattgcttcaaatcctcatgctctagtgcatcagttttctggagctccactgagaagacttcagaaagtgtatattttctactgcaaaaacaagtctatgggtcttcgctaacaacaaagctaaacaaagcttgttgaaccagctttccagccactagggcggtgttcactacagccattgcatagctctgtgctggcactagatagactggcatgcctacatttcttttgtcttctctttcagaaaaaatcagatgccttcagatgttatatgtgatgttttatcaactgatagaagaacaactcatgtgcctgtgacactatcatcaagtcctggccactgtgaaactcttggaatgcctttacaccccaaactccccaaactgatgtttatgtttgtgcctttttgagtgaggataggatagagagacagcatattttaaaagtatctttccactgaaaaaccttttgtttttcacccttgttaatgtcttgttcctgtaaaatcaagtataacaatacttcccactctttgtaaataagcatttgactacatgcattttaagaagacaatattaaaaataaaaaaattgactatggtgactgttattagtgcttgaatttatttggaaaagatagactatttgctctaacttttttgctaacttcctgcattgcatttaggaatgaaaaatatgttatgtttctaaatgcaataatatcatagataatccagtatgaaagtgtccaattaccratttttctagtttatcaacatagtctgtttttaaaaggcttastttttagacctcagtggattgaattattctatttttaaatgacagattagagctcttaattttattattctcaaaactccattacagagagagcagtttttaaaaagcacttgcatagagaaagttcctttcttattatggcctagaaaaggatggctttttctattttttattttttggttttaccacccatatcaatgaaactttacttgtggatggtgtctcccaaaaaggtaccattgctaggcatttttacaacccccaaacacacacacgatcagacacgtacctacacaggcacccacatacacacagggcaagttcttttccactactgtaaacctttaactagaagaaatttgagcagggggtgaagcataaagaaaatgagagctagaggggaaggcacagcttcctaactgcctgaggcgaagatgggtgaatgaatgcctagagttctgactggtacaggctcgggatatttgaggcaggaatggatagaaagcgaggcataaaacctctatagaagttttaatatttatattgtcaattccatcaagcctcctacatcttttcagaaggtgtctatttcttgactcaaagtcggagaatatcatatgccaagcctttaaaggtattcctcattactgttccatctaccttataattagtgacaattcctcccagattctggcatcaggctgtcggtctttgttcccatgttgctatgagtttttgcctcttcctgttacttcaggcatattttaatgagaatttaagaacagccatatcagtggattccatcaaattctattttggattagtaatttaatggaaaacaatcccaatcaagagagcattgatccccttttaaattccagttaacacataattataaataacaaaacaagaaataagaaagaggagataagcaaaatgttactaagaggatttaaatgaagagatgaaccatgctccttgataagaaaactttatattgttaaaagtctattttcccccaaatatttgataaattgtttccaatcaaatttttgagaattatctttttgggactcgacacaatgagtctaaagtcatctagacatgtgattcaaaataatttttttcaaaaagaaaaatagctaagtgaaatttacacaaagaatattaagagttatatggttacacaattcttaaagtatactaaaggtagattaataggcagaacaatgtcttacaacatagagttcagactaactgtactgaccagacccagtgatcacaggtcagctcaggtcaccacaggtctgctcagcagatcagagcagaaaagaaaaagaacaggttccttgagagggtgtcagctggaacatggagaatggatacacatatgaagattatcagagcactgcagaatggcttctgtttcacaccaagcactgaacacaagtgacagtgatctgtgggtctgaattaggagatctgactgacaaattaattcaggcccaaatctttaacaacagtgagatgctcaactttttccaaagtacagtgccaggtcatgctgtttgactggtgtttgggttcctgaatggcacagtgtgtgtgatgatgcaaggaaggttctacttgtatgatgggtacctgctctggaacatgatatttttgcatgaggttttccagcttctgggtggaaacatcttggtggccaccgatgcagctggagggctcaaccccaagtctgaggttggaaggatcatgcttctctgtgatcacatcaagctmcttggtttctgtgatcagaactctcccaaagggcccaatgatgaaaggtttggagttcattttcctgccacgtctgatgcctacaactggacaatgaagcaaaaggcgctcaattcttagaaccaaatggggaagcagcaagaggtacagaaagacacctatgtgatggcagtaaactgcaactttgagactggcagggactcatctgatgcagaagctggggatggatgctgtttggcgtgagcacagcatcagagttagagttgcatggcactgtggacttggagtctttgcttctcactcatcactaacaaagtcatcatggattatgaaagcctgaagaaggccaatcatgagtaagtatgagaggctgtgaaacaagctgcccagaaattggaacaatttgtctccattcttaaggctagcattccactacctgacaatgccaattgatcagccctggagtggtgtgatgtctcccacattggatccaattagctgctaattacttttgccccttgctggaatcacatgcctctgctcttaagtggtagcagaacaaagaggaatattcctcttcttcaccttccccactttctcctaccagaccctcctgcttttgcttagttgtcaatttctcttttgcttagttgtcttatcaaaccagtttctatccctgttttttttcaagagcagaagcccatggctaccacacatccatggatatgcccaggatttgacttgggctttcaaactttgcagagtagctgatactagctttttgagataacactctcacattcctgggggctcagttctgcctcacctaccgcactagagaccaaacaaagactaactcaatactctctggacttaattaaaccataatgttttgagaataaagagaaatatgaaattaaaacagaacatagagttcagaaagaatttataatttgataaatataaaacttcaatccaatagaaaaagtgttggcttatttcaaaatgtgggaactacagaaaattgtgaaccaccagaaataaaataataatatatttggtcattaagccatacactaacagaaattcaaaattaattgcaagtttaatggattacggaaaaaaataaaagtgctaaaataaaacatatgtaaatatttatatagttttcaagtggaaaagccctttttaaacatacaaacaaaatcacattcagtgaaaaacttaattatacagaaataacattgttgtgcagcatgaaacaccatgaacaaataaagaataaataaaagagaaaacaaagggaatttttattaaaaatattacagaataattctccaggtggccttggactggcccaattcctacccttttctcagttgtaattctcaagaacaactgcagaatactttgggaatgtaacattccgagacaaggaggaagtgaccagatctgccttggctcttttcctgcccctcttagaacaggatattctatagcactttagcccagaatgttatagtgcccctggggtataaaacccaggatggactgctttctggagctcctcagtggcagtacaatgagggcatgtgcaaacaagattctatttgccctgtgcaactttcttgagccttgggcaaacaacttgctgtgaatcacagacttctactgtccctctctgcctatttgtaagtagtcaggttgcttaacttaacttgttatatgcgagtgttctgtcacattggacttgtgcaaatgatagaaactgtaacctaaaatgcagtgggctgagtatttagactcccattccttgtggttggcatagtgatgtcctttgctattctccatgcagtgggagtccacccctaggattagcaaccagtgtacaatgagccagcttcacacatatgacaaacaaatggctcacaacgtttttgatgacagatcacacaaaaagttcattaaaaatgaatattctattgccaaaaagggtaaaagacataaatttaaactttattatataataaataaaatgtgtcaaaaattagagaaaagctattcgattccaattatgagagaaaccgtgacaatttaaaaaaataaaatgtcatgttttaaataaaatataagaacaaagtaatactaattcagaatgcttgtgaaaacagggatttccttagtcttgctatagattataaactgataatataattggagttaaaatatatgttaaaataatttaaactaggcatattctttcagtttcttttttatgatgtgtttcaaagaaattatggtaagaatatttacaaataaggatgttctgcattgcaaatgttataaagattaaaaaatatatagtttgaaagttcaacaataaaaacagtgtttaaacaagtatggcacacttaatctgtggttctgaaacgagcatgtttaagaactacacgggaaggcatgctaaaatgcaaaccataaccacatggcattccctttgtttcagtcaagactcagattccaatttacctatatctatattggcatttttagcaaaaaaaaatttagtaaacataggtaagtgtgtgtagccttcgttttaagaattagtgatatatttcaggagtagtatttaatcattaaattcgtgttgcaggtgaatgcttattgatcataaatgatgctaatagattttcaacttttagcaagacggtagactgagctgacattaattatcttctaattcaaatagcagtagttcacatgctaagtaaagtataatacacaaagaaaataagtttataatgaatttcaaagttaaaaagtaaactcactagacacaaaaaacccactagagttcaaagccaatatagcaagcacaaggtgaacgataccctgtccctgggttttctgatgccaggtagaccttgggcatgaagggacgatgctctcacacccacacagatggtacaggggagacgtggtcttattaacacttagggcaggcatgagaactaagatcttaccttaagtctggactctcaaaggcatgtttcttttatataaatggtgttagaaaaagttcatccttagccaaaaaagtagtaagaaaactgccttagctcagaagttgggtagagaaggacagtggggtatttctcatgagaaatcgaaattctaagcctagtcaagcrtgagctcaggcttggaaattataccatgggaatgccataaatcccatgacaggatgttaatgttaaaaactggcctaaagatgagtaagatgccttaacctaagcagaaaccaaagcaaaactgctctggagggatacttccaaaactctgggtgaaaagtactactctggctaaacaggaaacaaaaacaactgaatttacaataaaaaacacaaaccacacaaataaatgatccattatgaaagtgtaacatgacaccaatacaaaaaaaagaattagcacacctagaatagataatatgaaaatctagacaatcaatgatatgatatatttccataatttaatggattaaaaaatagaaaacaccaaaaagtaataggtcattatgaaacaagaacagacatttggaaagagacaaacaacctcccaaaataaatactatcattaatcataaaccctcagtggacagtttagaccatgcattagacacaattagtaatgtagtgttcagaaaataaatctaaagagtttaccaggaagcactacaaattgataatgaaatgagaagtaggaatgtaagtttgagagatatagaatttaaaacaaatatttaacatatatttgatattattatcatcatcagatgagaacagaaagcaagtgaaagaaggaatgtttagaagataatgctagaagtctctggaatttataaaagacaccaggcctcctaagctatctgaagctcctaagcttctatctaagctcctmcgctaccctgagcagggtaaataaacaaaaccaatatctagatacatcataccaaaatttctgaatatgaaaaccaaagataacacctcctaaacaattacagaaagactcagatttcctacagaggaggaataatgagactgaaggcatacttctcttaaacatcaagaggacaaaggaatacggaataatatctttaaagtgttgaagaaaaatcagctgtcaacctaggcagtttaaagaacttgaaggaaaaagaaaaatgtcattttcagacagcccaagtttgccaggcaggatgaaaggaattcaacaagaaatattttaataagaagatgggacttagaaacaaagtatgaaacagaagaagaaaatatgagcaaagtgatttttgttcaatctaagtaagtattaactttaaaacaatacttctttcagctttattgaggtacatttgacaaataaaaactgtatataattaaggtgcacaatgtgatgttttgatacatgtatacattgtaaaatggtttctacagtcaagctaattaacctatccattacttcacaactgcctttgtaagtatgtgtgagtatggtgagaatacttatgatcaactctcttagcaaattttaaacatacgttatttttaatgtacattaggattacagaacttattcaccttataactgcaagtttgtactcactggccaacatctcccatttgccccacgccccaacccctggtaaccacccttctactttctatttctgtaagttcaacttttaaaaatatttcatatataagtgaaatcatgtagtatttgtctttctatgttggatttatttggcttagcataatgtcctccagattcacaaatgtcacaaatacaggacttcattctttcattctttttaaagtacaataatattcttgtgtgtgtgtgtgtgtgtgtgtgtgtgtgtgtgtgtgtgttcatatatgccacattttattttctttagtccctcgttgatggactcgtagatcatcttcatattttggcaactgtgaataatgctgtaatgaacatgacagcaagtgcagtatctctttggcatattgatttcatttccttttggaattcagtaagttctcacttaatattgttgataggttcttggaaacagtgactttaagcaaattgaggtacagcagttccttgaataatgttttgttcaacattgtttcattatcacgctgatgaaaagaaaatattggtttcattatacttctctttgctgaaagtcagtttccaagaacctatcaatgacattgaggacttgctgtatacccagaagtgagattactaaatcatatggtagttccattaataatttcttgaggaaacttcatactcttttccataatggctatgtcaatttacatttccaccaacaaagtataagggttccctttgtgcaacattctcattaatacttgttaccttgactttttaataaaagccatcctaacaagtatgaagtgatacttcactgtggttttgacttgcatttttctgttggattacttaatggttaaagctgccagtgttctcggcagaagcaactgctggggtttgtgtggatgaacactaaagggacttcctttgaaaaagctgcaggaagtcttggctgcctcagtggctgttgaggtcctcaccaggattctctgtagagcaggccactgaggaccctggtggcagctgctgtgtggctaatatgtttcaggtatgctgatctccccagtaatcttttctgtgttgttattattttctctccactgtgttgctgtaggttcttaattgtgtacatgaaccctccctagactatttgtgtctgtggatgttaatcgctgccttcttgtttttaggaaaaatgaaagctgatatctcctaccccaccatactattgacatcctgaaaatatttacaaaatggggaaggtaaatatacaagttgacatgaatatatttaacactaatcacattgaccactggggagggcaatgtgaatcaaactttttaacgttctttgtgttgtgcagaagaaagatgttagttaactttgaatgctgttaggtcaaaatgtaccttttaacttctaaaataatagaact

SEQ ID NO: 93552 - DNA, 15467 bp, Homo sapiens
tctgttcattattaactaatatctgagaacatttacaatattaatgagacttaatctaggaggagttcaaattaatttttttttttctttgaggtagagtctcactctgttgcccaggctggaatgcagtggtgtgatctcggcttactgcaacctgcacctcccgggttcaggcgattcttctgcctcagcctcctgagtagctgggactacaggtgcccgccaccatgcccagctaatttttgtatttttagtagagacggggtttcaccatgttggccaggctggtcttgaactcctgacctcaaatgatccacccacatttgagtgctgggattacaggtctgagccaccatgcctggcctaaatttatttttctttatgtctcagtaccatctaaataagagagatagtcaaaataattatggtcaaacttatgatgtcaaaaacataaataagtggttggtgttagcatgtctacatatagttcagtttttgctgtaaggttctttggaggccagatgcagtgactcatgcttgtaatccccacattttgggaggccaaggcgggtggatcacctgaggtcaggaatttgagaccagcctggccaacatggtggaaccctgtctttactaaaaatacaaaaattaacggagtgtggtggcgggtgcctgaaatcccagctgcttgggaggctgagggaggagaatcacttgaacccaggaggcggaggttgcagtgagtcgagatcacgcccctgcactccagcctgggtgatacagtgagactctgtctcaaaaaaaaaaaaaaaaaaaaaaagttatttggctgcaagaaagaacatttggtttactttgatgataagagtatctcttaatgctgggatggcctcttcctggcatttcttccattgttgatttttagtttagtagtctgtgattgcctgaatggagttgagtggagagggattcatcatgttaattccaaacacgagttcctggccaatgactaaaataagtaataaggagggagacacataacacaactgcccagtgtttttgatgccaataggttaagcctaaggattttcaccaaaattcagaaataacatctcataataaaataagcactgtgttctctgcacaagcatagaccgagggactcaaggtacaagggaggaaaaattgaggagaggcccaaggccctgaggtgccctccccattccctgccctacccgcattacaggcgcccggtgaccttcactggaggaaacatggaaatacattcttaagtgaaaatgattacaaaatagtatattttctggaaaattatctcatctgaaaatatctgccaggtgcagtggctcacacatgtaatctaagcagtttgggaggccaaggcaggaggactgcttgaacccagagtttgagaccaccctgggcaacatagtgagaccctgtatctatacaattttttaaaacaacagcaacaacaacaaaacaggccgggcgcggtggctcacgcctgtaatcccagcactttgggaagctgaggctgtcagatcacttgaggtcaggagttcaagaccagcctggccaacatggtgaaaccccatctctactaaaagtacaaaaatgagccaggaatggtggcatgtgcctgtaatcccagctactcgggaggcagaggtaagagaatcgctcgaactcgggaggcggagattgcaattgcgccattgccctccagcccagggcaacagagtgagactccgtctcaaaacaaacaaacaaacaaaaaacaattcgctggacatggtggtcctcacctatagtcccaggtacttgggaggctgaggcaggaagattgctggagcccaggagtttgaggctgcagtgactaatgatggcaccactgcactccagcctgggtgacacagtgagaccctatctcttaaaaaaaaaaaaagaaaatatctacatgtgaatagacaaaagacaaagaatgtacatcacactattatagcaatgattcctgaggtatgaagaactacgagtaatttttattctctttttacttatctgttttctaatttttatattatgaacacatattatttttgtaattataaaccaaaaatgtatgccagcaaaagatataaaaaattcatacataggccgggtacagtgactcaggcctgtaatcccagcactttgggaggctgaggtgggcagatcacctgaagtctgcagttcgagaccagcctggccaatgtggtgaaaccccgtctctactaaaaatacaaaaattggcctggcgtggtggtgggcgcctgttatcctggctactggggaggctgaggcaggagaattgcttgaacccgggaggcagaggttgcagtgagccgagactgcactattgcactccagcctgggcgacaagagtgaaattccatctcaaaaaacaaaaatttttgtgcataatattgtctttgtaagggtgtggtagaaatggctttacatgcagtgtttattccaacttccttctggtgtccttctttgttccttctgggaacaaaaagtcatgttcccttgactcccttgcagctgagtcgctgggtatgaattagcatccaccagtagatgaaccttcttgagaaggaggccacagtatcagctctgcctcagtctgcgggggttcagtgggggttggaacagatgaccagaactcatctccatctctgggctcagagggagttggggctggggcggactcacccctggatggtggctgtagcagaaggttattaaagctaacagtttgggtggtggycttctaattccctatcttcctgatatcctggaggttgtaatgatcctggcaagcctgttctgtatcattgctcagtgttctgggaatcattccgggatacctagcctaaacaggcagcctcgccagcagttttataattgcccaaataatcctaggcctaaaatagctggttgtttctgtttcctgagacacaacctgagtgacataagggctcatgagctatttgggaatgagcttctgctgaaggaaaacatacattttatgacaagtcagtggaagaattaatatttcaagttgcttggaattcatctgaattgcagaaggaagagtaaaaatatcaggaacaagtgccaaacctaaaacacaacgaagatctccaagtataaatgtaacaggatcacagatttcctctcttttactaagacattcaggtacaatatcacttatacatttctctagaatggctcatccttcccatgagccttatctcaatgggttttggggtgggatggtgaggagcagggaaaccgaattaagtttgcctgtttgtggaattttggctcaaagaacccttttccatggtgtagcggtgcaatctttcagagttctcactttgtccatagtgtctggatgcccagggctacacggataaacgtgccgggtgctctggtcccgtgctggtttcccatgtgaattggctggtctggcctggtccccagcctgagatctcttgaaggacccactgattccatttaggacaggggcatcgtgatgttactcactgctggagtctgtgattccagtccttgcctctggtcacagatcctcctcctctgagtcttcttcctctaggcctctatctttcaccagtctcagagcactcccagccactctctggggtgtacatcgttgctagatctttaacctcctccctgcaggctgtggggcctgccccaggtccacacatccattcttaccctctactaggggccacgctgcacgaggacagtgctgtgttggatgtgaagtccacgtgggctcatcctggccttccaagtggagcaggaggcagatgcccctctgctttcagctgcaagtctttttttatcttttttttttttctttttttgagagagtcttgctctgttgctcaggctagagtgcagtggcaccatctccgctcactgcaacctctgcttcccaggttcaagcgattctcctgcctcagcctcctgagtagctgggattacagacatttgtcaccacatccggctaactttcgtatttttagtagagatctaaaatcgcatttttagtagagtagcacatctgattagtatctgtgctggcaatcaacctggagaaaggaggccgggacacaggcatctgtcctcttgcctccacatctactgggatggcaggagtgatgttttcacttctgcctctcagcgatggagttcctctgtgtcctcatccactcccttccaaacagcagggaccctgtacaagatagggtcccaggaagtaaattaacttaccaatgagcaagggccaaagatgctgcccactttgtgctaataaaatctgctcatgatggtttctgcaaatgatgcctatcctccccgcttcacctcctttctcctaacactaagaaagaagacattgcccagataagtgcctgacgtttattttcatcctctgctttaaaatagggcaccatgaaaaacagtcctgtcagctgtggaagccgttggcattggagagtgaagacaacctcccgtcctttaaaatatcacataagaaaggcccaaagtctcccagtgagagagggaagagctttctttggcagtaaccgaggaaacggagtggaagcatgagctcttcctggaacaggattcatatcatcaagaactacggatttgctgggccaggcatggtggctcacgcctgtaatcccagcaatttgggaggctgaggcaggtggatcgtttgaggtcaggagttagagaccagccttgctaacatggtgaaaccctgtctcgactaaaaaaaatacaaaaattagccgggtgtggtggtgaatgcctgtaatcccagctactcgagagggtgaggcaagagaattgcttgaacctgggagatagaggttgcagtgagtcgagattgtgccactgcactccagcctcggtgacagggcaagactgtctcaaagaaaaaaaaaaaaggaactatggatttgctaaggccaatagtctctctaccccttagtaaaatgtgttttggtataaaaatccagataattgaaccattgccattagatgtttcgaggtttctattgacaatgtggaggtcttatcatttagatttcaacacttttatttttagtttttagagacggggccttgctctgttgcccaggctagagtacgatgtagtgatcacggctcactgcagccttgaactcactggctcaagcaagcctcccacctcagcttcycaagtagctgggacaggcgtgtgccactgtgcctggctaggttttgtattttttgtagagatggggtcttgctatgttgcctaggctgatctcaaactcctgggctcaagaaatcctcccaccttggcctcccaaagtactgagatcacggtgtgagccaccatgcctgaccactttcaacacttatattgttggggtgaaactgaaacatatgaggatttgttcaaagtatatgtagagaaggcaaaattccacactgattcttcctgccttggactggatgtgttgtgcagagtgagggtggaaaatgagccagtggtcctgaactaataaaataagtctccctgggggacaggtrtttggcttcccattccacaggatggggtagatgtggcttatggaaccaggattattcacaaagaggttgttctcctgtatgtaaaggctggaagagccgtgtacttggatgtgtctgcatgggggaaggcacaggctgggctggtgcgcctgggaggtgggggaggtggggaaagaggctgtctagcaggagctgaacatttgacattgtgggacactttgcagaggaggctaacatggtttcgaggagatacttaggagctggtcacaatgggtgagtcgtaaagagaatgttggagctgggggatcctggagaaagatgataagatggttgattcacagaacccaggctggacgggacttgtggcgagcagtccagcacagcctcacagtgcagagcatgagctttggagcctgcccccaccctagctttgtgaccttaagtgagctacatagcttctcatgtgtaaactactcatcataatggttctgacctcagtggtttgttgtgttctaggaaatgatgccagtgaatgcgtagtcccagcctcagcacaggggagccaccttgaagctctcaaatatcactgttgtgaatacagagagggaaaaccaactgtaacgtgccacccaaatgtaagttttactcatattttgatgttaggatggatagcttggaaaaagttggagggtacggcctttactatgaggcatctatgaaggatcaggaatggatgtagacaaggaactaggaatggaaagtgttaaagctggagcctctggaaaaccagaaatgaggctgggcactcaggaagaaacaagtgaaggtgatgctaatggtaagtargggaggaaagagggttgccttaaagacctatgcagttagggagcgggcagggtgttgaaccaagaagggaaagttgtagcttaagaacatgtatacagaagatacgtgtaaccacacgctgtttgtccttctgctgaatgagtttttcagattaatacatcattcatcagacttcattcgtgatctcgaagagtgacatcagtcttccttggaatatgaagagaatttctttggttcttcttttgcatttctatttgatttattttattttattttatkttatkttttttggtacagaaagctcattactagtcctgtccagcaacgtgcctctcctggccctagagttcttggaaatagcccaggccaaagagaaggcctttctccccatggtcagccacacgttccacatgcgcacagaggagtctgatgcctcacaggagggcgatgacctacccaagtcctcagcaaacaccagccatcccaagcaggatgacagccccaagtcctcagaagaaaccatccagcccaaggagggtgacatccccaaggccccagaagaaaccatccaatccaagaaggaggacctccccaagtcctcrgaaaaagccatccagcccaaagagagtaacatccccaagtcctcagcaaaacccatccagcccaagctgggcaatattcccaaggcctcagtgaagcccagccagcccaaggagggtgacatccccaaggccccagaagaaaccatccaatccaagaaggaggacctccccaagtcctcagaagaagccatccagcccaaagagggtgacatccccaagtcctcagcaaaacccatccagcccaagctgggcaatattgccaagacctcagtgaagcccagccagcccaaggagagtgatatccccaagtccccagaagaaaccatccagcccaaggagggtgacatccccaagtcctcagcaaagcccatccagcccaagctgggcaatattcccaaggcctcagtgaagcccagccagcccaaggagggtgacatctccaagtccccagaagaagccatccagcccaaggagggtgacctccccaagtccctagargaagcyatccagcccaaggagggtgacatccccaagtcccyagaggaagccatccagcctaaggagggtgacatccccaagtccccagaagaarccatccagcccaagaaggrtgacatccccaagtccccagaagaagccatccagcccaaggagggtgacattcccaagtctccaaaacaagccatccagcccaaggagggtgacattcccaartccctagaggaagccatcccacccaaggagattgacatccccaagtccccagaagaaaccatccagcccaaggaggatgacagccccaagtccctagaagaagccaccccatccaaggagggtgacatcctaaagcctgaagaagaaacaatggagttcccggagggggacaaggtgaaagtgatcctgagcaaggaggactttgagrcatcactgaaggaggccggrgagaggctggtggctgtggacttctcggccacgtggtgtgggccctgcaggaccatcasaccattcttccatgccctgtctgtgaagcatgaggatgtggtgttcctggaggtggacgctgacaactgtgaggaggtggtgagagagtgygccatcatgtgtgtcccaacctttcagttttataaaaaagargaaaaggtggatgaactttgcggcgcccttaaggaaaaacttgaagcagtcattgcagaattaaagtaaacatgtattctgaaaacattgcagacagtcaggtgtttatagcttttgagttctcttttattatttacacaaagtgatcaggtataacaaaagtgtatgtccaaatggcactgcttgtacatgataatattaactctacccttttcaaaaaacagtccaagcattaaagtacattgcgactgtgtttctgttagtgggagagtataaaattagaaattcccatggtgaagactgctaagtcccatggtttcctatttttcaatcttgatatgtatttatttttcacttgtctttgaaaatttcacgcatttagtgtttgcagcaagactgaaaatttagataatttttctatagaggtagatgactgaaaggtgaatggaaacttcttttctcatgtcacacatctttggggattctgataagatatgtttggaaataaggaatttgaaagattcacatcttagctaacctccttcttgtgccggaagtgctacggaggccttgggaaattcagtgggttttccaagatctgatttgttggtgacggaartgagatcaaggccgcttccagatttcaagtccagggctctacctactataatctacgctcacaaaatctcagacaagagrtcggaacttcaggtttctcggaggttgaagtcctctggatctttgctgcctttatgacatcagtgccctgatggcagagttcctggttcgtctccctggtaattgagttcataatacctagaccttcctctgacttttttacttaaatttgttcttattttcaatattgaacaagccagcctttaacatgactctaccagcttagacatataggcctagactttaaygaattaacctaatcacagtgctaccagagtcttgtttggacaacttagtgagccccagatgtctatgagcccaaagtcccaggtctgaaccatagacagaggcttagtccagagtgggtttttaaaaatgaataaaaccagcttcattaggtataattgatatacaaagaacwgcacatatttaatggagggagttggatgagtttggatgtgttgcatatgcccttgattgccatctccaccatcaaagtaattaacaccttcattgcctccagaagtttccttgtgtcactgtgctttattgttattactatcatggtaaaagcacttaacagatctactctcctaacacatttttaagtgcccagtactgtactgttaactaggggcatgatgccgcacagcagatctgtggaacttactcatcggtgtggctgaaatttaacacccatcgaacaactccccgttgccccttcccccaccctctggcagtcaccattctactttttgctggtccagagtgtttttaaaaatttgaatttgttgccaacatttcaaatatcaggatttaaaaaaaaaaatctagatgtctagcttttcttgaaaaattgtaagatctggcaatccaggcttgccttacctcaagaaaaccaatctaaccttcgggtctgagcrgcagctgcctccatctgatagggcgcactctctccagtcttctgctgcagaacctggctggcttcttcacttagccagctgagttgcaatccctatcttaagttcaagactgggactgggcgcggtggctcacacctgtaatcccagcactttgggaggccaaggtgggtggatcacctgaggtcaggagttcgagaccaacctggccaacatggtgaaaccctgtctctactaaaaatacaaaagttagccgggtgtggtggcaggtacctgtaatcctagctactcaggaggctgaggaggcaggagaatcacttgaaccggggaggcagaggttgcagtgagctgagatcgtgcccctgcactccagcctaggtgatagagtgagactgtgtctcaaaaaaaaaaaaaaaaaaaagaggaccaagactgccccatctccttccatcatgtgcctatcgtgactctccttagtggtacctcagttataggcttcatttgcacccttaacaatggcctaacaactgcaaacaaaatgaaataccttatatgcttggccttttttccaaaaaaatttggaattgcctacaaaaggattaatgataaagctaacgaaccagaaagaggaatcagagccatgaagtgagtaacgtgtcaactctgtgggctcgtatcatggctctgttagagcagcaaattttgttctgaactcttggcaagtgagagagaagagataaattcaataatacccagatgtcatcacccaaaataagcaggcttaggaatttgcaaaagagtcaaagcttttccttaactaaattcctgaatgacatttctcatcttggacactacatttgagacttcgatgataaacgaagttcttgacaagatttttctataataaattcaggacagtttttcatgtggatattcttggtaagactcttcagtaaaagctgaagccataatggcaaagggcttttcaacgagaggattctagattcaggtgtactgcattttcatagaaatgggcttttagtgacagtgcatatatccacctgttatttccctctgatagagagaccttcttctgactttttcaatcaaatttgttcttattttccataatgaacaaggttagcttcaacatgactctaccagcctagacatataggcctagactttaaccagttaacccaaacattgtgctaccagagtcctgtttagataacttagtgagcctcacaacacttttaaattaattttgagacatattctcactctgttgcccatgctggagtgcagtggcatgaccatagttcactatggtcttaggctcaagtgatcctcctgcctcagcctcccaagtagctgagactacagataaagccaccacgcttggttaatttaaaaatatatatttttttgtagagttggcatcttgccatgttgcccaggctggtctcagactcctaatctcaagagatcctcccacccagacctcccaaagtgctgagattacaggcatgagccactgtacccagcctcccacaacactttagactgtgcaattttaaggaccagggcccctgaaatctaacatcagtgacttatactaactgctttttctggtaccataatattaaagacatttctgtcaaaggtccctttttatatttaggttactaagtaatgtcattgacaatgacctcaaaatatccttaaaaattattgtgatagtagattcttaagatgatttaatagcattcttaacataagtcaaaggaggaggcaaagcgaagttctatgaaggcattctgtagggccaagaaaaagcaacgcaarggtgtggctctctgatgatctagtttgatccagggataaaatctaaactagcagataatcaatttatgcccttcaaattacccattgtgagaaccacttcttttgactgtttggataatagttgaacagcagccaggtcaaagttatgttctctggcagaaggcttgagtatggacattttctttttctgagtaagaaagatgcatgcacttaataaaaaatcaaccaagcggggagtggtgactcacacctgtaatcccagcactttgggaagccaaggcgggtggatcacctgaggtcaggagtttgagagcagcctggccaacgtggtgaaaccccatctctactaaaaatacaaaataattagccgggcatggtggcaggtgcctgtaatcccagctattcaagaggctaaggcaggagaatcgcttgaacccaggaggcggaggttgcagtgagccaagatcgagccacttgcactccagcctgggcaacgagagcaaaactccatctcaaaaaaacaaaaaacaaaaaacaaaaacaaaacaaaaaatcaaccaagaaattgttttcatctctaatatttaacatgaaggacaaataagaagcagttctaatgagaagatcccagataatcatatgagctgtgaacaatgataatctaaccagagccttaagaatcaatggaaaatctgttagaattaacgagaaaactcaacaaagtggcagtaattgaagtaatatctaaaaatcaacagcttccatgtgattctgtggcaaataattgggaatctgtgaaaaaaaagtcttattcacaatagcgacaaaataaaatgtctagcaatagtcctaatgagaagtaaggatgattaagagtaaaataaaacattctgagatgtatataagtaggtttgaataaagtgagacagtccatttttctcattggagaaaagactgaaagatgttgatgctttccacttaattagtagaccctgtaattccagccaatatctcaatgggatatttgatagaacttaacaaaatatttaaaacttcactgagaataatagacaagaataggcaggaaaagtctcaaatgagaagtaatgacgagatatgtgccctatcagagagttacatgtgtagttggtacattaattataaaacaatgatattaatgaaggaaaaagagagcaatgaaacataatagtaagcaaaaccacacattggcatgtaagtagtaatatatgacaaggaaacatttcaatttgatggacagtgagtggatttttttcaaaaaattggcaaaattttaatatttgaggggaaaaatcaatgtatatcccaatcccacaccagacactaaaataaatataagctgaattaaatgataaaaaacaaaatatggaatgattaaaaaatagaagaaaatttagctgaagtttttttgttttgttttatttttgtttttgtttttttgagacagagtcttgctctgtcgcccaggctggagtgcagtggtgcaatctccgctcactgcaagctccgcctcctgggttcaggccattctcctgcctcagcctccagagtagctgggactacaggcacccgccaccacacccggctagttttttgtatttttaatagagacggggtttcactgtgttagccaggatggccttgatctcctgacctcgtgatccgcctgcctcagcctcccaaagtgctgggactataggcgtgagccaccacgcccagccagttgaagtttttaaaaatgttttcgagacggggtctcgctctgttacccagactggagtgcagaggcgtratcacagctccctgcagccttgagttcctgagctcaggtgatcctcccaactcagcctcccaggtagctgggactacaggcttgcaacaccatgcctagttaatgtttaatttaaaaaaattttttgtacagacggagtctcactgttgcccaggctggtcttgaactcctggcctcatgcagttctcccaccttggcctcccaaagcaccgggattacaggcatgaaccaccgcacctggccaaacatgtatgtgattcatggatggagaaaggattttctagacacaattgcaattaaagaagtagatttgaacatataaaacaattcaacattttttttttttgagatggagtcttgctctgttgcccaggctggagtgcaatggcgcgatcttggctctctgcaacctctgcctcctgggttcaagtgcttctcctgcctactcccgagtagctgggattacaggcacccaccaccatgcccagctaatttttgtattttttagtagacatggggtttcaccatgtcagtcaggctggtcttgaactcctgacctcaggtgatccgcccacctcagcctcccaaagtgctgggattacaggcgtgagccaccatgcccgaccccaacaattcaattttttaaataaaaaatataaacaaaattgacaggaaacagaaaaaggaaataatatttgccaaatgtacaacattggatttaatacatgtactataaaagtactcttacaaatcagtaagaaaaacagaatattctcataaaaataggcaaaagacatagttcacattagaataaaaacaagtttgtaataaaaataaaaataaagccgggtatggcaacagctcaggcctgtaatcccagcactttgggaggccgaggcgggtggatcacttgaggttaggagttcgaggccaacatggcgaaaccccttctctactaaaaatacaaaacttagctgggcgtagtggaggtagtggagcatggctgtaatcccagctgctccagaggctgaggcatgagaatcacttgaacccaggaggcggaggtttcagtgagctgagatcatgccactgcactccagcctgggtgacagagtgagctcctgtctcaaatataaaaataaaaaatgttcactaatagggaataaataggaaaatgtaaataaaagtcaatgagattttgatagtagggatgtagggaaacagttactcatgtactgccactgagagttaagactgctataagtccttctggaacatagcggtatgttacggggtagaaagatgcagaactttgcaaactagcttgtgtatttgtctgctcaggctgccatagcaaaataccacagaaaggatggcttaaacagcagacatttacttctcacagttccagggcctagaagtctgagatcaaggtgttggccattttcacttcctgtgaggtgtcatcagcagcacaagatcagacatagccaggtctacacaggcttgcgtctttccacaagttcactttattgatgcttactcaattagaaaagtcatgagccaggcgtaatgttgagatgcctgtaatctcaggaatttgggaggcagaggtgggaggatcacttgaggcctggacaacatagtgagattctcttctctaaaagaaaataaaacagccagtcacggtggctcacgcctgtaatcccagctacttgggacactgaagtaggaagatcacttgagcccaagagtttgaggtaatggtgagccatggtcttgccactgccctccagcctgggtgacaggcaagactctgactctaataataataatagtagtaataataataataataataataataaaatggtttcctatgtgctgcaccctgagaggagtcctcagtccagcctgtgagcc

SEQ ID NO: 93553 - DNA, 13524 bp, Homo sapiens
gtctgtctaaggttgaagtgaagtcctcagaaatgccgttgctaaatagcgttcccaagaatctcagcatcctagcatgctcattagatccctgtatctgaaggtaacatttcctgacgaaacattcccaggaggaaaagggggaaaacattgtattcacattaccacacagttgcttgctgttgtttgctgggctgaaactagcaagaaggcttgtgtgaatttgggattcagcaaggcctggagtgcttgttgagctcttgatgtgggcctagcccttcccattcctggtatctcacctaatttcctttgacagcttgggcggcatctggggaatgtagctccattgtctcagagcccccgagcaggccacgtggttgactcagctcagtttggcttgggatagccacttctgccaatttggattcctctgtatctctctgggcctttttgggaaggtcatggtggcctggaaagtttctgcttccaaatgaagccttgtgaaaagaattgtggttttttttgtttgtttttttgaagtggagtcttgctctgtcccgcagggtggagtgtagtggcacagtctcggctcattgcaacctctacctcctggcttcgattctcatgcctcagcctcccaagtagctgggactataggcatgtgcccccatgcccagccatgaagagaacattctttttttttttttgagacggagtttcattgcccaggctggagtgcaatggcgcaatcttggctaactgcaacctccacctccagggttcaagcgagtctcctgcctcagcctcctgagtagctgggactacaggcacacaccaccacgcccagctaattttttgtatttttagtagagatggggtttcaccctgttagccaggatggtctccatcttctgacctcgtgagccacccacctcagcctcccaaagtgctgggattacaggtgtgagccaccgtgcctggcctaattttgtatttttagtagagagggggtttctccacgttggtcaggctggtcttgaactcctgatctcaggtgacccacccgcctcagcctcccaaagtgctgagattacaggtgtgagccaccacgcccggctgaaaagaacattcttaatgtcatggttgagaccctccagggtctcctgcaggcctctggcaggcagggagcaagtaggatgtgcagagagtaggataggggcctgggggattgagttcaaggcttttctgcccagctgaattgggccttcaaacgagtcccactttgcctgattacctgtttgctcataccctttagactacaggaaacagctttcaaaaactttataccaagggttgggtatgttgcctcatgcctttaatcccagcacttagggaggctgaggcaggcagatcacttgaggtcaggagttcaagaccagcctgtgcaacatggtgaaaacctgtctgtactaaaaatacaaaaattaggagtggtggcgggcacctgtatccaagctacttgggtggctgaggcaagagaatcatttgaaactgggaggcagaggttgtggtgagccaagatcacaccattgcactccagcctgaacaacagaacaggactctgtctcaaaacaaacaaacaaaaaaaactatactatcttcaaagaatgaggatgaattaatgaacatttgaggttctctgaactgagaaataaagcctgtttaaggggttgtggtaagattttaaaagtaatcctccaaaattgtcacctagtgagcagaatacaaaaatggagcttaagttccactacaagaccaaaactgtcacgtagagcctaagggtaagactgtattggatattagggaccacaaagcactttcatgtttacctcatttgattttcacagcaactgtgtggggagaatcatccccatttgagaactgagaacactcaggctcagcgagctggtgtcccgcttggtgtcagaatactctcaagcccaggctttccctgactgtcaacccattcctgcttctcttgtccgctagtgtgaccccccagccaagggctgccagggcctctttcactatggactttgtgttctgccattcaggcacctgcggaactcgagtcatgcaggagcttttgtgatcgtgacggaagaagccattgccaagggtatccggaggattgtggctgtcacaggtgccgaggcccagaaggtgagcaggtcaggctggtttgtggcttatctgaagaaggcaagaggagcccagtctgcgaatccatagagcaaacactgctctgcgtggctgctgcagtcagagtgaaagtacaggctgggccactccccctgccccagtgtcctacccctgagtggcagaagaaacctgccaccacacaagatctcctagctttcctatgtttagtcttttaaaatatatgtgaatcaggccggacgcagtggctcacgcctgtaatcccagcactttgggaggccgaggcgggtggatcactaggtcaagagttcgagaccagcctgaccaacatactgaaaccctgtctctactaaaaatacaaaaattagctgggtgtagtggcgcgcgtctgtaatcccagctacttgggaggctggggcaggagaatcacttgaacctgggaggcagaggttgcagtgagccgagatcgcaccactgcgttccagcttgggtgacggggcgagactccgtctccaaaaaaaaaaaaaaaaaaaaaatgtgaatctggccatctaccccctcctgtctccatgtggaggagggtaagacatagattcgctgtggcatcggggcccccagcgctgatccatgtactcctaggggygtgcttagtctgaggccgtgcagtagaggatgggtgctctttcatgggaactggtgtgtctgacttgtgctaaagccccaggggtggccacttcctgggggaaggggctcctgattctcgagcttgatcacccctgagtctgagttgggtgcagcctttgccaatgggcctgtgagcactgtgctccttgctggggcctggggctgccagcacctactccccacagacacttttggggtgttggggtatgttgctgcaaggcctaccgccggggcttccgcagctgctcagacacaggatagtgagtctgactcagacctcctgcttggggttgacccggtgtcccctcccaggccctcaggaaagcagagagcttgaagaaatgtctstctgtcatggaagccaaagtgaaggctcagactgctccaaacaaggatgtgcagagggagatcgctgaccttggagaggtaggggcggcttccctccctccgtcctcagggcctggtgcatgaaacatgccccgtcttcaggaaatcatctgtagtcagtcaggccctggttcttggtggaatgggcctttgggctgacttctgttgtcctgtagccttgtagcagggaccccatggatcctgtccttggaccctggacattccctgctgctcccagtgctgctagcaggagagctcttcccaagcatgtatgggcactggggtggagggatttggggaatgggctaaggctggcccctgcttccaagcctgcctggtatttatttgcatttcaagctgccaggaagcttatcacaggctgttcccagcctggtaaggaccgggcctgatttgggagcccagctttctgctgctcctttctctctagccctgcttgtttcacctgccacagctgctcctaaagggactggtctcaaagctttccttgctttcctttccaggacactagtcagggaggacttgggttcgggtggggtgggctggaccctgacatcccagcaagttgtggcccagattgagatggtcgtctattggttccaggccctggccactgcagtcatcccccagtggcagaaggatgaattgcgggagactctcaaatccctaaagaaggtcatggatgacttggaccgagccagcaaagccgatgtccagaaacgagtgagtcctggcagcaccagtggccagagtgtttcctaggcaaaggctggcagaacagccaggggttcggggcctgggcttttggtctgagctgctgttctggacttttttcttgcaggtgttagagaagacgaagcagttcatcgacagcaaccccaaccagcctcttgtcatcctggagatggagagcggcgcctcagccaaggcaacccaggggccagggtcccctcccctagggctcatcagctctctggtggctgacatgtggcctctgtggctctgagcgaagtggttgcctaagggcccacggtctgggattgagattgggaggagcagcagctccctgcatgtgggaggcatacctgggccagggtaggggcagggcccggcgctggggtcctccccacaggccctgggcacagcccctgctctgggaaggggtaggggtgggtggcaggccttctgagggctgcaaatgctcacactagtgagggtccctgctccagcaccgtggcctgagccaggtcctccccacaggccctgaatgaagccttgaagctcttcaagatgcactcccctcagacttctgccatgctcttcacggtggacaatgaggctggcaagatcacgtgcctgtgtcaagtyccccaggtcagcaccacctcgcaccagtgggaagtgttaggtcttaaggttgttggctgaggcctgtgtgtgtacagcctgcattcgaaacagcctttctgcccaccggttggttacctttgccagtaccccttacccaggccttcttattggtgaagacatctggttgatacctggctttgccactctgtcctgtcctggcagtggccatggccgccccctgtaccagccgtaaagtctgtctcggcctccagcagtatcacccagggcaaggagtgggtgatggctcctccatcctttctttccctgcattcctccctcaatcccatcttctgtgctgactcccccttcccttcctgtcttctagaatgcagccaatcggggcttaaaagccagcgagtgggtgcagcaggtgtcaggcttgatggacggtaaaggtggtggcaaggatgtgtctgcacaggccacaggcaagaacgttggctgcctgcaggaggcgctgcagctggccacttccttcgcccagctgcgcctcggggatgtaawgaactgagtggggaaggaggaggctcccactggatccatccgtccagccaagagctcttcatctgctacaagaacatttgaatcttgggacctttaaagagcccctcctaacccagcagtaactggaacacacttgggagcagtcctatgtctcagtgccccttaaatttctgccctgagccctccacgtcagtgccatcggtctagaaccactaaccccgcattgctgttgatcgtcacgctcgcatctatagataacggctctccagacctgagctttccgcgtcagcaagtaggaatcgtttttgctgcagagaataaaaggaccacgtgcaatacttaatgccgcatgatctctatccctcttcccaataggggctggctcttttgacagcctttggcgtctgtagaataaatgctgtggctcctgctggctgctgtggtgttcacctagtccagccccagaacccaaaattttgggaacagcccctagggctgcctcaaacgtctgtggaggtggaggccaaataggtggggtgacttggagcaaggcgttcataattcagtagatgaggggtggaggtagttggaagcagagaagcctttcttggagctgctctcccccctcccttccagcaagatggatggatccggctaccctgcacaactgggaccgggccgttctccctccgggcctccaggggcgctgtagtgcctcccgccgctctctcgacagcccatgcgcagccgcgcgtctttaaacaacggaagaaccagtggatgcggcagggcgttgggcggaaggggttcgcacgccaagaaccgccatgcctggggatcaccgccgcatccgcggccctgaagaatcgcagccgccgcagctgtacgcggccgacgaggaggaggcgcccggcacccgcgacccaacgcggctacggcccgtgtacgcgcgcgccgggctgctgagccaggccaagggctcggcctacctggaggcgggaggcaccaaggtsstgtgtgccgtgtcgggcccgcgacaggccgagggcggcgagcgcggcggcggcccggccggagcaggcggcgaggccccggccgcgctgcgcggtcgcctgctctgcgacttccgccgcgcacccttcgcgggccgccggcgccgcgctcccccgggcggctgcgaggagcgtgagctggcgctggcgctgcaggaggcgctggagccggctgtgcgcctgggccgctacccgcgcgcgcagctcgaggtgtcggcgctgctgctggaggacggtggctcggccctggccgccgcgctcaccgccgccgcgctcgccctggccgacgcgggcgtggagatgtacgacctggtggtgggctgcggcctcagcctcgcgccggggcccgcgcccacctggctcctggaccccacgcggctcgaggaagagcgcgccgccgccggcctcaccgtggcgctcatgcctgtgctgaatcaggtggccgggctgctgggcagcggcgagggcggcctgacagagagctgggcggaggccgtacgcctgggcctcgagggctgccagcgcctctaccccgtgctgcagcagagcctggtgcgggccgcccgccgcaggggcgccgccgcccagccctgaaccagaagcctgagcaactacggacgcaagccgaggaccgtgctgccgccgtccacgaaaagacccgcgccatcggcctccagtttgcgtcgagaattcctggaagggccctgatatgactgtggttggactgacctgactgccagatggtgggacttggtctggagcagggactacttggaatgataaaggcaaaactcaacagcccctggagctgcgcttgtggtggagctggaccctgaaattacctggaccttttttttagagacagggtttctttctgcagtctcaaactcctagccttgattgatcctcctgccttggcctcccaaagtgctgggactacaggtgcatgcaaccacacctggctaattttcttttcttctttctttcttttttttttttttttttttttgatggagtcttgttctgttgcccaggctggagtgcaatggtgcaatcttggctcactgcaacctctgcctcctgggttcaatccattctcctgcctcagcctcccaagtagctgggattacaggcacatgcctccataccgggctaatttttgtatttttagtagagatggggtttcgccatgtgggccaggctgttctcgaatgcctgacctcaggtgatccacccgccttggcctcccaaagtgctggaattacaggtgtgagccactgtgcccagctgagtaaatttcttgattgcacagaatgtacggtgatattggcggacttaaggacatcgaattgtttatcaggaataaagtattatgtgtgttttctgcggccctggataatgctgtagcattcagggtcgattgagtaaaaaaaatgtagagatggtttcctgtttgtttttgcttctagttttcattcatttgctatttattctcttctggctttgcttgtgtatgcatatatataaaaccattattattattattattatttttagtttctagtggaaggcttttatttggttctgtgaatagtcattttgtttcctaagaacttccagcaagttgtattcattccattcatctagaattcctaggctgcctttgtcgggcctgcaggtattaatggagaatagcagctttttatttttttatatttattttttgagacagagtctcactctgttgcccaggctggagtgcaatggcgcgatctcagctcactgcaacctccgcctcagaggttcaagtgattctcctgcctcagcctctggaatagctgggactacaggcacctgccaccacacccagctaactttttgtatttttagagaagatggggtttcatcatgttggccaagctggtctcaaactcctgatctcagtgatccatctgcctcagcctcccaaagttataagatttttttcctctggtttttagtaaatgttttttttgagattgcttagcaccagaatgatttgcaaatttgaaaataggaactccactaggaatgccggatagaagagtgcttcacatttgtagagggagacaagaactaaatatcacgacgtctttctgagccttttggtttgctaacgtgccccaaattcttattccaaacggtataagataattatgtgtaaatgaataccagctctacttagttttatttcatatttgtgtatctgaatatattaaaatatcttttttttttttttgatgcggagtcttgctctgttgtccagcctggagtgcagtggcatgatctcggctcactgcaacctctgcctcccaggttcaagcgattctcctgcctcagcctcctaagtagctggtattacaggagtgtgccattagcctggctaatttttgtatttttagtagagatggattttcattgtgttggccatgctggtcttgaactcctgacctcaagtgatcctcctgccttggcctcccaaagtactgtgattactatcatgagccaccacacctggcctaaaagatcattgatttagttttgagtaagattttaagtgattaaattatggtattgttgtgtctggaatatctgatattagggttttttttttttttttttacagtttttgatatgctttattttgggtatgtagtttacaaaatataaaggaaatataaggagtgttctcttttttttttaaataaaaagtgtatttttaactgggcatggtggctcactcctgtaaccccagcactgtgggaggctgaggctggtgaatcgcctgagtccaggagtttgagaccagcctgggcaacaaggtgaaaccctgtttctatcaaaaaaaaaaaaaaaaaaaaaaaaggaaaaaaaataagtcaggcatggtggtatgcacctgtagtcccagctacttgaaggctgaggcaggaggatcgcttgtgcctgggaggttgaagctacagtgagctatggtcaagctactgcactccattataggcaaccctatctcaaaaaagcaaagcaaaacaaaacatttttccccttgattatagaggtttgagaaaaatttgagggaagattcagaaaattacctgtaactgaacagaatgccaccagcttgggcttattctgcatgcataattatgaacattttcccagctcttgtgaaaattctcacattcatagaaagatagatgcaccagtaaaataaatacctgtaaatacgataataatttcataataatatgcttcacctagatttaccagttactaatattttgccagttttattttctcacacacttttgttgagcatctgaaaaccatacacatgatgacagttcaacccataatgttttagtttgcatctcccaagaataaggtttttcttctgtataacaagaatattgtaatcatacctaagaaaatgaattttattacatatgtgttctatattcaaatttctgtaattacccctaagatgtcttttaaatgatttttagcattgatagtctgtgcctgtgtagattataacattggctattgcaaaataatggttttctttttctctttttttttgagacgaaatcttgctctattgtccaagctggagggcagtggcacaatctcggctcactgcaacctccgcctcccaggttcaagcagttctcatgcttcaccctcctgagtagctgggattacaggcaggtgccactgtgctctgctaatttttatatttttagtagagacggagtttcatcgagctggccagactggtcttgaactcctgacctcaagtgatccacctgcctcgtcctcccaaagtgctggggttacaggtgtgagccactgcacccagcctaaaatgatggttttctgattctagcatttcttttataagattgctatgtaaagcacagcttttctttttttagggaaaaatgtcttttaacagctgcaaaataaatattctttcaatggaatgacaattattatttttgccatatatttattttaaaaatttatgtataatggtaacctgagcctgcatgttattcatgtgtggtgccatactgatctttaattttaatgtgaagcaagtactaatatagtaaagcataaattatataaaatttgctttatattttggattgcaaattaattgctgtactttatagaaaagtttcccaaatccgttttacttttttgtatttgaaatttaatcacaggtggaatcttaaagagagcatttagggatattgtaaacagatgttattaaggactaatgttaacaaacattgaagaagagaaaacagtatttgtttttagcttaacatcttagtggagtgaaatattttcagtatatttattttatttatttattaattatttttttttttgagatggagtctggctgtattgtccaggctggagtgcagcggtgcaatctcagctcactgcaacctctgcctcctgggttcaagcgattcttgtgtctcagcctcccgagtagttgggatttacaagtcaattttttttttaactaaaactacagaatctatttttcttggtctcatactcagttttttatgtagtcacttagtaaataacctaatttgcttgttttctccacactaattttagggtgaattcctcatttcgcttttcagatcatggggtgagggggatggttgtgtgtgtgaggaactgaggaatcagatggaaaacaatgcctctgctcctttgagtataatcagtgatatttgaggttccagggttaaatgctgcatttttatttctgacgttcgtaccttaaaatatttgaagaaaataaactatttcattgttgtcagaaatgtagttcttttattttcctgcccctctcccctttctaagtttctagaatgttgagtaggtagaacatagatgctccttttaggatcttttgctgtggaatggtccacaggtgaatggcagtaatatcttaaaatgattggccccctctctctttgtttccatcaaggatacagttgatatattagttggatggcatatagatcatactcagaaaccttcgctcacgcagcaggtatctggtaagtcttgcagcctataccagttatttaaatactgtcggggaggagcagtggtcccccagtgaccatctatcaataacatttctttaataatgcaagaaaactaattcagagaaatgttatattgtaaatgaacattacttgttagctaaatatatattttcagaagaaattactagtaggtgggtagaataagtacagacaggacttacccaagttatttgtagtttgtactggtaggaaaaagtatatggtaagaatatattgcagtggcaataccctgaagtggacaatggaagatccaagttatttgtaacattttattgtttttctggttatttttttaaaaaaggaaatagggttaatttggagaattgtcataaatgagaaatggttttgtttcccatttttttggagttaagtgaatgactagcatggctcatttgcacatttcagcttgtttcaagtgtcatagtttctcgtaacttacttggtgtaataaacttttgaaaataggatattcaggtgatagtggtctgtttcattttcactgaggagataagtatacacctttaatggttagatgtggccctgggattagccaggccaatggtagattgtggcattttagtgttaagtcatgtgtagtgacaatatagataggaaatttactgaaaaagtaaggaaataacatttacatgttaatttttgcagaaattaaagaggtattaattaaagaggtattggttaatcgtgatcagcatgtttagcagtcttaattttatgatataggacatgttttagggtatgctgcttgaaaaccggatactttttaaaacaagcctcttatatttttttaatttggattttttggtgttttttctccccccaccctttcacaatttcttatacgattccaagggtggttgcagagtttggagccattttgggtagctgatcttgcattttctacgactcttcttggtcattttctagaagacatggaagcatatgctgaggtgagtatatagaaagctgtttcttaaaattttggttaagaaaaaatcttaaattgtgctagatttattttaaaatggctcagacctcctgacatttaagcagaaattacaagcccattgcaatattttgaaaaaaaaatttttttttgagacggagtctcactctgtcactcaggctggagtgcaatggcacgatctcagctcactgcaacctccacctcctgggttcaaatgattctcctgcctcagcctcctgagtagctggaattacaggtgcccgccactatgcccagctaatttttgtatttttagtagagacggggtttcaccatgttggccaggctggtctcaaactcctgaccactggtgatccacccgcgtcggcctcccaaatgctgggattataggcatgagcccccgtgctcagtcagtattttaaacatttatttcagatgtatttaarttaccaggagaattactggagagactaaaagaaacgttgcaagcttcgtatttcgcaaagctttacatactcttggtagctggtatttttctaaagacattttttgttatttatttttattttttgttcccagtcttcagagtcttaaagcaaattgatgttgtgttataaaaaaacacaaaacaccaaaagctcctaaagattttcctcttacatatgtacgggagatctgaatcgtactttggaggacaggccttggcttcagccagcttttgtggctgtacgaatatagcataggagctttaagagcactgctgaagcctctgttactggtacttggcttttctggccccactgtcatggcttaactctgtgctatctcttatctgaatctctttgtgtttctcccctattcagatcaaccaatcaaggctcccataaagattttggcctcatcttgtttttatcgtctttgctgcttgtagtcaacaggaattcagtacctttagctgtactgatgtgtttactctttcctagaaaagcaaggaaatgttttgcttctgtgttgttttttctttgccccccacacctagaatgtcttttttccacagcccacgtttaaagctgat

SEQ ID NO: 93554 - DNA, 185039 bp, Homo sapiens
ttccatcattccgttaatcttattttttatttatatacagaagagcaaaataaacagtgcagcttcaacctacccgttggagtttatgtttcaggaaaaatgaaatcatgactgacactttggtggaatttcttattttgcttgaaaagcaattgaatattaaatcatgattcactagtttcctaaaatatcttttagtactctaggggaaaagtgtaaaatagctcactctcagatttttaagagaactatgtgtagtcattctcaaaatgcatttcatgcaagagggctctttttcttttctttttcatatatatatatattatatatattaattttactaatatcctaacagatttaataccctgtgaaaactagaaagtatttataactgaataacaggtatatagaaacccaaaggcaattacttcttgtataactatgccttaggcaagcttcaagttgttttttagagcccgaagattaagcctactcaggaattttattcaggcacaaaatttgcatcgtctacccttacatttcctgcctctcttccttttgtatctcttcaatcccaattctgcctaccgttctccaacttggaaaacattatctggctacagctaacactgttagaagccctggagaagcaggtatccctgtgtcttcctgtttaacaaaatacattcccagcccaactgttttcattgcttttatgttccctatgcatgttttcaatttaggctactctgggaaatatttctcttatttggaatgatattagtatataaaataggctagaatttcatacctacttttgaatctctgaagatccttttgttcttttcaggtaaatgtccactaactaggaattaatttgaacttggggtaactgttttccaaaataatcagtctctaactcaaaagacttcagctcttagttattaaatgtatttttttctatttttcaaggataaatgatgtctaaagagaaatataaaatatttgaaaatatgaccatgaaaatagcaaacatgcttgagtgtttgtccacagaactcaaggtttagctgagggtttttcttgtcatgtagaaaagcagcttctttatagttaatctgtgtaaattctgtagaattctgatcagacacaaatgttctattttttactacctttttttggcagagtaataatatatttcttctgggtcatttctaatcttatagaaaagtggtaaactagccattgtgagagagagagaatcaacttcaagcttttgaaaaatattcagagttgaattattaatattgataaaatcaaataccttctgaacccatactatttgcatggcattctattatagggtatgaagtaatgtaagacatatccttatcttcaatatacttataagtaattcagacaataatatataaaggaaacatttttaacacaaggtgcttcatgatttaagagttactgcaaagtaattgttcattcattcaacaaatatttgttgagtgcctactatgtattaaagactctgctgaatgttgggtatctaaaaatgaaaaaaaaaaaaagagtgtctgtcatctagggagatgaggctagagagttagacagggatcagatgatatgaggtcacagtaaagtgttatctttctttagcctgagaactgtggaaaggtattaaaagtttttacacaagggattggcacaattaattgtgtttttttaaaagatcactctagatagatgccatgtggaaaatatactggagggaaacagacaaggttatgatggtggtagaggaggagaaaaagaagaggaggatacacagagaaaagtagtgaagtaggtttgaaaattatttaggaagtaaaatcaaaaggatctgatgattagataatgaacctaaagaagaaaagaaggaacaaatctgctctgattcctttttaaagggttgaagacttgggattttggctcattcaactgatgactgatggggctgtttacaaaaagagaacactggatgaaggctgatttaagaggaaggtttttatggatttagttataaacacattcagtttggagagtcttcaaaacgttgaagttcacatgtcaactattcaattagaaataaaatatgggtcaagcatggtggcttatgtctgtaatcctggcactgtgagaggctgaggtgggtggattgcttttgtccaggagtttgagaccagcctgggcaacatagagaaacctcatctctgctaaaactgcaataaataaataaatatggaaataagggaaaaaatgttaagctaaagataaaatttgagaatcatcaccaaatgattggtcatagaccttcatgagctttcttattagtatatacagtggataataaagtggtttcgatttaggattctctcattatgaattagaagaatctggaaaggtttaatgggggaggtgagctgaatcatgaaaaactatagaatatggataatacgagagatgagtaaaatgaatgaaattggtaggcacacgataaaaatagaaataaatagaaaagatatttttaattgaaagtaatgaaaatactaagccaaagtggcttaatcaaaaaaggaatccctagattcacatataactgaaatgtttagggtattcctactgcaagcaaatctctctccaggagtgaaacaataacagaacccagttcttctttttctgtttctcagctctgtttccttgttgttcacctaatttcatgcaggttttcctctcatgatcccaagatggctgccagtagttccagaggctgcattttacatgcttatgtccagtaagaaaaacagagcttttttttttttttttttaaatagaatagggcaaccaaagcctcagagtggagaccaattgacctaataaggttatgtgctcattcctatcattgcaggaagaggttgagatacactgattatcttaagaaaattagagtgcaactttggagtggggataaatccacccagcaaaccacctagagggttcagaaagggataggaaatctggaagctttcatattatggggagaattaaatgccaggttaaggaccttggactttgtattagaccattcttgcattgctataaagaaatgcctgagactgggtaacttataaagaagagaggcttaactggttcatagttcttcaggcttttccataagcatggtgctggcatctgctgggcttctagggaggcctcaggaagcttacagtcatggcagaaggcaaaggggagcaggcacatcacatggtgaaagcaggagcaacctttttcaaagctcgaagatcttggtttttggcttattcagctgatgactgatagtgctatttacaaaatgagagcactggaagaaggctgtgtttaagaggaaggtttttatgggtttagttatgaacccataaaagatgccacacacttttaaatgaccatacctcatgagaactatcacaagaacagtaccaaggggatggtgctaaaaccatttatgagaaacccacccccatgatccagtcacctcccaccaggccccacctccaacattggggattacagttcaccataggatttgggcaggaacaaatatacaaactacatcaaacttaattcaatagacaaagagagctctttgttttgaaaagaatagggatccaatgagatcagtgctttaagaagtacgtcttaggggccgggcgcggtggctcgagcctgtaatcccagcactttgggaggctgaggcgggcggatcatgaggtcaggagtttgaaaccagcctggccaacatggtgaaaccctgtctctattaaaaatacaaaaaaaaatagcagggtgtggtggtgtatgcctgtaatcccagctacttgggaggatgaggcaggagaacacttgaacccagaagatggggggttgcagtgagccgagatcatgccattgcactccagcctggggtgggactctgtctcaaaaaaaaaaaaaaagagtcttaaggcaattacagaacatactatagcatctaagaaaaaagaaatagagaaatctattaaagagtctctgccaatactttaggaaaaagatggtgaaagcctgaactgtagttaaggaagaaatatttatgaagggaagatagtagtgaagtgctaaatgtgaaaaatagttcagtaaaaaagaatccacaagactttgtgagataagaataatgaactttgaggtgaaacttaagtctcttactgagattttgagtaatgtcatacatagctttgtcaccgaggcaaagatgagagtcttcctttttcctgctataatactggaccgtctccttccaaaccaagccctgcgctaggctttccattccattccattctgttttaattcattaccgtcatctcctgtcccattattctccacatgcccaaatctcctaggagtcaaaaaaaaaaaaaaaaaaaaaaaaggcaagttccaacctctgtcagaatgaaggctgtttttgactctgcatcatgaaaccttctccttattggagttaaacagtagctatcattgcaaccgtttcagtggcacttactttttaacacattttttgtacattttgtcaaccagaaatgcctctatcagcaagaaacgacaactgaatggtttacacaggtagaatttcagggaaagccattagtgctatttgttaagttgctcatccttcacaggccctatatctttgtgtttctctggacttccattgtcttttacatcatggggacaagacagctgctctatcccgaaagcatcatgtcgtcattcaaggcaagcaaatgtgtgaaagagagaagagaagcaggaatctgtttatcaataaagcaatattctggcaggatttcttacccagcatacttcttatagcttatgagcccaaatggggagccaaagtggggtcacatgaccactcttagcagtaaggaagaatcagaaagtgaacacttgattttctgttctctatttgtgagaggtgtagcaagaaagaagagagctgggcgcggtggttggccaagcaatagaaccttctctgagaactattgttatgcagtgtactctgggtttgcatgtgtgtatgctcttgtcatcttagttttgaccatgtatttatctgtacatttcatttcctctgttctttaggagagtacttgcatggttgattaccaattttaaaaatagatgttttcttctctttttctatcagccactaccaacttctgcttaactcatccaacaaagattctagaattttggttttcccgaataggcaacacattttgactaaaaagaatattttcttgtttatacctaattatcttggcaagtactacccatgtgaaaggaaatatagcaaaattaccagatgattccatggggatttaaagtatcccattttatcttttacgggggtgatagagcctcatgtaaagaaatatttccaagagacctcatcaacctgacttagaaattcagctgcaaaatgtagcacctgcatatcaaaaataaaattagtaatgatatcacctgatgcaatgtgtagaaaaaaatagtcaattaaagcaataggaattcaaccagaatgccctgcaggcagcatcatgtaattctgacttcacaatgacatgaaattttaaatgacaactctgctaaatcagggagcagcaaaccctggccaagtttaaatttagtaacactgaaaataactttctccatagcagattctctatgaattacaggtgaccgaccacttctttttctgttctgtttagagataatcagatactcactgtcttcagcattggtgtcttctattctcaacggcatttctggtggccaccccaggagtctccctgacctgttttaaaacccttggaaattaaggagagaatccactacatatattcctttgaaagtttccaccatatatgttcaaaaattgctgaatgagcacaaggatttgaaggtaagcaaatttagggggtaccaccacacatatttgcataactcttaatggcatcaaaagtaattatatattttaataaaatataagaaaggaaaagaaactattaaatgtaagaaaactatccatgtatgtgtagttccacagcaaaaaggggaaataaataaaacataatgtttaaaaattgttatctgtcatgtaaatgtaaatacaagaagggcagagtagaaaccttgatatttgataatcagtatcacattacaaagcattaacatactgtggttctcaaagtttaatgtgcataggagtcacatgaaattgggaggagggatccttaaaatgctaatccctggggatatttcacagaaacgtagatccactaggaatgggatgtggcgtaagaatgtgtatttttacatttacccactcacaagttatcctgatgcctgtgagtctgaggcctttgagaaacactgaaagtgacattcaatacaatctagttcccattttcaaaccttatgctaaacctgagcttttatgttggttgtttcctatagtcataagaataaataaggaaggggtaattttgttacagaagtgctaaattgatgctccctttttgactcccctaatttgagttattcctttttaaagttcagtatgatgggctaattcccaggtgtcactatctctctttcagagtgatagccctgtcattgttctctgtagctattgctctgtttcgtgtaatgtttcaattatttagatatttagggttattgtatctaattataagaaatttctaaaagatgaaaataatgagttgttactaggtttggtgaagtatttctaaattttgaggattgtgtctttttctcttcattttgaaagctcagacttagattttaaaagaacaaatctgcttaatacctctttccattactttttttcttagcaaataagaacttataaatcatgtgatacatttacggaagtttacatgtacatttggtgaatatcactttattgtatttctgtttcctatatgtcatttagcaacttcatttttataatttgtaattttaagtttacaaaaggttttttttatttcagtgaaagtgtttagtaggggcatattcagatcttaaattgtgatgttaaaggttcaataagatattatttttatagtgaaggctgaagtttttaatcaaaatccttttattggatttcaggcttatagacattttttgtctctattagtctttgtgtacacttgttcacattatgtagaattttttatccataacgtatcaaaaggcaacaataaacctttcatcaaaaagaagtatatcttaatagtgccaattagcacatattagctattagttttacatgtagagaattgaatatagtcatttgcataaaataatagagtacttttttcaagtaatcaaaattaaaaatttgcagtattggattaactataataatgaagtttcacatgcacttgttattagaattgtgctcactagtaagattgtcatacctgaacatagcctaaaatttgtagttcacaagtttatcattggataaaatctccaaataaaatttcataaagcttttagtgtaaatcatctgcaatatttcaatttcagagaagcatacctttactcatctctctctttctttctttttttcttattacttattttttctggaaaaaggaacaggtagagaaagaatgaattgtgtcttgaagtgaatcatgttyattatcattggtgtatttatcagactatgtttttaagttgcagtttcttaaagaaaacttacaatgtagtttcagggaacctgagcaagacagtctcaatacgcaggaagcaaaacatgcaacagaagaataaattacagaaactttatagaatcatagaaacataaagttttagagcagaaatggaccattttgatcttctagtctgtcccctcatgtataatcacattttctcttcatataaaagtctcttcatataaaagtttctcatataaaagtctaacacaatgagtagtaaacaacaatctggttagggatgacatcaacaaggggaagttaagtgggtgtttttcaataatgatttcttcaataagaaaactaaggggaaatttttcctccaagatgaacattgaagatttatagatacctaagtacttaaaattgaatttaaaataatttgtgtccaattagatcgaaataatttttaggtataattcttcatttgtggaatattgtagtggtatgaaattctccatgttttcttcttcattaaacactgataatttcaaattatgacaattaattccttggaaagattctttatttcttgtatcaaataagacaatgtactttcaagaattctctaactataatagttccatttggaggataatgttayatgtttggttccattagtgttaatatgtcttaattctctggtgtaacatacgkttagtttcaccattattacaaccagctgcggttggcctacgattttgttcattctgtctgaatccaaagtaattagctctttagtttaatgacaatatttgttaatgggtttttagggccaaattctgctgttcgagagtggstggtatatttgaagataaaacctggcccttatgttgtaagcataagctgtgtaattttacttcaagatgatggtttacagagtttggggtaggaaaactaaatgtgcatttgtctgaagtttctcattttcaagaagcagaaaataaaagtgacagtttatgtagatgaacagcaaacccactgaaagttccctgatacagctatcctgcatgtgttattctatagctagaatatggaacacaatgacaattatcaaacaggctttagatacattcttttatgtgacaggacacacactgagtttttaaagtgcagtgcaacagttttgatcattgtatttttgaaggayttagtgaagtggaaagaatccttgcctgggagtcactagggttcaaagtctgactcagcttcctagtagcggcatgaccctaagaaaatattttcacctttgcctgaacctgtttcttcatcctaaaataagacttttacaccagatgatcccagagggtcttactggccctaaaatgataagtctaacttgctttaaaagagcactataaaaggatggtagggaagatgcaatgacttgagctgactgaacaaacaaaacagcaagtctactactagaaggtacatggggatattttggccttacaaactttccttcaaygccttgttacttttatcctrgagtagagaaatatttgaagggttttatgtagaagagactataagtcatgctattggaagtttcaaggagatgaattttggcaaaatttgaaaaaacttacaaaactagtaacagttgagatacccaacaatgaataggatgccatggtagataatgaattcaccatcccttatggtaccaaaggttttatgacctgcccaactgcccttcaaggtgtaaaggctagaggcaaattttctgaacatactggaacttaggaaatattgttatcaagagtccatcttgaaacaaccattagcaactattagagcccttcttgaagcaactattatctatccagccaataagtgactatagaaattactgcaaaaaaactgattgcaagcattgaatatttaactctagcwctaaatctaagataaatatagagattagggtgatgtaatagaacataaaagtataatgtcctgacaatgtaaaactaaaacaactaacaaaaattaggaaagacacaacagaaagaagtcggtgtgtgtgtgtgtgtgtgtgtgtgtgtatatatatatgtatatatatatgtataaaataagttatttgattactttattctcaatatcaaggaatcaatgaatatttttcaaactcacaatcaaactatagaagtataagcagatttaagagtacaaaaaaagatataaaggagctattgttattgcccagaaatagctggtaaaaaatggaaacagagagagaacttttcctctcacacataataggaaaatagtaaacattctaaagagataaattatcaaggttatgagattatagaaatgatataatttattatgtgagcctataaacattatgaattagaagaaaatttatattttgaagttacccaaaatagaccatatcatgaaagattttctcaaatcctttgtgacagtatgtttctgtcatatctttcacatcaataaatataaaaaatacacttatttctttaaaatattttcaaattgtatcgtagcataaaacccaattctaagttatacaagtatacaaccaatagaagctaattcaaaactttgaaaatgaaaggataggcaaaggtgtactgggaaaatgctatctaaagaaattaggaattaaaaatcttagtatcagaaaacataaaatttcagggcccaaaagcatttactaacacaaaagagggactctataataaatgctgatgggtataatacataatgaaggtatatgatcttgaataagtaatagctttaagagctaccataraagtttgttcagcaaataaacttctgaaaacatcccaagaaatagaaataacccattttttaggtggtagactaagtttaaaaattcagctcctgtattatgaagccaaatatttatattgaaatttattttcaagacaaaatatttctatatcaaagataattaaaactactcattaaccaaaaattaggtacttaaccagtcactaaatttttttcattatcaacaaaaagaggttccacgtagcttctctttttgaaaagaaagcaagcaagcttccaataaggctgtaaacgtatgcataaaacttttttgatttgaagaaaaatggaatgtttggactccccctaccctaaacagctattctaaacagcaggatataattccagagtttctgcagtcaagaggtttctgctgagcagaaatwmttcttcaatttaggaatgcagatgataataattttcctatccttctcgcagcaggtttcctgccttcattttgcagactcctaagctcagttaaaaacaaatagggaatttcagttccaggtaacacattcttcaaacatagtcccattaacccaacttagttatcatgcaaagccgcttagcttcactagtgaaatggaatacagttgaattgcctttctaatgtaatacccatttgtgataaatgcaaagtggtttatgatggcaaattttgtagagcatgaaaacttatgagaaaagaagcttatattttctaacctaaaattatgaagaaatgtcatatatgttggcatgggatactcctattaaaatgaaaaaaatattcaaaaatgaaaatttaacacttggcctttattatatatacctcagcaaaaaaaaaattaaatcgaactattatatttcacagtaacatttttcctaccttgcacattctttctaatttaaatgaagtttctctagtttaatttctttccttctactagatctcaaccacgtggcccaaaatttccttgtttaggaaagtaaagattgctcaaatacatcttttgtctgctgatacaagaataatcttttctgtataaatgcaacttaaactatctaaaccacacattactacagagtaggtcactaagacattggacttatccttcaaatgagtaaattctagatggtagtttcctcaggttagctaaaatcatatttgataagatgagtgtcttagctaacattttacagccacaaaccattctatcttcattccttgctcaggtaactcactttgttcttccattccttgctcttccttcacgagcagggtayatatacactgtgccatagcaaccacatttctatcrtgcgtcatcaacatagccaaatttaatgactgattttaataatagaaaaagtaagtttccagccaagctcaatatgaactttataaatgatagtggcttgatgtgagtgttctgatgcaggagagttgtgcattgtacagtgatttcagctgagaatcaagacccattcctatatacattgtaattcaatgcattcttcatttcttcattcattcaacaagcatttggttaataactactttgtggtaggctgttctaagacttgagatacatcattgaatgaagcagacgacaagctctattttcatggccttgttgaggcatggcaggcaataaaaaacaattataacaagtaaatgaattatgtggcattatggactacaataaggtataaaagaaagaaaacctaaataaaacataaaatggataagaaacaatatgacaagatatgagacgtgagatcggatcctatactttgttccagttcttctggctgatgtttttcaatgttcattcttgttgtcttaaaatcagaatatgtgaattagatttggagagtggagtctttattaaatgagtgttgcgcaaattttctttgtttaataatcagcttctctacatttgatattcatacttgagatacttacaagctctccccaagcaatactgtgggatttccaaaagggtcaaacaatgaagaatattaaatttaaatttattttctttttcccgatagtttasaacccatggagtaattttaaattattatagtatcactataactgtaattcttgtcagtgatgttaagcaaagcctaattagtttaaaaagatgcaaacatcagctaagagtatgttaacttttagaatctacccggattttaaaggtatgtcattatggaaccattagataaaattcttacttgattatcagaaaaatgaggactgaactttacatttgaatatatatttttaaatattttatgtatctttttaaaattatccattttataagtacttttcagtaaaatttagtaaatttagaacccatggaataattttaaactattatagtatcactataactgtaatcctggtcagtgatgttaagcaaagcctaattagttcaaaaagattcaaatgtcaggtaagagtatgttaacttttagaatttaccttgattttgaaggtatgtcatyatggaaccattagataaaattgttacttgattatcagaaaaatgaggactgaactttaaattcgaatacatatttttatgtactatatgtattttttaatcacctatagtaatttttataggtaattttattaaaaatgtaggtaattatagtaaaatgatgccacttttagacttatttttatgttaattaccatgtaaattcttacctaccagtcctgtagcatcacagactgattgagctggaagtaatttcagaatttctagtccaactgcctttgtttgacaggtgtgtgaaaactgagttccagagagggaaagtaatttgtccaggttagatggtgtgtgcaagtccctgtgccagttaataatagaactgagttggaaaggaaacctattcttttaaatcccaacctagtatgtttttttgtaattgactctacttgagatttttcattgcctattatcaaaataatgtttcccttaaaattaaggagaattgaccatatctttgcatttcttaaagttatctaattattgagtgtgcctaagctccctgaaatagcctcagttgtttaaaaacctcttcagcacaactggaattagacttttaaaaaaatgagaatgatcttatctacagccacaccaccctgaacgtgtccaatctcatcagatctcagaagctaagcagggtcggagctgtttagtatttggacagaagaatgatctctggagatttttttttctttgaaaaataaatgaaattatttatgaagccatgaaatgacttaccatatatttatcaatatatggcacaaataaaatacaactgtattatttttcaatgaattatgaaagaagaaaatactaagtagtaaagtgctgagcttggaaaataacttaagtaacgtctgtgccctgggttcctccgagtccttaggaagtgatacagagtcatttgaaaactctttgaaacctcatatgggaaaattacataactcactggaaaatttcagtagatttaatagagcagaaagttaatatattcaaaacacaaagaaaagtataaaagactgtctgctaagcctagggagtttcatatgcaaaaaattaaataattaaagcaacatcagttattttcaaagacagttctgagtttaagcattataatacatcataaaaaattatgcatttggtgcttataaayggattctaaatttccttgaaatgaaagataaaaccatggctttatataatggcaaaatgaggctttctcattgcacagaatagaattttcgtatgtatttccaggcataccatttattaaaccaatataatttaaattgtaagaaaatttaaaaatatgtataactttagagacagggctctaaatggtttgataaagaatgattatggaagaagctgtaaacaactaaagtcctgaagacttaataagtactttatgaacttttcaaggttttcatggtttttctggtagtgaatgaaatagaaaaataaataattcaaccagcttttactttgattgttgtacatttttgaatcatataaaattaagaagctaaaaactggatcttctacctgttccagtacacatggtaccattcaattaaagtcttctattgataagtaaagctcattgaaaatcacagtttaaaactacatctgattcttattaatgtgatgcccaattattagcattctcgcattaggcattttagactaattgtttattattttcaataataacaaaaaatgcttaaaaaatacaaagctaatatatttcaccttaccaatgaaagaaaaactgtgaaaataactaatttacgcttatttttgatggcctgaattcattttgtctgaagcccttagtgatgtccttggaaatgtttatccctctcctttccctctaccccttcccccatgaatatgtatgtgatttagaaggcaacattttttttgcatatgcttttcccaaaggaactttatttttcatttttaatcacttcatagttgaattgtcctctgatcaacaaggggattagtgggccacacgtcccctctacgtaaacctatatggtccaagagtgttgtattttgcctcttgggctgagtaaaatcgaacctacctttgcctttcgttgttttttcacacattatgtaaattggtaagaataaaaataatgtgattggaagtacagcttgacagacaatatagtgtaatayaatatccaaatacttatgaggtagcaatagtgccttggggcaccacatttattgtgaatgaggatttgcatttacacatttttctctatggtttagattgcatactaaattgctgtgggaaagtagaactgtttttaaaacattctgcttaaccactytacgggtaacaaagaaatgccaaatccagtttcaatctaatttgggaagtaaagtacagaggcacaagaagtcacattacacaagagttaataataaatagaaatttctgtatggattgacatgaccgttataaattatccttctatatttcatatctaaataaattcagtgtgtgcagaagtttaagcaaaaaaaaatagatttaaaaagttttattcatgatttaacagcaagagtatatttcctaatgatttagactttggacataaaaaagttacgtgtttgattctgaacagggaccaagtaatacaactctgattctaggcctactcagggaatggcatttttcatttctttaggctatgctgtttaaataccagctgtttaaataccagttcactcccagctcatcataaaaccacatcattccttcraaacctcgcacctactgatgagcttagtaacctttcaactaagtttttcagttttccaaaagaagcaaaatttttaacattgaggttttgagtgttgtttagtttctgaagagaattattcataccaatatatgtttgtgtaaatatcaaagacctttgtcattgaaaccggaactgcttagttgttcaggtaacaaaatgaaaacattcttttccattttgttttgcaccttagcactgagagtcatcacttacaggaaacaatatatttaaatttgtatgtagaccgggcacrgcggctcactcctgtaatcccagcactttgggaggccaaggtggacagatcatctgaggtcaggggtttgagaccagcctggccgacatgacgaaacgctgtctcttctaaaaatacaaaacttaactgggcatggtagcaggcacctgtaatcccagctactcaggaggctgaggcaggaaaatcacttgaacctgggaggyggaggttgcggtgagccgagatcatgccactgccctccagcctgggtgacagagcgacactctgtctcaaaaaaaagaagaaaagaaaagaagaaatacgtatgtagtttagtgtttgttagaatcatacaagatggtaacttaaatatttaggctaacactaaactcattttaatgcaaggagagtgagggaagtgagtcctactttttccaggttagtggtagagccatctgtggctgagttttctgataacatacaaggcartatagaatagtgattatgaatgtgagctctggaattggatggcctaaattcaagtccccacttctgctacttactagctgcgtgaccttggacaccttcagtttgctaagtctcaatttcctcatctgtaaaatgcagatgataacattgccaacatcttaggactattggaattaaaagagatgtactttacattgtaaactacattgtaaggctcagtagatatagactgttctcatttgtgctattccaaatggtctctcttgttgttccaaaacggaaatcttgccatgaacactttgaactccgattgctgcttcattttcattgttttcattgacttgaaaatgaagaaactgttaatatacaactttatataattatataactatatatgaatagtatatacatatgcatatgcatatattgagttgtgaaaatattcaagtgagattgtttaatagaatacttttattctcaggatagtggttgctttaaacctgcagctttggaaaaggatttaaatggcaacctaatgactttgtcatcataaccacataaaagatctggcaagatgtgtaaatttggccatatgggcatggttggcaagacctttgagttgaaattgaactcacccaacaagttgtttcatcaaaacattgcctggaaatgtttttatcttactacatggtggttggctttctagctaaatccgttagtaaatggagaatgtggccagttagaatagtatgaagcaggagattcggttcatccaaattgttgagcagctggagcaagtgagtcatgttcaactgacactggacagctgtccgtcagctcatmatcatgagaagagctttatgaaaaagcagctggcttcagcactgcagcatcatcagagaaatgcaactgcctgaaataacccaaactttcctcccatccttgcctaccctgagagagctttaacctactgtgggcagccatgaagtccttccccaactaaaaccatgcaaccttccatcaaggaaggtattctttaggtgtcctgcactttcagttttcttttccttttttttttttttttttttttaaggaggacgattctgttctctatctctgggtttttttcctgaaggttttctgagtcagaataagaagttcatcagaaaccattttgatggaataaactagcatgccttcacacattagctcattctctagttcacttttttcaacttcctgtagatagtaaagcaatgaatatgcaatgagaggatatgtgtgtctatatgtatgtctactgtagtgtaaacatgttgatgagtggaattgttcttttagcaaagattaaaagtatcactagaatgcctcctgattgccagcaatgaagctttgtttactattttgggaccacagagtataaaaaaattaacagcctgtatcataactgaagttgcatgcatttatgatatgctggttttatttgtgcattgttgcaatgggctttgccagattgctgagaagagactgctgcaagttaacaagtcacagggctgcctgaatgatttgatttactccagggtctagccagtgcattcagctttatttgttaacctagcagaacattatttattaatgagttcttcatgctttattaaacctaatgtcaaaacacctctctgggaccctactaggcatgtttcctctttgtggtaaggtcttccaaagaaaatgaaaaattatgcagcagagccgcagttaaaacccaatagataccagttcaattgtccttgatcctgtcagatggtatttctgaatctttgtgaaagatcagaatatgatgcagtatggaactgaaattaaagagtccgctcctttagatgtcagtaattagatcccaccaaaatgaaacaaagcttctgtggccccagaagatgagtggactcatcagcggtcacagctaacaaattcaacaggaggtgaaaagtacagatgcagtctgtacaacagtaatgaggaggtataggcttatgcagatatcatagtgatttgagattaataacaatgtgaaataactaaacacagctgtggcataggggcaatagactctattctgaatataccaccgagtctgctggcatatagcagcaggggcctgtgggaaaggagaggaagccttgatggccaggaggacaaccagtgggtatgacaacatacaaaaggcaaaaggcatggaactgtcagctgaggattctcctggcttcctgggggaggggtgggactcaataagggcagaagggtcatatccatggggaaatccaggcagcagggggatataaaagggtaggtgagtgttgacaccctggtttaaggcatcatgacacactcatcaatcacttgtagggagaaccagaaatggaaccagccagggttcggggtcccatgcaagaagactcgatttctctgtcctgagttttttgttgctgttgtttcttgtttgtttgtttgtttttgagacagagtctcgctctgtcacccaggctggagtgcagtggcgtgacctcggctcactggaagctccgcctcccggattcatgccattctcctgcctcagcctcccgagaagctgagactacaggggcccgccacgacgcctggctaattttttgtattttttagtagagacggggtttcaccatgttagccaggatggtctcgatctcctgacctcgtgatcygcccgcctcggcctcccaaactgctgggattacaggcatgagccaccgcgcctggccctgagtttttatcaggaaactacaggacagaaactaaggtttagaaataatagggagtaattactctatctcagcagtctgtgcaagtgtccaggacctatccctgtcacaggatacatgaggtctattggtagtgaggtccaacagcaagtcatgctagatgctgggactgaggctgtatctgccctttctattggccaccaggtttccktgtgccatgattagcttaagagttggaagcatcagtgattcttgttctggggcctagagaaattgggctcagaaatagtgtctgaaaagagagctgtctattttataatttctcagtcttgctctctaccttttgtaacagctaaaattctgygtggcatacaactcagtatttaattatgcagattttgttactgtcctttctaattgtttctgacgtgcagttaaggagtaattatgagctcctatcatgtgctggacacattgggaattaaaaacgtgtctcagttacaaatcttacgggaaacttacaacagagtgaggaaatatacatgtccaaatgtaaggctattataagttaaaaagttgtcaaggtcatgaaagagtaaaaaaggctggggaactgatacagtttgaaggagactaaggagatgtgacaattaaatgcaatgtgggatcctgaattggctcctggacgagaaaaagtacgttgctggaaaaactggggaaattcaaataaactggaatgtttagttaaaagttatgcaagatactaacattgggagaagctagttaaagggtataacaggaactctgcaacttgtctgtaagtctacatttatttcagattaaaagtttgaaaagtgataaatgctatagggaagatgcagatgactatctttggatgtttgagaaagaaagctttacttcagttggcgaaataaagcttcataaagaggcagttagatatccaaaggtaagataagagacatttcctgggacagaaaacagagtgaatgaaggcttaaaatcaggaaaagggagaacttctctaggaaagaaaaacagaataagtaaaatgaagagcattgtaggccttgaggaagaacttaagatacaatttataggtatagagagaggcgagaacatgtagaaagattagtaagcaatttgatttgctagagttcaccatatgtgaactgagactgagtggggatcaaagatggactggggatcgtagagataaaatagtgaaagattttgaataccaagttaggagtttttcatgcctctcctatgcagcaagatatccctgcacgtgttttaccttgtcctctaggagactatggatgagtatgataaaactgggattgtaccttatcttgagatacctggggacaggtatacaggaggaaatatcttaaattggaatgttacaaagaaaagggaggaagctgcagagaatgctttaatctgaaagccagaagacaatactgtacctgggagaaaggttaaaagtgataacagacaggaggaagggaaatactagaccgagaaaggcagagtccctggtgaagcccaccctcaagtctggacccacagcccagagtgagaacatgcattcctgttttcctgcccaatgttgccctttccaaaactagctttgcctgccctgcccacccccccacccccgccgccatcctgtacccataaaaaccccaggctctactggcagcagagcagcaaagaaggagagaagaggagaggaaaggagaggagaggagaggagaagagaagcagccggatgtcagaaagaagaaacagcttgacttcagaaggatggcttgacggcaggacttcgaagaagagttcaaccagggatggccgaactccaggggaaggccacattcccaatccatcccctttctagctctccatcccgctgagagccactttcatcggcaataaaatcctctgcatttaccatcttcaattcattcgtgtgacctgattcttcctgtatgctgaacgagagctcaggatacagaaggctgtcacaytgagctgttaaacacttaagccatttgsagacagcaaagctaaaagtcctgtcagcacccagaagcactcgacctagcccctgcatccactcacctgcattctccccctcccatgaggggttgagggttgcaggctgagtacacaaaccacccctttctcgagtcccttgaaggggtcaagggagctatcccatttcaaaagaacttactaactagagtgaaggctcttactaacctactgaaacaggcaagttaagagtgttgtaaacacaggcaatatatttagagttaactgctttaaatgttttcaagagataaaatggagagagctttctttgatagaattgcaaaagtaaatatgtctaagttaaaaagaggactattaaaatgctaaataatactgggaattatctaaatatataaaagcatttatggtctaattaatgctttttttagtagggaatagtaaactgcaactgatgttttgttttctccaccaggatctatagaatatgaatgttggcatcatggtgttagggttcaaaaggaggaatgataaattggaggagtgctcattactctggggcagcaagtgagaaaagagcaatgaaacatcaacatcaccatgtatccatacatctcccaactgaatggtagaagctctctgtagagaaaatatattaggaatttggaatatccatcatcactatgactacaactttgcagaaggccagcctgcccttgttgaagaaagctctgtgtatcctagagaggagactccctgtggtgataatgatcctattaactcccagtcagtgtctactaaggagcctggttataagtgaacagcattatctgttagcaagcagggactccattaacacaaacccctttaatcggggatccaggagaggccgttatagaccacacccacagccatgcttgaaatattggactctggttgccagttctcacaaaatcattccaaagtgtgacaatatgtctttctatcatatttcccacgctgttgcagaacaatgtggggcacataacatgtgcacatgttatgttacttgaggatatttttcccattcattatgttttaggcattagcaattaccttacatgatctttcaataattccaaagcttctgagtattcagagtctattttgaattctatttgattcttcttgcttagtctgttatgccaagtattttctgttccactatagtatcataagtggaaacaattttctggtccttctgtgtaattcaggaatatattaatgaaagctggttttaatacatttttccctgatatttataaagttaaatgcttgtcttagtaaatggagtctttatattaatagaatatggcataattttaggaaatatattcatgagtctcataaaaaattcctraagttactaaaaagaaaaatcatttatatagccatcatataaaatgtttgtataatttcatctttaattttattattttgaaatggcttttagaatgagtcataggaaccagtggctctctggaaataaaacttacagatgtcatgaaactgaggaataactcacacaatggaagttaggatcaagactgagaaagatctgtattgtctacaaaactgggctaaatccgaggaaataagatgaagtggaaataaatgtaaagtcccattctccaattaaaaatttaaaaagtaaattgggaggaacttagaaagaaaaacatatatgaaagattctgggcattcatttaataattaactcagtatgagttagagatgtgatgtaattgcctaaaagctcatatgatattagattatatttgtaataagaatgtgtccagcatgacaacctgtcttactctaggttggtcacatctgcagccatgcctaaaatagtacattatgttttgaaagctgcactttactaaagcagagacaaaatgtgttcagagtacgacacctaggattataaaagggttgaggagtaacctgaaggaatgggaacctttggcctggaggaggtaagatatagtgcgggactgaaaactgtcttcaatatttgaaggctgacttggagaatatggaatttagacataggataaaagagggaggaaagtgtggaatggtatgtaaatcttgtctcaatttacrtagaaattttataactatgaccaagatgtctggcaagtagcagttgtccctgaattgggcaaaggccaatcactgctcattgcaaatgctgagcgagctatatctaaatgcagttggtctgagggaacagagcgccttgtccttggtaccttctaaacctagatgtgaatgacacagaagtgtcccagacsttaactgggtatagtacatgctcttatggactataatgctgttatggtccatttgtctcttggaattgtaacaaaatatcagtttygcgttcatagtaagccatttaatgcagcccctgttaatccagttcatattagttgatgttcacattgccgctgcttaagctggagaattgctaacagttttcttgtccatttttttcagaaaccagagcagctgctacaatagctaaaataagctaaaatcccttaagacatgaattgtgatcacagattttttaatgcattttttgttcatataattgaggtgcaagtctacaagaggcttttgctttcaaattatgtaatgaaaatgtagaatatacctagaggggcacacagatgaatggagctacaaaatcactactgctcatatggaatttttatttcctaatttcagtttgtaattactactaataatgaatattttgtctaagtgtttttgcaacatttccattttatttcatctggttgatttacaatagagtatttacattttttgccttggatgacatatcaattttgttactttggcctttgacagaaaaatcaaaggctatgaacaacctggtatggtgtcaaaattctatttgagtaataattttaatagatttttttaaaaagcccaagatacattgaaagttcaccttatgctattgcctgagaattttctctttctatattaccctgaaaggagaacaaacttgaagtttatgctactgtgcagcaacatacacaagcattcatatgtgtgtgtttgtattttcactccctttcttccctctcctccttctcccatttcttttttcccccttctgacttccagtcattcacccaagatatttgaggttgtattctttaactgatatgggctatttatttctaaccaacttaaattaataattgcatgccagtttctactataagggatagcaaaataaaaattggaacagttacaagtaattttcatcttctgcttaatggctttctttttattaaaataagcatccagaatttgaataccaaatcatttattctaacactgcttaatgagttggtgagaagataagcaatactcaatagaaaagctgaaagaatacaggaagcaaaaatgtaggaagaagaaactttaaaaaaaagagaaaattgggtcagaggaaaataatcttgaaaattatgcacaggaacattgttaaaaaaagaaggtataaaaaatacacaagtttttttttcagtaataaaaaaggaattcaaaatgcacattttttaaaaatttaaaatatataattagtaatttccaaaacaaaaacagtgccaaaatttagcatatacttaatgaaactttgcttaattgaattgaattgactgtagagaatgtacagtctcactggcaatgcagaatgtaaaaaagaacattatacccattttagtttggcaatgatgaagtgattctgaaaacctgtacagcccagattccacagcccccacacctcataattccaatttaactaaactaaaatctgttctttacatgccagcaattgttatgatcccttgtggatttaattcctatccttcttgtttggctttggctacattcattgtattcattgtccaggagtatttagtgagcttatagtatagccctataagcactatatttgggaataaacacataacccaagacaaaccctaaactttaaaatagctgcatcatgatttacaatgaacaaaacaccttgcataaaattgtataaagactagttaaagcaggcattatcatcgccttctcaaaattgagagagctaaagcttagagacatcaaaagactcatccagggtcactgagtaagtaaaggagacaagaatgtttctttcctacaatgcaataccaacaaacgtatctatagcttttattagtctatggaccagtcagattcagagtcaacacggcaatttgaaaggatggggtctcctggtgggttgcacactcgcccctgcaatgatcctctcttcagttctcataagcaatatgattctttgtactattctcccccagctaggaagcatttggccttgatcttattggtggtcatgaagattaaatgataccattggcatttagtactcagggtcaagggacaataattgtctgggtgaatgaccagtgcccacaatgaagagttcttcaaccccaaatgtggacagtgcctatgttgaaagcatgttagaggtgaattacaaatagtgaattatgatgtgtttttaaaaattaggccctcataaactaaaattgatgattatcagaatttattgagaatgtgcctaagaatgggccaccaacactcagaagcycccrcacatccacacaaaacattggggtgtccccagtttttagaagaagcattatcagtgtctcaatgattaagttttcagttggctagggtttttaatygctactatttctagttttaattcatcattatctacttaggttattatgaattatttggttaaccgtgaagtatttagtgatccctacttttgtgagtgatatttttggcctaacttagagtaactatactgtagtaagacatgggatgtattgtggttcaaagagggatccctcatacttccatcactagagtagatatatgcacaaacttccctcagaattacacagcatagtatgatatagagtagtatagtacagcacagtataagacatatggtatagaatggtataattgtattacatagtagtaaggtatgttaatagtataatagtactatagatagtacaatataatacagcaacagtataatatagttagtaaggtattatgtatcaccaagattttttttcattggaaaggtgtaaaagacaaatgggtggtggaggcaggggagtcttttgtccaaccaaagtcagttaaaggagagagagtgagagagagagcctgagttatagagcaggataatctgagtttggacttctcgctgagaatgcttggcatgaaacagtagggatgagccttcttcaccatgactgtctttaggggaatccactaggctgctttaatgctgctctttatgcttctctatttataatgaagtgctgtgagaccctgtagcagagatagtattgttttttgtttcaatatcaactggtactttttctctacaatgaaaaatgttttgtccataatatatatcacctcgtctctggttttattgttgaaaaccacctgacttgcgctccttttcttttcaacattttttattaagaaaatatttggaaggaagcaataatactaaattgcagaattacaaaagggcagcttatacagctaaattttaagatactctgagggacaaagaaataaagccactgatgctgggtaagaaaaatgtgtgacaatggaagtatgcaatgtgatttacttggctggctaccatgtaggaggaataaattctataatcttgccaaaacctaagggaaatgtgaattgaatagcaataaataaccttattggaaacagttgaatgtgatatactgtatcctctagccttaatacatgaaaatttctcattgattgcagcatcagactcaagtagactgaagatggggcaatttttaatgtactccacaatgtcccttctgttccctgccacaaccttctcaaacttgatgagttagaaggtcaggttaatctatgtatgcaactccaggctttttggcctctttcaggattaaataaaacttatagaaaatgtttttctctgttcctttcattttgttgttcagaagccattctatgtttataaatactgtatgtttagtaacattttaatttctcttattcgactaatgttttaaaggtatgaccactttagaacattttcttattcaaccctcacagtattgctgtgagctaaaagagagtattatttttcttgcatgtttacagttgagaacattcaggcttagagtgttatgtgacttgctcaatcatatgtagcaagtaagtggccaatctggggccagatatctggtttctgcatcccaaaactgagttaataagaattttttcatgtgaatgattataatttatgatagttttatttctgctgaaatgtctagttataccatatttttattactgagcaatgttatagatgaataagatgcaatttgctagcttcattcagacagtttctcacttattttaaaaatgtgagtatctatctgttttgtgcatcaggaggaaaaaagaaaaagagatacaaaaactgccctcaaggagtttacagtctagaggggaagcaaataaataaatgtgttcactgcaataccataacaatttgtgtagtacaataaaaaatacatttggtctttgtccttcctccacccccaataaagctcctaaaaactgttcgaatttcctgagtgataagggtgtcttttcgtctgttaattagatgactcaagagtgaagagggagcaggaaggtctagaaaaatggaatagaaatagagaacccagaaataaatgcaggaattagagcaggggtccccaaccccctggtactggtccatagcctgttacaaaccaggccacacagcaggaggtgaatcgtagggttgggggtttggggtgggaaagtgaacattacctcctgagctccacctcctgtcagatcagtggcagcattagattcttatagaagcatgaacactattgtgaactgcacgtgtgagggatctaagttgcctgttctgtatgagaatctaatgcctgatgatctgaagtagaacagtttcatcccaaaaccatccccaaccactaccccgagtccataaaaaaattggtccttttcacaaaagaggtccctgctgccaaaaaggttgaggactaccaaactagagagttaaccctttcagccccaccagttgatgtccagggagcggggaagggctggtgattgagttaaatcatcaatgaccaatgatctcatcaatcatgcctatgaaatgtaacttcaattaaaaactttgagacttcaagactaagagtccttccagaatggtggacatgttgatacattgggagggcagagtaactggagagggaatggaagctctgtgctccctaactccctatatcttcccctatgcctctcttccatttggtgtctcctgagttgcatccttaataataggctggttattgtaagtacagtgtagtgttttcctgagttccatgagtcattctagcaaataattatacctaataggctggttattggaacctctaaatttgtaaccaagtcagacagaaatctaggtagccagaggacccaggacttgaaactgcatctgaagtgggacatccttgtggaactgagcccttaacgtgtgggatctgcacgaattctacgtagttagtatcaaaattgaattaaattgttggaaacctagtttgtgttagaaaactgtagaattgggtgttgtttggaaaaaacaaacggcagtgttcactatgccctcaagaaaaggccgtgagcatggttcaaggcatatggagtgtgcatggccagtatgatacccttttgattaccatgtattcatgtttctaccaggcatgttgtgtacttatcaagagctggtagaatttggtcccaaactatttgtgccaatagtattctcgggatagctgtatattttagttaaatgtttaacaggttttagaaatataagtacaaaatgaaagggtagtttctatgaaaatcaagtaaattctttggaaagactcaataaaggcaagttacaaaaaaattctatcaaagtggacaagacaactcaaatattaaagaaaaaataattctggaaagtttaaaaataaagtgtgtgttttatactataaaagtaaatcttatagtgtaaaattacccaaaaaaatactttaaaacatacttagagctttttaaaaatatatgtaaatatgaattaccagtacagaagttttagatttaaaaaatgcatcaaccctaaaaattcgtcagagatgtctatagtattattttgaagatatgaaactggaatttgtagatggtaaaatataggttgtgacttagtaaggaagaaaataaaagagtaccaatcaccagtcctacattcaaagaaaaggccttgattttcctttaaaagatgatttcataatgcatgttgggacctagaaactgatacctcaaagtgtggcattttgacatgctgaactgaagaagcctcaaggtcattctgaccttctatcccaccactgtctctcccaaagcccttatctgcctcagatccagacctatgaaaaggaacaattgttatttttcccttccctgtaagaccaagaatgtaaccacacctgaacaaagcttttcacaggaaaatgtacaagctaatctctgttccctgatgcattcattctccctagtaattccttccacagaattcctcttctctccatggccataacctattttgccaggatggtatacacgcttccgaaccctgttggagggtagggaatcactctgtggttctccctatgtayacattaataaatttgtatgccttttctttaattgtaactgcccaatgggttcctcttgcctgctgcacagaaaatccaatcacactaagacagtggtgttgtggtagagaaaacatttaattattgctaagccagccatgcaggacaggagacatttctcaaatctgcctcccaaaagctcggagcctaggatttgtaaggataatttggcagagagaggctagggaatgggtgcagttgatggttggggatgaaatcagaagagtgtttaaactgtctttgtgtgctgagtcagtttcagggkagggggagtagtcacaggaccagttgacttcattccttggtatgacttagttccttgctgtgcatttgggctgtcatcagaatgcaaaagtctgaaaaatatctcaaagaccaatcttagacactatttgacaataatgatgttatctataggagcgactggggaagttacaaatcttgtgacctcccgaagatggccatcatcatctaattatgcctacatcttagtagaattcagggttcccacataatcctaaccttgtggcctttcatcagtcttacaaaggcggttcagtctccaagcaaggagggagttaatttcaggaaggaactgttaccatctttgtgttamagctaaccaaggcagatagcttgtgaggttagaagccagatggagtcccttaggttagatttctgtcactgttataatttttaaaactacaaaggcagtttcacagttaatctgtcttttgtgagttcagcaagccttcagagggaaaaggggaggtttcccttggcccctacatcttttaagttaacgtgaaatgtacatsttttaagttaacgtgaaatgtacaaatgtacaaagtattaattgtcaatttcccactttagccactttcgcagttaactaaccaccagttctgattacaaaacaagagagttggccatgcctcaactattctgtttttggttaaaatttttgaagttatcgcctgaaagcctagaagataatgttcaaaatttaaattatttgcaacaccattttgtcagaagggaattatgacttcagttttcatttgaggagagttaatcaaattttagtgagtatattactctcatatttattttgaaataaaaagcatagccctcaaatttttctcttttcttctaaattatttatagaacaatagagctctctgaatctaccaaatgtctgcttcattactcttcctccaggctggcttcccctaactattctagactatgtaggaatgtgctctaggctcatgatttcctaagagaggattttgtgactttgctcatttacctgtaaatgaacctgacagccaacctattgagattttaattttccatgcatcaaaccctagtctcacctgctgctagtttcaaactccacttgtttaatttgttcaaatattcattgactatttctatgtaacaggaactctctgggcacttgagatacaaagattcctgccttcatggtacttatattttaraggggaggggagaagataatcagaaaatagcaataaatacaacaggaaaattaatgagtatattagaaaacagtacaatgggaggaaggcagcaggataagtggggtcaggaggaccaaggattggagaatggggttgcaggatttttaaaaattttttatagagacgaggtcttggctrtgttgcccaggctagtgtcaaacgcctggtctcaagcaaccctgctcctcaacctctyaaagtgctaggattacaggtgtgactcattttccccggccttttgaaatttttttttaaacttttttgtagaggttgcagttttaaatagggtggtcaagatagcctctgatgtgatttggctgtgtccccacccaaatctcatcttgaattgtagttctcatactccccatgtgtcatgggagagacccggtgggaggtaattgaatcatgggggcagctgcccccatgctgctattcttgtgatagtgagtgatttctcacagatctgatggttttataaggggcttttctcccttttgctcagcacctcttgctgccaccatgtaaagaaggacatgtttgcttccccttctgcctgattgtaagtttcctgaggtctccccagccatgctgaactgtgagtctttcctttataaattacctctttcctttataaattacctttataaataaacctctttcctttataaattatccagtctcaggtatgtctttattagcagcctgagaacggaccaatacagcctcattgagaagctgacgtttaggcaaagtcttgaagaacgtgaggaatgcagccatgtgggggaatatcacagagggagcagtgaccctaaggtgaaaggtgcctagcatatatgaacagcaaggaagagagtgtgcctggatgaggtcagagagagaactattaaaagaacagtttgactgcccttctaaagatggcaggacaagagagggaccaatggtaaaagcagggagactagtaaacgactattggaataacaagtaggagattatgatttcccactcctgagtgatagcagasgagatgargagtggccagttctagacatgtttagaagatagacccagcaagatttctttactataggtaaaaaagagaggtcaaggatgactccaaggtttttgtacctgacaactrgaagaattgagttgccgtcaagtgaaatagaggagatagtttgaggagcaggtttatggagaaagatcaaatttagtactggacatatcaagctgggatttttattagacatccaagtagaaatgtcaagtcagcaattgcacgtatgagtccaaagttcagaagaattgttatcagcttatagactgctctgttygtagaggagctgatgatcagccagtcttctcaactggagtttcacaatagagttaagcctgcttgccttaaaacatctcttgtatctaataaattaagttatatcttatatgtacaaaayagtactggttatggagcatccttgagagaattgatgaatcattttttgtgcgttctctgaggtgctgatgaggaagtgcaaatgagaaatgttgcttgcatgcctaaagaaacttgttattttgtctctttttcagtcaaattttcttaattctcattcttaagataattagaatcttaaaaatatttgaaaccatcttataaaaccttaaatagaatactataaatcattgtttctcaaaatgtgcacagttttaattggtgtttgcaaaaaggcatgtgtttgggggttgggggctgggggagctcaaacatgtatagtattttgaaagaaaaattaaaattaaatcttttcccaacccagaaatcccctccacaaaggtatagaacaagaaagtacttttattattgaatatgcattaaaccaaaatgtgatgctcgttacaggcaattcactgtgayatccactaagatttttcaaagacaaaaaggaatctcaccaccttgtataaccgagcatttacaaacccattatatacatgttttcaaaataaacaataactagttctcaaatgagaggacttgctaacaccttttgtcacacatagtgtgacactatggggtgatcatctgtgtttgcttattgtctttaaccagaggaaaaacaaacctcattttgtttttgtttttgtttttgtttttagttgaagtttcactcttgttttccaagctggagttcaatggtgcaatcttagctcactgcaacctccacctccagggttcaagggattctcctgcctcagcctcccaagtagctgggattacaggcacgtgctaccacgcccagctaattttgttttagtagagatggggtttcactatgttggtcaggctggtttcgaactcctgacctcaggtgatctgcccctccacccccttagcctcccaaagtgctgggaacacaggcgygagccaccgtgccctgcccaaacctcatatctttacaacaggaggtagctttgcaaattggagcaaggtgcccattgaagttaagctacttgccacaaaactggaagatagagrtgctatcttttttggtgtttgcatttcaaaaagatgactctcatgtccttaagaaaaacatttttgagacataaagctgacaaaaggcctatctagctctcaaaaggtttatagacattttttaaaaagaagtatttattatttattaatacaatggtaaattttctaaagtagatgttctttaaaaaataaaagaggggagaaaagtatctgttcccttattttcaacaggaggattctgactcttatttttaatttttatttgtccttacaatagttaactctggttgtaaaataagataaacatttttttactgtaggacttctcagagctcttaatgtgcttgtgtgcattatcaaataccaaaggagaaatatgttttgcaacatttctcaaacttatttgggcatagaatattttttttaatggagcatttcataggaacaatattccacaaattcacacactggaaaaagccacattgaccaaacagggacctaattccagaaagagcagagtatttattttgttccagtacattatcctgtgctggcatcctttacggccataaaaacttaagtcatttttgcagtcaaatttgtagtttcttattgttttccctgtttattttggtrcatggtatgctattttaatgtctctagttttatatttggttaaaacataaacattatatatttctattttatcactttcataataatggcatcaatattttatgactttcatatttttacccctaccactattccctcagttctacttctagacagttgccctatgtcttggaagtgccttggtatctatttgaaaatcatatgtgatattttaagtttgtaaaatgtttgtgattctaaaagtaaccttttataggccaattcactgctcgagggcactgagtctctaggtagctacacctgggaatagaggtgtgtgtgtgtatatgtcataaacagatgtttggtcatcakgagaattaggcatacaacctgtgattatctaatgcatttatwaaaaaaaaaacttgtactaagtagcagatatttccattaatctctcatttctacttataaccacatgatttacaaagtaaagtccacaatcagtatagaatgcttccaactatgcacaattatttctttagtttatttaattgtrcattgaattttgtgaatttacagagttttctcagaatttcttcatacaacctggtgaatcactttctgtgtcagctctgccgatgtgtagaacagaaggtgctaattgcaccttaaacctattccctatttttctgcattaactctgattgttcctttgggttgatcttggaaattctgatgactatgtgcctggggaatkatcgaattgtataatatcttgcaggggttctctgtttcttgtatttcyatgttgacctctctagcaaaattgggaacattttcattgattatattctcaaatatgttttccaagttgcttactctgtcttctctctccagaatgccagagtcatagatttggttactttgtataatcccatatatctcaaaggcttcgttcattttttaaagattcctttttctttatttttgtctgactgggttgatttgaaggatcagtctttgagctctgaaattttttcttctgcttggcctagtctgttggtaaggcttccaactgtattttgaaattcctctagtgaacttttcaattccaaaagttcaatttgcttctttcttaatatggctatgttatctttcaaatcttggatcacttttctggcttccttggattggatttcaactttctcttggatctccttgagcttccttgccatccagattctgaattccatgtccatcaactcagacatttcaatctggttaggatccattgctagggagctagtgtgatcctttggaggtaacaaaacactctgactttttgaattgctggagttcttgtgctgattttttctcatctaagggagctggcatttctacctttttgaaataatgtcctttgcagcaacatagatacagctggaggccattatcccaagcaaattagcacagaaacataaaaccaaatatgacatattctcatttataagtggaagctaaatcttgagtacacacaaacaaagatgggaacagtagatgctgaggactccaaaaggagggagggagggagtgggcaaaggctgaaaaacttcctgttgggtactatattcactgtctaagtgttgggatcaatagaagcccaaacctcagcattatacaatatacccttgtaacaaacctgcatatctaccccagaatctaaataaaaatggaaattaaaataaatatatatacaatgagattttttaaatttgacaaatgattataaaattcaactggaggataaatatgtaagaatagttggaaaacgttttagactacaatgaattattgtagagtatatgggaagtcatcaaaacctaagagatattaaaatgtttttaaggtgcagttattaaatttgtatgggactgacaacaaaacaaacaaatatcaataatacagaatatatagtcttgaacaggaccaaatatgtgcaagaacttggtaagtgattttgtggcagttcattcatttatttgtctattcaaaaaataaagtactcattaaaaacaacaaaaaaaaaaaaagaaagaaagaaagaaaaaacactgttccatggaatagagaggtctcttctcattttaacaaaaatggctggttcttgaccaactggttggagccctggggccttgggctgtctccatcctgaagctaaacctatcttgtcttttcaaggcaacagctaccaaaaagacagcactgcatctttacttctttacccttcaatagcattctttcctcaatcattgctcttttcacccaatgtttattttttttttccatttacaaacttgcctggactttagtttctccttcctaataacaccaaatcccctcctttaaaaacaaaatctttcaaaactacattaaacgaaacagtaacttcaaaaaataatcatatagcttattatcatcacacattgtaaattccatatcaagtgactcttacttcctaggctaagactctacttctatggaattttaggtcttttttttttttttgtggagctccagcctggctaagaggtgcttacaatgatgctaataattgagttttaggcaagtaatgaaggagacttcacgagggccgctccctgtttatttggttttgtcattagaatttgggcagtacattatctgtttgccctttcaaagagtaaacacaaagaaattaagtaagctaaaagaacctactataaggttgtaatatctcattcttttacaaaagccccactcagcggaaggacgggtatggaaagatctttttgcttttttgctcaactccgtctccctgcaccccaattcataggcaaaacagaaaatcctaagaacaaactggcaaagctacagaatatagacccccatactaatttccctratttaatgtagatcttactgttacagtctcgccaatgcatcacaatgtagcagtgtctcattgtgaagtaccacccggagttcttcatctcacaaccaagagaattaagaagtgtggacacaaagggtgaggttggagcgaaagtttaataagtgaaagaagaaagctctctgtcatggagagggggcccagaagagggttgctgtttttacagttgaacgcaaaggcttttataagaaactgaagagggctgggcrtctcatttgcataagccacgaatttctggtagctccactcctgttctcctagtgtgcatacaggcccttagcttgagttactccatattgctttgctccccttactgtgcatgtattagaggatggaattttccattgagggcatgtcttagacaaggccttctgtacaagttcccttatctgtgcctgcaggctgatttttcaggctattcttttgtttgaaagaattcaaccaaggacccaccctaactgcctgcttgaccactttccctctttctcctctctccaactgaagttcactcttatccttcctgaggacatacacctataaattctatttcttccatttatctacctaattgcatatttattaacaaatgatattatcagttctgccccacagtgtgatttctcccctctcagcataggccagaggccatgagcccacaggattataaaacagatagaatcctggtcctggacacaggtgtatttagtgtggcttgtgcaatgctttaacaatttttttttttaatttgcattcctttactgtggaaggcacactccaagcctgacctcaccactctttattggcttacaacagctgaatgcacacatttacctgcttagtgacatgggcagtgggtctggtctctctatagctcctcagtttgactcatattcatatatctcattttctccagcatacaggatttatttgcctctagctgcaacttcccttcaccaaaatgatcatttttccctttctcagatggcctgacctagaaaactagaaaagatctcttgactgtggaacttggtcatctctggggaactagctccctctaaatctgctgacatcatccaaacagcagttccttagtggctctctggatttaataatgacttgaaactctcgggtaaagtggtggaatgtgtaatctaaatatcaaggttatgtgtcctgcccactttctttgtatctttcagtggtatctattgaagcaggtcagctgaagaatgacaaggttcatacaagtggaaaggagagctttatttctcataaagagttgcagcctgcaaggtggctattctgataggctgggaggcacggcctctggccagatgccagaaacagactgctttgagggtgggacaaataggacagggttttatgctgaatgagatggccaaatatacatattcaataaactataggaggagtcataaatattcatgaaaggagagacctgcccatgtgcaactgagcttcatgcctctccatgggacccatgttctaaaattggcagcattagcatgatccaggggtagaattttccacactctgatgtcaaagggtaaagcaggggacacgaaaaccctcactgtgtatcctccacagactagcctgaaccactccatggtgagtgctcctttatcaagaagaaatgctggttggctgttgtgccaaaaccacaaaagggagggccagcaatcaggcagttggttgaaatagcagtggagtcttttgaaagggctggtttctgtttagcccttacataagaaagcctaaaggcagttaacaaagagactacaacgtgacaaagtgtgtccgacctcccatcctgtcatggccaggaactcagtttccagagtttctctgatgtccctttggccaacagttcgttcatccagttggaggggggcttagaattttatttttatttacgaagtgatcataattatttaatattattcagctaaagggagctagcttttaggaaattaatttcttcaggtctttcttgcatccaaatgcccagatttagtcaatgcaaaagatatctgtgttcaaatcagttgaaattagaggattgatttctgagttttccagcacgaatgataacttgtttctttcaatatgattctcttctcttcaaaagataaacttcatgtatcttgatgaatacatgtctcctcctaaagtatgtacataaggtacctagtgacagtatgttccttgcacttatttttataggcccatttatcaacttacttcataatttaggagacctgaatgcttagatgggctgtgaaacagctattcagacatcattcagaatatatgacttggaagctgcccccaggaatagatttctgatttgtagaagagagtacctgtccaaaggaatgtataaccataatctaatattgcttattgttagtgtgaagacacatgtggaggaaatttcactcataatagtaatattgattactcaagaagtagttgtctttgggggataataatactgatagttaacatttttaagtgtttattatgtgccaggcattacagtactatttcatttaacccttaaaaaccctacagtttaggtactgtttcttttcctattatatagataaggaaattaaggcacaaagaaattaataacgaatttgttcaaggtcagtgccagggttcataccagggagaatgatgccaaagtttagtgtcttaaccttcatgtgacactgctgcatatacatgcttctaccacagccattgtagtccccaaacacaccaaactctgtgttctgcgaggttttctctttatcaataataaactttactcaccaggtccatcttttggcttgctacatatccttcaaaatatggttcctatatcacctcatgtatgaggacttccctgacttttctaagcagaattatagctcttcttttcttcagctcccataacactgtgtgtgtgtctgtctgtctgtgtgtttgttcatatgtttgtcttccaccagtgctgcttatgaagcaggtagctttcatctccagggttccacccattagtgattaatagaagtttgctaattgaaagtgctccatgaatgagttaacaagatattaaccacttagtcctggtttgataaagactgctgtgatgatagcatgacagaacctgaagaagaagaaaaaaatcccacagatatacacccatgctctgattaagttaaacttttaaaaaggtgggggcaggtgggagaaatgaaaaaaacacttagattataataaccttctatgaaatgcatggatatagcagttggagaaaatagtaaaatcactttctgttgcatagaagctcgtaatatgacatctttcagagaaactgtggtagtctatatatattttgactgacgttacagtatcttatttctttttactttatacccctagggtagaagctatgactctgggaccaattttccccaaattgtatagttctgaggtctctagctgaataatctgtggcyctccctctgagtcttctaaattttccaaaatggagtgccaccctttttcctgggtcttgcctttttaattgacactttagaattacaggacagttggctcttgtcttgtaattttgacaagacaaagccttgttttgtaaagtttgaatgtatcattattcaaattccttcaaaaaawcctgggtggaagaggtgattaaaataaaatttaaaaaagctaggcaaaacaaagttgaatgcaccttaaatagacaggtttggccttgtactcttgcctcttaacagctttgtaatgttgagaaagatacctctctgtgagagagttctctaatctgtgaaatgggatgataggtatctatatcttatagttattaagaagattaaatgagttctgtttgcaaagtgcttagaacactcaaccatcatcaagttacttagaaatctatatgcatacattaaatctcaacaaaaatgctttcaaaaattattataattccatgccctccacttaatgaaagtgatagaaaaccctgtgaaaaacatttctccatgttttaaaaccctggttcaaaataacatccattttgttgcttaatttcattatgttgtttcttatataaggattgcatgacacattcaattttaaagttagtaacagaaaaatattttctctcttgaagaacagataactgtttctataaaatattaaaatttatatgttacctttggctttggggaataatttgccaacagaattcaaggtaacaacctttggaggaaactgaaatttaaatgccgtgttggggagatacatatgtcttcatgatcaattaaatgaaaatagggttaaattttgattgcagaaactaaggaatctaatcaagcggtctgcctcaaagatggtcaatagaatctagagtggaggtgggccaggaggaccacggtggacagggccaaacatttcctcagaaaatagttccctccacacacagcccagagtaactgtcaagccccagcttcggacactgcaaggcaccgatgatatggatatttgactttgcctgaggaytatcctcactcaacttaatgctgaaacaraaatgaagataaagtctctgccacttagccagcatccattgtttcgttttcaaagcctaggaattacctgcctcaccactgcttctcatagaatttgattctcatgtcatctttccctggccctaacgtgacatttatttcagaacaaataagtatagtttgtagttacctgttcaactatttctctaataaagcaagcggcctattttcatrtgttttttcttcaagctgagttaaaagtctacttgtatatattgtgttaatagccaataaggcagaattgagtgacaataattatacatttaagtatattttcattttatagtaattactctgtaattgaaaataaggagagagatcaaaagagagagagagagcacacacatacrtggaatacacattgtgaagaacttcccataagaggaaaaactgtcaggatatatgcagtgggatccttttgtgagtctatgtttttctttgtcccatattttctatgcttaatattattagaccaccattaagtctgtaccaaggacacatgtcaacagttgaagtcattttctctttggccacagctgcagtttcaggttattcatgatgaccctgtattcaaagggctgcaataaagtgaccttcaccccccaataatctattcaaataactaatatacatgttaagtggaaaccaggacagatggcaatatcagccagagaagctcttgtcattgttggagtctggtattctgtttcagtctacatggtgcattcatgccaaaaagttatcttcacaatagcgaagttctaaaagaccaagaactccatgcagagctttatgttaagatagcaaagaatatgtaatatcttaatattgggagaaatatacataggacccatacagagactttgcttaattgttgaaacttattcacataaggagaatgaaaagaattatatatggtgatgattctttcactcagttgacaaatacgtatcagggaccttctaaatccttggcactgcactctgttctgaggatgtcatcataagcaaggtagtcatggtgccttaactaccttccaacccccagtgaaatgacttttaaagggtttatttttttaaaaggcacacacatgtaaagccaaaatgcatgcactaggagacaataacaacaaatcatttaagctggaaagcagatgtaatcatggaaatgaatttttggaaaccccagaatgttgaattctaaaaccagaagtggagaaagtccaggtgcaatccagtttccaccaaaggacttccagaaagctcaggaaatggcctcactgtgtgtctctggaactgtgaagcaagggtaagcttagtaacaggaagattgattaagagcaactagacaccccccatctcccactcctccatgtagctgggaaactgaagttttgttccatgactagagaaaaacagagtcaatgaacttggaataattaggcagaagagtaaacaaagtaccaaactgaaaatagtgcatttaactaagagtttagctacagaatgttgagactcacagctttcttcctcactggacttagagaatcctggcaatcacatttcttgaggaaggatactcaatcagttttctttggggaatttggtcagttcaaaatgaaaaacctaaggatactaagatcagggattccctaaggaaacagcccagccagatcaccctggaatgagagcacaattgacccatttcttgcacactcacaagttctttattcaaaaatgaggagataacagtggatcaacacatgcttcaggaaggcatctaatttgacaaacaaaaccagaccgaaacaccttgcaggaaacagagactatgtgaagagataagatactgcctcagtggaaaaagagtatggtataaaagaggcacattcagaaaacaaaagaaaaatatgcatggaaattaaaattataatagaggaaatggaaaactaaatataagataaaagtaaagatatagttgaggcatttttccagcaaatatagcaaaataataaagagatggaaaatagcagagatttttaaaaattagtccaaggatcctatttctgaataataagaattctccagtatgagattttttttaatggaggagaaaaatcatcaaaggaatattctcagaattagagaacaagagcttcccaactgagaggaccatgaagtgcccagcacactgaataaaaatagaccacatttattaggaaattttacaacactgaggacaaagaaaaatcttaacgaattctagagcaaaaattcagatttcataaagtggataaagtatcaaatcatgtcagacttctcaatagcaatacaaggtaaattcagaagaaaaaatatttctaacctaaatctatactaaatggtattattgatcatttcagaaggtagacatatctcacaatatcatgtttttatatacataagattcagaaaattttgccttatatacaccctttctcaagaagcccttacaggatgtacttcaccaagcaggagagaaacagcaacaaaacaaatagaatatatatgatttaaggaatcaagaaacatgagatttaatccaagagaaagcatggagaatcctaggatgatgtctgtgcaccagctagttttgaatggaaacaggcagaaggctctaagagatttctccaaaagagggaaattaacagaaaacctaatgctatgtgactcagatgagaatggtactacatggcaataatactgtaataataatagttataataatcactactgacccaattatactgagagaataggatgacagaaagtgcttccgtggtaagtgtagggagagtgtgaaaaagaacgaaagccttttcctccaagagtgacaccaataatcaatgcctaaagccaaaatttcaagacctacttgaaagtaataaaagcatgatattaataaagataataaaaaaatgccacaatattcagctagaagaatttaagtagttgcttctggggagctgaaaatggtgttggaggagacagggagctcctgttttccataataagccctgtagctctgtctctttaagatacgttcatttgttaccttgaaaaaatagagaccaaatgtttttaaaaccttgcttagacttagttgtctgggagtttacaccccaacagtgagacagatatgatacagttatataaacatgtaactatcaattgtgctaaatgctatggcagaaattttttgttcaaaattgtatgatcccctataaaaagagatgtggcttagtgtagagggaggccaaaaaaattttccctgagagagtgacatcctggtaccttatgggataagtgtcgacttaccccatctgagccttcagcttctatggcatctgctatgctgtgttagttagctcgggctgccataacaaagtacaggcgtacctcggagatattgcaggttctgttgcagaccaccatgataaagtgagtcacatgaatttttttggctttccagtacatataaaagttaagtttacacaatgccatggtctattgaatgtgtaatagcagtatgtctaaaaaatgtacatactttaattaaaggtaatctattgctaacgatcatctgcaccttcagtgagtcctaatctttttgctggtggarggtcttgccttgaggttgatgatggctgactggtcaggtctgtggtcgctgaaggttgggtggctgtggcaatttcttaaaataagacaacagtaaacttggccacatcgatcgactcttcctttcatgaaagatttatctgtagcatgtgatgctatttgatacaccttttaaccagggtagaacttctttcaaaactcaagtcagtcttctcaacccctgctgctgctttgtcaactaggtttatgtaatgttctaaaacctttattgtcatctcaacaatgttcacagcatcttcagcaagagcaaatttcatctcaaaaatccactttctttgctcattcataagaagcaactcctcatccgttcaagtttgatcatgaaattgcatcaattaagtcacatcttcaggctccacttctgtttctagtgcttctgctaatttccaccataactgcagttacttcctctgctgaagtcttgaacccctcaaagtcatccatgagggttggaatcaacttcttgcaaactctcattaatgttgatattttgaactcctcccatgtatcatgaatgttctcaatggcatttgtaatggtgactactttccagaagatttctaatttattttgcccagattcatcagaggaatcactgtctatggcagctatagccttatgaaatgtatttcttagttaataagactggaaagtcaaaataacaccttgatctatggactgcagaatgaatgttgtgttagcaggcatgaaaacaagattaacctccttgtatatcaccatcagaactcttgggtgactaggtgtattatcaatgagcagtgatcttttggaaggaatctttttttctgagcagtaaatctcaacagtggtcttaaaacacttagtgaacaatgctataaacagatgtgctgtcatccaggctttgttgttccatttatagagctcaggcagagtagatttggcataattctcaagggctctaatatgttcagaatagtaaatggacattggcttcagtataaagtcatcagctactatggcttcaaaataaagtcattagcccctaatacgagaggcagtctagtctttgaagttttgaagccaggcattgttttctctctaactatgaaaatcctagatggcatctttttccaatagaaggttgtcttgtctacatttaaaatttattgtttagcatagctaccttcgttaattatcttagctaggtcttctggataatttgctgccgcctctatatcaacatttgctgcttcaccttgaattttatgttatggagagaccttctgtttttaaacctaatgaaccaacctctgctagctttaaactcctctcctgcagcttcttcacgtctctcagccttcatagaattaaacagttaggacctttctctagattagtctttaacttaggggaaggttgtggctggtttgatcttctctcctgactaaatcaaactttctccatattggcaataaggctgtttcactttcttattattcatgagttcaccagagtagcaatttttaatttccttgaagaactttttgctttgcttgcacaacttggctaattgtttggtggaagaggcctagttgttgacctctcttggcttttgacatgtctttctcgttaagtttaatcatttttagcttttgatttaaagtgaaagatatgactctttcacttgaatacttagaggccactgtagggttattaagtggtctaattttaatactaatgtgtctcgcagaatagggaggcccaaggagaggaagcgagatagggggaatggccagtgattggagcagtcagaatacccaacatttattgattaagttctctgccttatatcagtatggttcatggttccccaaaataattacagtagtaacatcaaagatcacagatcacagcttggggcaaaatagggagaccctgtctctactaataaaaattagtttggcaaagtaatgtgtgcctttagccccagctgctcaggaggctgaagcagaagaatctcttgagccttggagtttgaggctgcgtgagctgggattgcactactgcattccagcctcagtgacagatcaagaccctttctcaaaaaaaaaaaaaaaagaaagaaagaaaaagacactgattattataacagatatattaataatgaaaaagcttgaaatattatgagaattaccaaattatgacacagagacatgaagtgagcacctgctgttagaaaaatggcacagtaaacttgcttgatggagggttgccatgaaccttcaatttgtaaaaaatgcactatctgtggagtgcaataaagtgaagcagaataaagcaaggtatgactgtaccataaactgggtggcttagacaacaaacatttatttctcacatttctggaagctgaaagtccaagatcagggtgccagcagggtcaggttcttagtgaggtccgtcatcctggtttttggacttcttgctgtgtcttcacatggcagaaggagggagagaaagctctctgggggaatttttatgagggtactaattctattcatgagggctccactctcgtgacctaattattttccccaaagctcaacgcattttatcaggggctaggatttcaacatatgagtttgggggaggggcacattcagtccatgacattctacccttttcccctcaaaactcatgcctatttcatatacaaaatacattcatttcatcccagcagccccagaactcttaactttttccagcttcaactcctaagtctaaagtccaggacatcatctaaatatcatctaagtctgatttgggtgagtctcaaggaatgattcatcttgaggcaaaattcttctccagctatgaacccgtaaaaccaaatatgttatgtgcttccaaaatacaataatgggacaggcacaggatacacattcccatttcaaaagacagaaatggggaagaaagggatgatgagtcccaagcaagtccaaaacctattaaggcaaactccataagactttaaggctggagaataatcatctttagctctatactctgccctccagacccactgggtcagcagtcccacctttcggccccaccggggtagcaatcctgtccccatggttctacctggcagggagtgagcctccacagcttcggacagagatcttattgcctattgaaaacaaggcaatggcccctcattttgaaaccagggaagcagccctgataatttctaaatcgcttttggcctcattcttcccttgaaaaatagaccctgttcatagtgaaaaatctctatggtcacatcctgtgaaatcccagaagtctgatgccttccttcatttttttccatctctttctcttttagttcagattggcagttgctttgctggggtagttaattaagtccatggttcatacccatactaatctccttactgaacagtctcttggccatatctacagtactgtcttctgaacatggtttctcattttttgccatatggatgagctgagaattttccaaatcacttagttctagttcctttttgcttaataattctgtcttcaagtcatttttctctattacattttactataagcagtcaggagcaaccaaaccactgcttaaacactttgcttagaaatcttctcagctagatagaggcgggagaatggcatgaacccaggaggcggagcttgcagtgagccgagactgtgccccactgcactctagcctgggcgacagagcgagactccgtctcaaaaaaaaaaaaaaaaaaaaaaaaaagaaaggaaaaagaaaagaaatcttctcagctaaatatcctataaatatcctatttcattmcttgcaaattctaccttccacaaggcactagaacatgaacacaatttaggcaagttctttgctgctttacaacaaagctcacttattttccattgtttaataagatattccycattttcagttgagacctcatcagaatggccatttttactatctgtgtttctactaacactctgtacatgattatctgtgtattctctaataagatggaaacttcctctacatctctcctttttccttcctgagcactcatcagaatctcctttaaaaatccctttatgatcatctcagtttcttagagcaagcacttcagaattcttcctacctctacttattacccaatgcccacttcacttccacatttgtaggtgtttgttacaatagcacttcacttcttggtaccagtttctgtgttagtcaggactctccagagacacagaaccaataggagattatatatgtatataaaatgaggaattggctgtattagtccattttcatgctgctaataaagacatacctgagactgggcaatttacaaaagaaagaggtttaatagattcctagttccacatggctggagaggcctcacaatcatggtagaaggcaaaggcacatctcacatggcagcagacaagagaagaaaatgagagccaggcaaaaggggtttccctttatacaactattagatctcatgagacttattcactaccataagaatagtgtgatggagactgcccctgtggttcaattagctcccactgtgtccctttcacaactcgagagaattatgggagctacaattcaagatgagatttaggtgggaacacagctaaagcatatcattggcttatgagattatggaggttgagaagtcccatgatctgccatttgcaaccacagacccaggaaagccagtgatgtaatcccagtttgagtccaaaggcctgagaactagaggagccaatggtgtaaatctcagtccaagggtagaagatgaacaatatcctagctcaagcaggcaggcaagaaggggacaaatcctctcctactcaatttttgttctattcagacccttaactaattggataatgttaacccacactgagtagggccatccgttttactgagttcaccaattcaaatgtgagtctcatctgggaagaccctcacacacatacctagaaattatatttcacctgggtatcatttggcttagtcaaggtgacagtaaatcacaggctggtataactggaggatgccacctggaatgtgctgtttaataataatgacaagcttagcccctgtaaccacatgtaggataatattcacctgggataacctttactgtctttgttcatggagactaattccactgattctactgcaggaataaccacctagaattacagactgggagaacctaaaggtcttcagtgctctaatcttcctatacgctccttttgcagacaggaaaacttagcctccaggaggtttagtaatctgcttaacgtatcagagctatttaattctagggccaaagcaagaactcgaatcttcaggtttattttctatgactattctctagaattttttcctcttaacctgaccttttaaagaaagtaattatctcagcattgcccaacaacagaaaactttaaatttcttttttcaatgatgaaagaaaacattgcaaaaaatgattactttttctacttgagtattccgttattgtctaaatgtggaacctgatagcagcttagggatgatcaatctcttctttacaaaataagtagtttatattttatattcataaataattatgtgaaacactaacagtaataacttgttacaatatttccaagaattcctataaatatggcaatatatatgacttgcatacattctcaatctgttttaaatagtggctttgcatttactatgaatgcttatattttaatagttttaatcttatgttaaaaaacacattatcatatcttaaaatataaagctaaggaaacatataaggaaatatctctccttcagaaaactttgcaattcaagatagtctacgtgtgtgtgcgtgcgtacacacacacacacacacacatactcacatacacacacttccctaagttccctgaaaaaagaatattcatgagtcaggaagtctatttttgccagaaaacaaagcactcttttaaaaggttcatactgctgcagcagaactccttgacattttagtaatgtctaaaatggccaaatctacaacattttgaaatcttggcatargtcatgataccatgtactctggtgttcttcaggatttcctaccacaccaatagcagctyaatacaaggttagagaacaaggctgttgttactaacaagagcatgtaacaggcgttatttttttctttgtgataaggaagctttataataactaggtcagactatatttctgattttgagattcaatttggaaaattccaagaaatacttataatatcccaaagaataatttagagttgtgtaaacttagtggttcattgtctcttcagaacaggaattctcagttatatgtaagaaaataacatatagatgtaatgaccattggaaaatatattaagccacattgtatctatgaaatttcattatgggcaacatcagatatccatggtttgggtgattcaggaaaacaataacttaaaaatatatattttgtgattgtcacaatgttccccgggtcacacagatagaaagagggatcggattcaagtttgtcaccttgagtctgtgttctcctctgcaatgctaactctgataatgtgatggccaggatgaagatctggaaagatcaagaaatccctgaggaactacttttggaaaagtgyatcagaagaataacttgactacagggagagttttaacagttcttcaaatccaatacacatttaacctagatatgcacattgaatctctaaattactgaggtcaaaatattgcaagaaccctgctaaggtggcaaaagttactgcagcaagtgtgacagtgaatcatgcaattaaagcacagaaactgaacgtgtttggttgttattgtccttgataggttagctctgagggatacctgctatgaactgaattgtgtaccccaaaattcatatgttaaaaccatacctcagcaatgtatttggagatagagcttttasgaagtaattaaggttmaatgaagtcatgaggatgtggtcctaatctgatagattggcagctgtattggaataaagatagaaatgtctccacaatcatacaccaaggtaaggccatggaagcacacagtgaaaaagcacacaagttcaagtcccacgataggccgtctgcaggctgagaagccgggaagccagcagtggctcagtccaagtcccaaaacctcaaaagcagggaagctgacagtgcagccttcagtctgtggctgaaggcctgagagcccctagctaccactggtgtaagcccaagaacttgtgggtattaggaagagggccctcatcagaaccaaaccatgctggcaccttgatcttggactttcaagcctccagaatgatgagaaaataaatgcctattgtttaagccacccaatctatggcattttgttatggcagcccaagcagmgaaagacctcaccagcgtgacatacattgggagataggagtgttgaagcaatatttgccttatgtgcagtataggatccccatgtccagagttagagagcagtattgtgatggttaatattaagtgtcaacttgattggattgaaggatgcaaagtattgtttctggatatatctgggtgtttctgggtgttgccagaggagattaatatttgagtcagtggactgagagaggaagacccaccttcaggaagccccatcctcaatgtgggtgggcaccatccgatcggctgccagcacaactagaaaaagcaggcagaagaaggtggaagaagatgacttgctgagtcttctggccttcatctttctcttctgctggatgcttcctgccctcaaacatcagactccacgttcttcagcttttggactcttggacttacaccagtggtatgctaggggctctccggccttcagccacagactgaaggctgcactgtcagtttccctgcttttgaggttttgggacttggactgagccactrctggcttcctggcttctcagcctgcagatggtctatcgtgggacttgaacttgtgtttgtgtgagtcaattctccttaataaactccctttcctattagttccattcctctaaaaaaaaaaaaaaaaaaaaaccctgactaatacaagggtttacaagagaccaaggttcaaaatccaaggaaattttgaggctgtggaacagagtcattgactaagcagtattgaaccagtatttagcatagtaagtaaatttggaattaaactaggttaacttccttctacaagttgcaagattttaattaagctgcttaactccctcattgtaacttgggtactttatgaatcctaccacagagataataatgcctttgtcacatagttgttgtgaggattaaatgattaaatattaaatgattagtatttagcacagtgtctggcatatgctcacatctcagtgaattggtaactacatacakctgccaaagttagagaatgtgaggtctgaattgcatttgtttattcataccccaaataattattgcttgcttactatctgccaggcaagattttaggtgctaaagatacagcagtgagcaaaacagaaaaacaaaactgtttaaaaacctaccttcatggagcttacattctggagttctgagggtaatgacaaaatcaggagttggcaggctcccagctatgtaccatatcctaaaaggtcttgctctgggcaactcatacagtccttgactgggagtggctacctatatggaaaaagagacaaagaaaatgtatgctgtcaaatagcttgtcacatatatggtattactgttttccttttttttcaaaaatgcatgaaggactcttgacatggcattttgttaaaagctacttgtcacccttcttttttttttaaccccctcaagccaacttttcccaactccaggaagaaccaggaagagaagctatcacccttattttctaaaggcttccttctccctcatctctcccctttgaaaagaaagctttatataaagccagcttccttagcctaaacagaagtataccttgatctgttcattgtcstgcaatgttttgcttgctctcttgaaccttgtctctgaaagatttcagcctaacacaaaagaaaacaggtgttaaaacactttggggaattaaaacttcacaatgacacatttctgagagggcccctgcccagttgcacactcgttttcttaactttcatggaagcctgtctagggcagctctgggaaccttttagtgttcctatgtgtgtattctcccttgtcaccattcatctttcctttggattaagaaggcaagttaaagtagtgaacttttgctgcataaataattagagactagattttgctttgttttgtggccatttactatgtactttgtgatgtttgtcattcttttctaacccatgtgcagggctgataggtaaatggatttggttgtgaataataaaccagttttcacatctaaaacccattcaccaagagatgtctctgtggtgagagtgtggcaaaacaggttgttcttttgttgctttagaaatatgcctgattttcctgtattattttggggtaacctttgttcatgtatatagaatccaatcagagcagctaagggaagmattggtatcagttgcctatccttgtatgcttaaagaaaagaaagccaaaaactgttaagagcaagtcttttagcaaaatatcaatgaataagcaattttgataaataaataatcagtagaaacaatgctgaatgctgaaagcaaactgcacttattccaaaaaattttcatgtttaaacacagttttgaattccttttcctcttctcatataaatgcataaacatactactttttctcagctatgaaaaaacattcttatttcagtaaatttccttctcttaggtttactatatggatcatggaaaaggtataattttacagagtttgttgcttttcatgtacatttataagtttatagtaccaaataaatatagcctttcaaataacaaacaaactcttacaaaaggaaattcttccttcataactagaacacctctcacaggactaagtcttttgttagtaagataaattccagaaatggatttcagaataaagacctcagtgtttgtttttattcttgtgaaaccaataaagtgctgacaaagagtgctataatatgccatcatactttagaaataaggcacatttaagarggttctttattgccttctgagagttggatattgctaaccttagccacastaccacagaagatgctttgctttgcattagcaaaagcagggtgsttgatccatttgagcgccacttgattacatacacacttaaaaaatgtcaagactttaggaacactagagtgattatcattctgtggcattatgttcccataggtttaagtctgaaatatactgaatttaaaggaggaaaaggtatggctatcgtaatgtatgtttccattgttcttcatatcatttatttcctaacaaattgcaacccatctcaaaaggcctaactatttcaagggttattcttgtggataaaaaaaatgcaagattattttgatacatacttgccttcttgaatctggatgtcaaaatgtatgatactacccattcaaactacggtagaactgcattgcaattctgaggacaggagagggaaatgggatagggaaatacaaactaattttcaagccctggtgaaaggactaagaatgtgaaggaaatgcaggttgcacagatgactgaaaacaggaaatgggtagggagtttgttgctaaaatgctctgcttaagagctcttagggcttaagagcaggattcccaactctggctgcagaatcacctggggaacagaccagtcttgggagtgactctcatctaagctaaggccacataaaagaacgggtatataggacataaaaatagatttataccccagagcctttctctatgctttttagaacacctatactgtatgtgttcaacaattataccttgccttgtttttgggggatagcgtggggtgaagaggtagttttttttagaatcatttaccctgagtaggcattcagtaaatgctttgttgycaatctgactccayttccagccgcaaccccatggagttgagttgaatgacatctaaacctgtaggtaagcatgcatgtatacataacccttgttgtgaatgaaaagcaaaattagttctttcaaaaatgttagcttggctctgattagagataaaaataaaaactataggtttctgccaatgatacaagtggctttttcctacaaggtacccatttttattttcgacagcatttgtctttcttgagaaagtccttcattcaaggaccacattgcaaccgtggatcatttatgtataacttagtagatgatagacattggaaattaccgtgacaggtgttttcacattgtttctgmtgatctgagaaaaagcacattgccagaaaagagtgtggagaactcaaattcctcagaatcaatttgaaacagtcttttgaaataagaactgctttaaagaagcattttggaaaggggtgggggtggggagaacagttcttgagatgaaaatacagttcagtaaaacaaatttatttattgatggagactatacactgtgctttaatttattcatcattattattgccttgaaattgttttttgttaccattcatataatggcctcaggaggcccagaagagagccaatgaaaacaattctgtgggtgttactagtgaaatatttcattatacttcaagataagacataagaatatactaaagagacaaaggaataccaaaagctgaagactaaaaaatacagagaaagaatgtcttttttatacaatggcccatcagtgctagcactaatctgtaaaaccagtagcagttgtattaagtaatttatgtgggaataacaattgtttttatattacttttgctgtggacgataacattctgtaagctcgtcatatttttaatcttgacttaagaaaaatactgctgtggcaattattaaaataagagttccatttatctttgtgcaagtagcttcttctcttcctcctgtgtcctcctccctcacgtgccctcccctacctgactccattcctcctccccyttagccaaaggcatttgtgaaatatagaagcagttatgtcatgctgttattttgggtattcttaataaatgcttactgtatttcagaggtggtctgaggaggtcagctaatgcaatttcactttgattacttatttgaattttggatgcaaagaaccctgaaccaattccctgaatctgtcataatcataatttagttatctacagctgcttcattagatttaagtctctttcaagaggatattgattattccagttctttattatataataacaatattcataagatgccctgttctccatcttcatttgcttgacccactaatgggtactggtttcaaattttcttttccagtcacaacatcccctttaaagttcggtgattatagtgacacagccatatcaagtaacacctttagctacttcaggtgttatacattggattttataaattctgcccctttcaatacatcaatacacctttgctgttaccattagaagtctgtatcttaaactcaaatcttagcatggcattccagagcttaacatccttcaatgctcctattatctaccttgcacttttcttttttctttttttgacagtctcgctctgtcaccaggctggagtgcagtggcatgatcttggatcactgcaacctccacctcccgggttcaagcaatcctcctgcctctgcctcttgagtagctgggactacagatgcaagccaccatgcccagctaatttttgtatttttagtagagatggggtttcaccatgttaggcaggatggtctcsatctcttgacctcgtgatctgcctgcctcggcctcccaaagtgctgsgattacaggagtgagccaccgtgcccggcctgcattttkctttatagagataggtggtatgagaaaagtcttaaaccaaaacgagaaacttgttccagctaaatgaaataaccaaatgggaacattagtgttaacccatatcgactttggtaagtaattttttaaaatgtggttatatttgacagtttgtattattgccaaaaagaaaaaagaaacacattcatcatgtatgaacttctcacttaaatgattcattaatctttttaaaggagtttttttgagagcatctagaatattccaagcagtggtctaagctgtggagattaacagtaaaaaaaatagacattgtcttagcccttatgctgcttacactctggtgggggtacaggccagtaaagagataattgcatcaytctgtgatagggactttgattggagagaacagggttgtaaggatctagagaaagggcacctggaaaaagaactgccagaaaaatcttcctgaggaaagtgacatccaagctgagactgaagaggagaaattagccaggctgattaggatagtgatctaggcagaggagcaaagcccagagtattcaaggcattgaaagcagctctggatgaatgaatgggccaggcagggtrgagtgggaacagatgaagctggggagcaattaggaccccagtcacgcaaggtcacaatcagggggaggggcagtttgggggagccagagaggtctttgaagtgttgacttgaggtgcctataggtatccaagcaagatttccaataggcagagtctgcattgccaataaacaaagcatttgattttgtttttgggttttttgttggtttgcttgtttttgtttttgttttgttttgtttgagatggagtcttgctctgttgcccaggctggaatgcagtggtgtgatcttggctcactgccacctctgcctcccgggttcaagtgattctcctgcctcagcctcctaaagagctgggactacaggtacccgcgactacgtccaagtaatttttatatttttagtagagacagggtttcaccatgttggccaggctggtcttgaactcctgacctcagatgatccacctgcctcagcctcccaaagtgctgggattacaggcatgagccaccgtgcccagccagcacttgattttgaaatttacaatttagtagctaaatttaattaagaagtagctcaatttcttgagattccttggcgagttcattagaaatttctttgacttatctcttattactaatttataattcacttagttctatatctgtagctccctttctcaacaaatttcagaattatgtgcttaaaaatattttattgatgagttaagtaattactcatttttaatttctttgtacttttttcaactataagttgacataatttaaaatgttgtggcctgccataagaagtgcaaaatcgagaatataaaatagattgtagcattacattaaaagagtggattctgtggaagtttaattccccatgcttgtcaaaagttgttaaaacattgctagccctttttgaatgtaaaatgtgggcagacatgtactaatatatcaaaaaatgacactttgtcaaagaaggctttcatggaagaatgttctgaataaaatgttttcttttaaaaagaacccgacctgtttaacattccaaagcaaacacaaaagaacacaaaatacctgaactcactgccagtcacaacagttagtttcatttaccctttaatacttttttttatattccaaaaattgttccccaaaagaattatcagttttatttcatgataaccctggcttgaagtaaaataaaagtagctctgaccctcctcaaaatggattcttttcagacttactagcacttctaatagtatgatgatgatataggtggctatgtctactgttagactcaatgtaattatatgtgaagcaacaattcccttatctattaggaacacttgctgcagttaactgcatttcactgtctgacagatgaaatgcagaattaaaatctcaaactagtttctcaaagttttcttttccccccagtcatttaaaaatcytttagcctaggggaagatggtagctggaaaagaatgggaaaccagatggcatttaaaggccttagcaagatttacaaagcagatgtgcctgtatttttacctattctagctcctcaaacgggtcttctctgctataattgctttgcaatggttccaatcctttgaaccttctgaggatgtccagagttacgataatgtttgatagttgaaatgttaaactgaaaatcaatagataattggctttgattactacctaatactgtctaatctaaataggaggaatatttrtatgtgttactcatattctttgcagaaaacacactgaagcctagctcttgagcggggatatcgttcattggaagaaacagaaacagatggcagttgtggtaattgagatacagtgtagcttaaaggcatcctggaatgccacctaataatggtagtgtgaaaaggaaagaaatattctgcacaacttacttgatgtgtaagctgagtctgattttacagctttatagcctgctcacaattaaaatgccccaagggttattggtggtgttgggggtagagattgtgcaaagttttgagctaatgttagagaatgatgggaacaaatctccccaaccatagaggtttgttggagaatagaaagccctggttttaataaaatattagagaattctgcatatattaatatttgtataaaaggacactaagattgggggcaacaggttttaattactaatagtcaagccaaatgtgttacctttaccttttctttaatttacactattactgcaagggagaactattttgttgttgtttgtggtggtggtggaagtgggggttacaagcatctcacagttgagaatgccttcctagccctctgagatgggagctgaagacagtaaggggcagcactgtggatttaggctttgagtcttgcctccgtaacttacgaattataagtatgaattacgtattccttagtctttccaagcctcacttcattcatctgtaaaatgggctgaatacaactttattaagcatttagttcagtgccgaacacatattcagtacctaataaattatagcaatcatcatcaatagacaaatgtgcacagcttagaagtttttcccaccaagcacactaagrattgtaggacattcatggatatagttttttactgcaccaggaaaccccrtccaaatggatgcaggagtgtttcagaatatcctcagaatctatagaccaggaaacattgttgtacatcactacccactatttaaactgtttgtttaaatacaagttaaaagcagaacttttgcttgaaaacaccttctggccacatttattggactgactcataagaaattttatcacactgattgttacacacttataaatcatttgctaaaagcagtggtttctcctaaatgtattaaggccaaaattaatttcttaaacttacatcgctttaaagtttaaacaatcatatccttagctatgaactattatttcctggaaggttaaagtatatatcctatgtgcaaaggaaatgtcaaggacatatcaatatttgatttcattacacattagctatgccagagaccctgcagtcctacctaatgtaaacagctcactagragtccacaatagaaaccaacaaaagatgcaaatcgatcctgctayattttaatattaaaattttacagcactttttgaactattttataaattaattaatttcaaaatggatgaggcagtaacattgaactttagctaattatgtttaaattaaatataagcatttaaaataaccattttaattaaatacaaggtgcaggcagctaatcattaaaagtggaattggtaacttgagatttatcatcctgaaaccacttgtaccacatttctaatgagttctttcctctacttaaatgaaggactaaatttatttccccaacgtggcagctagtaaaagataactctttctcaggtcatggttgtcagtttgatgttgaatcagagtaaagaaatctgttttggtatactcgctttgatccgaaacagtatttactatttgctaatccatttccaactgacagtactgtagttctacagacacctaaraaaagccctagtaactgaaacagcatttactactgcaacagaaaatagttacattttgtaaaggaaattgatcctttttatagaggagactccaaggaataaaatctaaataattttgtgattaaatttttaaaaaattacattacaacttcaagattgaggaataacactcaaaaaatcattttataaattatggatatatatactctatatttacatttgtaacaatatacatatgtacatacatayataaatttgtattttttwaaaaaaatcatcagctagtttttctagtgcaatgtaattatcatttagcataaactctgacacttaataaatgtttgtaaagtaagtgaataaataastgataaattttataaaatgtcttttaaagggctctctcttaaaatcattttttgttagctcttaccttctactttaaccttctccattgaaagagctgataaagctgaagtgtatctactcacagctttgaagattgtgtgtttttcccttatctgttgctttcctgtattctagaattagtacaaatgttaagaatctaaaagagagcataacctctggtgactgaaagggcaatttaaaggcaagtttgcatgttttgttccttgaactaaatacctgcaattactgattgtcacatttttcttctgttgtaaaaactgaactaattgaaggtattacccttaggggacaagctctacagtataatgaatgttgagtgccctcttgagtttagcattttaattatttataattataatgatttctgtttatttgagaactttggaaataattctagtttatcaaacaaattgagaaacagagtagttgaggctttattttgttatgtttcatactgaggtcagcaggcttatggatatgccaagaagttctcacaagcaaaggagccagttttytgggcatgactgatatgtgccatgttctaaaatagctggatgtgtttttttctactctctctctgatttctctagaacgatgtgggcaatattggggttgtgaggtgaagagttgacaagaactcaactggaagaaattggaaataatttatgaaagtatgttaatcagagasgagacacagtagactcagtagctggctattagccaagtgtatacatttttaacacctttttctttacttgaaagagattgtctgtgtgtgtgtgtgtgttgtaccctaaatatatttgcatataatagatccaagtaaaagatgggtttctaggccattatggaccaaaataatctttttgtcaactgcaattgaatatatattagtgaaatgatgtattagggtcctacaatctgtttagatgtcatatacactcttaacagcagcctgaaagwgtaattaaatattacttttaaaaaagagcttggcattgcagtctgtttcatttttctcatctctttcttttttttcatcccactaatacaacactttagttttagagccaaacatgtactctgcagctagagaattagaattactggtagcttacattcaatttaggaagaagcagcaactgcataatayatccaaatagtagcaaaggtaagaatgattgatataaataatcatatagctatcaacaggtctggagatacacaatacataacattttaaaggagaataactttaaccattctcacctaaaattctcagcagccagatcagaaacaaggttctgctatacaaatgttatttaaaagtctatgtgggtagctccccatttcctagcccatctctgatcaagggaaattaacaattacatattccagggttaagctcaaatgtgatttctgctcttcccctgcaaattgttcaataaaggactggaagtactgtgaaaaaagaaagagagaaagaaatgttcttatcatccacaatatacttctccttccaacagcaaatctaaccacagctgggaaaaagcagcaaaaacaaacaaacaaaaagacttaattggaaaatcactttgcctccttgtccacccccaggtgctaaagcaagggataaaccaaaaggacagccagtaggtgaggagaggccatggaatacccgccaacaagataatcatcgctggaataatagggacctgtctgaatgtaggtatgtgtgccgaagacttctacgtgctctcgcagtccattatctggcattccctactttcatccgtgttatatacctgccatctcatcactcacagccactcggaatcccctggtggycctccagcaggaggtctttctcctctcttgagcttctaaaacactgtacaaaatcactttaaactgcttcctgcctcagtattgcccacatagaaaccttccccgtcaatgaaatggattcttttttaaaaattttttttattgattttcttttgcgtgtgttgttttttgtttgtgtgtgtgtttgtttttgtcaagctgaagttatcatgaaactgattcttatttcctaaacacagagatcctttgtctttgctgttcctattatctgaaatatctttcccaactactctttgatagttttaggtctgtttactctcgaacgccaaacaaactcaaaggtcacccacatcacaacaatcttgccgatttcctcatccccattatttcctttcttccagacttctgtagaacttgttgtatacctcctctgacatttgtttgacaagttctatcgtgctttttatccatatgtgcatatatcctgtgtccttgctataacaactgtttctttctggaaaagacaggatctgttgtgtttttgtataccagaacccaagaagaggggaaaccagcatgtcaccagctgctgtgatggagtcaggtagcacagggaagtggctcagagcagggactctggagctagactgcctgcgtttgagatcctgctcagccaattactagctgggtgatcttggcaaggttttttgttaaaactgttatgccttaatatctttaaaatagggataataatactatgcatctcattgagttgttgtgattaaatgagttgattagaacagtatctgacacacattaaacactcaaaattattgcctacttactactgtgtctacagtaatatcccatcttaattttctccataatgctataaaacatatgcattgttcccatcctcaaaacaggaacactgtgtccctggataaaaatactaaaggaagcagaatcagaactaaagtttctggtcttaaaccctaggctgtatcattctgaatattgtctcacacacatgtgcgcagtgaccagttgctattgataacaataacatttattcctctccagccacacacagtggcatgtgcctgtagtcccagctgctcaggagactgaggcaggagaatggcttgagcccaggaatttaaggccgcaatgagctatgatcgcaccactgcacttcagtgtgggtgacaaagtgagaccctgtctcaagaagaaaacaaattattcttttctgttcttatagttttaaactaaagtatgctgagatttcactgttttatattaaaaaataatcagaagatgaaatgtttccacttaactgtaaatacctttttttagtgagctaattcaaattggatggagtcaaactactttttttcagtctgactcagaggctaaaatgcaactcaacaagtattttatgttctggggcactgaaggaaaaggagggagaaaaacaaaatggttattcctaccctagggtattttaaatctaggtgactcagtaatggaaacacagcagaaacatcgaacacaatttaacctctcattcctaggttcactgtgagattggtccttttacggtccctccctcaccctgtgtaatagtgcaggttggatacagtatcattatctataaaaaaataacattttaggatttggtggaatatgccatttaaaagtaagctatacaatttatatgaagtagttttaaaattattttattctatttgaaattgttttggagaatttacaaagaccttggctaaatggagcatgccagccactcttggaatctctttattgtctagaaaatcattaagtcttgttcttgtcacttgcaaagttccttggctgctgctatttctttgtgcatgtgaagtactgagcactgtgctgggatgtggcagatgactgataaatccttagattattggtaaatattttaccaccctactgatgatacattaagtttactgtgcctcccagcccaacaccgaagtccagagtagcttcatagactctcagtagacctaaggaaactacctttaggtgaagatgaccaagagtagggattagaaggatgaaagatgaccaagagtagggattagaaggatgagcagttttgaacacttaaccttattctaggtatttttactttattatttttatttatttattttttaaagttttttagagatggggtcttgctgtgttacccaggatggtcttgaactcctgtcctcaagggatcctcccgcgtcagcctcccaagtagctggattataggcaggagccagcgtgcctggcttaggtttttaactttacatacatcatttcatgtaatcctcaaataactctatgaagtaggcattgttgtccccatttaccaacaaggaagctaaaatccagagagtttaactaatatgtttaaaaatcacagagctggtgagaaagaatttccggcgcaagtctaatccaaagaccaaaccaatgatgtagcagtcatgggggtgaagtgagcgcgaggttcagtgtcctgaggtaggtactctgacactgacgtcaagttgcctcaggcatattatagaayttcttcatgcttcaattttctcatctcacatgacattactatgaagatcaagatattttatttgtgaaatagctttgaaatgattagaggtgctataaatattaattatagttgtgagtttggtaaatataaacattgaaaccaaacatccccaaaggatttgaaaaccctggcaggcgatggggaagaagtggaagtaataaaatgaaacaaagaccaaagatgtagaaagcccatgctcatgcagggattctgggagcaaatctagacaagattgcccctagtgacctagcgctgatgctgacccgatgctgtgcagttctcagttactaagtggcagttacccttacatgttagatcatgttttaaaatgtaggtataatggccataatcactaaaccaaggattggacataggacaaaacattaaatatcagaactgttgcatatggagccctgtaccttgtataaggaacagttgtatggcaagctcttcatctggagcattaagaataatactatccatccatacatcattttaaaagtacatcccagcatccctgaaacaccccaggaacctcaatgggatacagcccagtgcttcttggaacaatctctttaacagtttttcagaggaattaatggtactttaagttatggctgatgactggttttgaccttgtagatgttgaagggaagtaaatgtatttgatgagttattaagcacatgcttcagttattatgatagtaaaaatggctcagtcttataaaactgtgaggtgctttctgtttcttagcacttaattgcattcctaccgagtttagataatgtcattaatctcagcatgtgacatagtatatttatttaaatttaagaaaattacccaaatttctttctattcttttgtttagacttatatacgtttatttcagaattacttactccagatgttttaagaattgtattttaacccaaatgagaacaggcaacttaaccaatactttagacggtattttagaagtcaaaaagaagttaagaaaccagttttagatgtcctttgtcaaagcctgcctagaggaggcctctgcttccaagatatactgctgagatggagaatctatgatcaattgctgaatttcatctggccaatttcaactgtcaagtatttctaaaaatataggcctgtgacaataacacattggactttgttcatagcctccttagtatttgcagtttatcattattgttaattattaagcattttgatggcagaatgggttgcaagaataatgatcacagtcacacagcaacaaatggctaatttgggggtatagtcctcagtttcaaaggtattttgtaaactgtaaggtattttgtaaaggtattttctaaactatacaaatattatttataggaataatttttataataccaaattatgtttttatgcaagatagtgaaatattatagcaaaaaaaatcctacatattttactttaaaagtattcatcagcatgtgttctttgacatataacaggatgtctgtgagaagactcatgagaattataataatatctgctcttaataaagtaccagctgtatgccagacactttaaaatggatcattcttagtcttcagaacattagttcaaggagattttgttgtcttcttatacagctgagaaaactgcagctaagataggttcataagtagattagtaaactaataaatggtagaaccacaattcaaacccagatcttttagacccctctgcccatgctctttaactataagagaggctaggagtgaaaaagaaaaactctcaaatagaaacaatgatcgacagatacattaattaattagttaagtaatagtagctaccatttattaacaggccaggtactgggttagctgccttagagaccttaagttcattatcctagtaaacagctcaaaagagttcattcatctcagatttttcaaataaattagaaattaatattctcatttgccttatgagaggtttaacgttcaaagacattgagtaactgacacaaaatggcacacctagagaagagcagatctaagttaccaattcaggtcttgtcaagttctaaaaatccatattctttccactaaataatattatatgctaaaacatatgtcttatttatacaataaagactctggactactgcgtacttacctttttttcttttaacttattcttgggacgatttcagttttatttaaaacttaccgagctttatgatattcaggaactttcagatagttagtattagcccgacgaatatggactagtttgtgtttattctaatgctgcccatgatttctgagtcagatttttacattataaatctcatgtgctcaatttgtatttcatagtctacaatttcactaagaactttaaaaacgaaagagaatttattaaactcaggaaaactgcctcacatatgtaaattgctgctctgaaataccacaagtcacaaatacaactgaatagctttcatcctaatcatataagaagcctagaacagcattttgcattcattcattaaacaagtgtccattgatggccaactatttttatagcgttgtgctggggacattggcagataataattcaaaaccccccgccctcaaagaactttacaaattaattaaggagaaaaggcagggtaaccattaagtaacaaaagccaaagttacrtaatattgcaactgtgaaataaatcatgcttaaaaaaaagagtgctccaacttcatggctggaggtgctgactatgggttgaagtggtcagaaggactccagaaaggaaggtaactgggtcagcagagaggatggacagcactggtcaggcaggtgcatgtggtgcaagtggccaggaagcagattcatttattgttctgaaggtttgtgcaagggaactggaaaagactggaaaaggaggtgaggccagacagccaaaggctttgattttagctaaagactctggcctgtggcctccaagtgatagggagtcattgtacacttttgagcaggggagtgacatcattaaagtagtcctttaaaaaagattaatctggcaggactaggcaggatggattggtggaaaaagaacaggagcaaagaaactactgcaataattcaggtataaggtgatgaggttctgggcagaagtgataacaggaacagaaggaaagaaattaatgtaagagatagttcaaaggaagacgtgacagaaggtgatgactagatgtgggaggagaacagacaaaatacactaattttaaatcctatttggaaacttttatagtttataaaatgtatggagttcacgagacattatatataatattcctggcctgagatgccactggatccaaggaagatgttgcttttactcgacgtagcacttcttttagcaaaatctaaaggacactgctgcattttaagagataataaattctattataaaaattactgagagaataattttatctttatgtcacaataataataactgcagatacagaatggcagcacaattagatgaaaattcaactaaaaaatgatgtttcatttacctccaaaattctattttattaatttagatttctaaattaattttctaccaaattggctttttaaaatgtgaattgattaagtctagatttgattattttcacaaatatgttaatatgattttccagtaacttgggggtttttgtgtcttcattttaggaataattccattgtcttcaaaatatatttgtataataattacgttactttccaagtggaaaaatgcagcatagagaaagtgattttatgatttatccaaagtagggtgagaggtcaagaatctcttcctatgggtccagtggactgtatattaatagataaaaaagattagaaaacaagtaatatcatttttgattgcttatacttagtgaaaatattgagtgccaggcaaatgcaaccttcttccctaacacatacacacatacackccattgcwttttatatatatatatatatatatatatatatatatatatatatatataaaacttcaggaagcaactgtcgttttagaattacttagatgctgtttttaatgcatcaggtaaaacatatcatggcttctaatattaattcattctccacttagcattgttaaaaatatttatgatctagtatagagcaaaacatattgttatccattttccccagctttgatataaaagcattcttcagttgtttcctaaggaggaatgttgtcaaagtttgatggtaatttatgttgtcagtccattaagttgattttatggcagccaacacaactattgtccatttatgagaaacccgaggaccaatctaggtctccacgaaggccgtttgatatctgccctctcatatcgctgaccttgaggggagttgggtttggtaatttatggcaaacaccatctaggaagacccatttgcaagattcactgtcatttagttctaaatgatcattgctgagtccagagacaatctgagctcctgacagagcaatcccataaaaaatattgcctacccacccaggtgtcctttccaattatctggagtagaaattaatacttttaaaagctgctagtttttgaaaggttattacaatttattccagtggtttcttttgcacattatgatgaattagtttattacaccattattttccatgtcagctttttagaagattgaaccataatgttgaaacattagtgtgaatggcaaacatactattttatagctgagtaacatatttctttgagaaaaatgtgttcagtttttaataacaggtaattttatgtttatgttccctaatgctgttgtcagatattatttatttctttttggtaagaactagagaactttcttttaaaatgttaatggtgcattagacagattttagagtcatagtaaggatatattactgaaaaatagaaaatataaattgtaagtgtttttccctgaaagctaatactttctaaggttttcttgacactgatttaatatatagttacttccagggagaatcatacttctgtctcaatattttctctaaatgtagttgggggagggggaatttctaattcatttttctgagatctcaagtttttctttaatgaaacttccttatcttaaatgactggcttcatatgtcatttggaagtattttgtaaaataatatgaattagcactttgatagagatttttttttagtcgttctccattcaatgtctactaggatactgagaaagtattagtaatttcctatttaaccaggtattaaaaataatcatggtgtcaacaaagattgataagaagtattctaaagagtaccctgtatactatcttcattcatacagcaaatgcacgcctattgctgccaggcatcatacaactatgtggagttgagacacatccataacaacattctagaaatgcaatctttttattcctgtcacaattatttttattcctacagtttttaaaaatgcaatgcagctttacaaaattctgaatcttgtgtaaattgagcatgtaaacaaatgcagtcacactttacaagttttacatttgctacctccaatacagcaagtacttgccaaaggaaatactgatttttgttttctcatcaaacatatttgtttctttagcaaatgtttgcaatactgaagtatttgtttttattgatctatgactggaacaaatgttagttttagcagaattaagattcaaggcatttcacaaatttttcccattgtgccagaaaattttttgataatgtcttaggcttaaatgagttccaaggtttcttttcaaatttatattgaaatctaacatacacacagaaaaatgtatacattgtaagtgtatagctcactggattttcacaaggtgagcccgcctgtgtaactagcacttggatcaagaaacagaaatcaccagcatccaacaaacacttctgtgtccccttccagttgtcacctcccagcccttaataaccattctcctgactcatgacactgtagattagattttcctgtttttatgaacacagtataaacatagtcataacttggcataatgtttttgacatttattttcttggctgtttgtagttatactttgttctcattgtcgcacagtacattccattgtttaaatatattttacttacccagcctactattgatgatcactgctttgattctagtttggggttattgaaaaaaatgctactatgagcattattatacatggcctttggcaaaatatgaaagcacctctgttgggtctattccaaggagtggaatggctgggccacagaataaatagaagttcagctttcatagatayggccaacmagttttcatgagttactggtagtctcacagttactagttatgttctttggacttcaggattagacataactgggaagaattgggtaaataatttctaggtttctctcaggcctaaaattctgtaattcagcmcttctttacaatggagagcattggcatagatttcaacaaaaggcagataatgagaatctgctatttggttttctactatatttctctatttgcatttgcatctggatttgactgttaataaacctgtgaagtcacattttatgataaataaatgaaattacagcattgaatgcagaaaagctgaaaagatttttggtttgcccaattatatgcttccctgtaatacagaacattttttgccaggctgatggtaataactagcttaatgcaatgccttctcttcagggttcctggttattctcactggagcagagcaggaattgtgtgtatgcatggtattttgcaaagaacaagtcctcaatacattttggttgaacatatttatccattttgtcaaatggttttttatgagctttggggattgcatagaatcctagctctgccaactgacttttgccaaatgcttcatctccctcagcytcattttctttgtctgctatgtggaaaaaataatagtccctgcctcccagatcactgtgagaacaaaatgacataacacacatgaagcacttcacacatgttaataataataaataaagtctacccgtgataaatactcagtaactattgggtggtgttatagatgttttttcaattttaagatgagtattcttccaacctctgcctmagatactaaagattctgctgctcataatttatgcatagacagacatgttatataatcaactagaatctgacaattagattttattctttcttttattaatatttccacaaatatttattgagtaccttctacatgctatgcactatgtaagacacagggattccaccagaaatagttcagacactgtccacaggcatacaaagctgtcgaggcttgcaagtccacagacagttacagtgccatgggaccaggcatgaagggaggatccagacacaatgagtttgcacagtggaggcgctgcttcacttcaggaaggtttcctgaaagaagtgacagctccattgacagctgatggatgcaaaggagttaatcaggttagggaggagtggggttgtacaggaacaagaatgcaataggcagaggaggcagcattagagaacagaaagatttcaagaaagcctgaagcttagaagcctaagtatgggaggtgaggggagaaggaaaagtgtcagaaaggaaggggtaatgctaaaaaagcaagcattaaggttgtatagactggactcttggactttggactttatcctgagggtaattagaagccactgatggtttcattactttttaatttataaattaaagtatgattggcaaataaaaattttatatatttgtggtctgtgtaatattttgatatatgtatacattgtgaaatgattaaatcaagctaattaacttatcacctcacatacttatcatttattgttataagaacatttaaggtctactttcttagcaatttttgagtgtacagtacactattattaaccatagtcaccacactgtgtaataaatctcccaaacttatttctcctatctaactgaaactttgtaccatttgaccaacatctttccatccccctgcaactcccagcccctggcaacaatgattatactctcagaataagccattaaatggatttaaatgtgaatgtcttgatcagatttgtatattaggaacaaagtaaagaatgaattggatgggaatgagacaggaggcaggaagaccagttaagaggctggggcagtaaacagagtagaaggttacactggtctgaattcaggtctcagcagtgggaacagggagaagaggatgggtagaaagtagaaagtatcacactcggaaatctaggatggtacctgtaattccatcctggacaatggggtggatagtcatggaaggaaaagatgcagaaggaagagaaggtgaggggtggaagacagtgcatttcactgggcatgttaaggttgaagtgcctgttattatctaactgcagaagacatgtaagtgttgaataaatagcgttgagttcaggtgagaaaccttttatgaagatgtaaataacatggtaattacagcatccttggacacaggacaggttgcttaagcagagcttggagtgagaggagaaaggcctagaacagagccctgaggaaaagccatatttaagataataagtggaagaagagaaacctcaaagaacaccgagaaggaatagctacagagatggtagggaaatgtgaagagggggttatcatgatgaccactgagatgaaatgtttctagaagaagggaatgaaaggtcaatagtgccagaggctgccaagatgtgaaataaactggatatcgagaagtgttaacaccagatttgtcaaaaaggagatctgtggcaactctgcttagaagaggctggctttgagcaaaccagggtacaaataataagtggaaccacaactaaaagttgatgaaattccaggtaaatgtgattcttcaatagcacactacataactgtatatttaagagagttacactatccgttgtctgttaaatacatatttttaaacttaagcacaactacaaaatacataccagttttgatcacaacaggttttccatcactgttttgacatttacctttgaatcatgcaaacgttctttagaagaatatgaattttatgccctaatccaattgttagaaatttgcctcatggtgaacctcagctgaggagtctgaagaaccaggaatgggatgagggagaaaatcctctttggagaaattccttttggagattttttgttaatttgggaaagaataggatgtggaagcttagtgtagagggattccacatggaaggaaaggtcctgtccttgcgtgtacagagtcaaactcagagaatagactccttggaagaaaagtcggtgattcattattgtgagttaagagaagacatgctataaatcacaagcaggagaaacaccggttctggtttctctgccctgtttcactgttgaaaattaattttcctcaggatttgtttttttcctggtggctgttacttacagtatggtccacccagactagcttattcatttctacaggcagttcctgttggtgcactaaggtagaagcctagcaaattagtttagggggttgtaggaactctatgtgaaagcactgcttccatttcaatctataaatacagggtgtgtttattaccacatttcacaccaagcccaagccaggtcagtacgtgacgtttgtgtttagaagagattcgaagggatagtgtttgggtaattttccattaaaaaatatacattatgtcacttaggtgtatgatataatgggttccttcttgaactctgcatcttcacagagtggttttgttgcttaaagggtagatgaggycgacactctaattatatctgttttatagaaaggtaaagtcagaatctgagaaattaagtcatttgcctaagtaggcatctggtaagtaacaagacctggattcaaaaccagatttttttcacagcagcctggtggaactagagtagcatgcttgtctttttttctttttttctcttttttccaagttttgaatagaatccattggcttgattaacagaagactaatattttgttttctaattctaccacggacttcactttactctctattctttttcttctttcttctttatatttattcgtgtcctattatttatatctctacaggccacttaaaactggcatggggatgaataagaggacactttattaagtcacaagataatattgtcattaacaaaatttgtatcataataaaatacaatatgtaagaagtagagttaaacacattagcattaagcctgagagatattgttctacaagataattagcataaatttgttcaacaaatacgtctcaagcacctcctactctwagggtgcctctccgtgctgggtcaatggcagtgcacagaatgcatggcctgccctcccagagcggacattccagctgggggtggggtggtggaggggagacaggcagtaaatgcatatgtaaccagagcaatcgggaaagataaggcaaagtcaaatggatagaagatgcccagatgatgggaggagagaggctgccttcttatgtatggcagtcagggaagacttatcagtgagatgacatttgacaaaggccacaggaagcaaaccctgcccacatctgcgtgaagcacatcccaggaaggagcaacatgaccagaaaatgccagaggcaggaacttgctacatgtttatgtgcccctcctcctgccttcccccaagcaaagtaagcagatgaagtgggtgaggggaagggagaatggcaagagactaaataagatgtgatggggtgcagtagtctgacttgtacaggctggtacaagcccctcaaggatttattcaaatatgtcacagttacaatgaatattgttttgatacatctaatctaagtcttttttttaaactgatttcaaaaacaacagacatggagtcttgctatgttgcccaggttggtttcaaacccctgggctaaagcaacttgcctgcctcagccttccaaagtgctgggattacaggtgtgagccaccacactcagtctcaatccaaattttaccaccttgcttctcttttgggttcccttttcagctctaaatagtgccagctggaatattgagcaggatcagaaaataagcatgctttcactcacctcgccttcccactgaggcaggcagcaataattgatcacagacttctctagtcacactgcaaaaagtcagagctggccaagaaatgaaccattccagacataaccttgaatactcagacatctcctttcccttcttacctctccttcgttaatagactgcagtcccaagagccaaaccttcagcatctggatttgcctttgcttctgcccacttgtctgagacccaggaactaaaacttcctgtgatcctctctgctccccacraaaccctctcctgctcctgtgcacattcagtccccctgagcccccttgataacccttccctgctcaccactgtgcagttgaagggacgtgaacagcgaagagctaaaagcaarataatcttgacctttctgcatcttagtttcctcatctgcaaaatgggcctcaccatgcccagcckgcaggattgttgtgagtactaagatagtagttattaataaggtgactatagctgacaccactgagtccttgatctcatcagaggaaaagagaggagaaaagagggccccaggaacttgaaacagaaaaaaccaaggtgaaaattacttacgttttttactggcctcctagtttcaccacactgccacttctatcatacctcactgagcacagaagagcaaatgaatgagataagacagaatatgataatccaggacagaaatttcatctctccaccaatatggtgcaacgggagtctgccccattgagaaaatgaatacgaagatgagcatgaagcaaatattgccatggagagaggatatgatttttcagcaggtaggtgggaaaaaggagtggatcagtgcaaatatagaaacaggccacttataaaattaggaaatataacgaaatcccaatagaacatgtaaatatttccacctatacctattgttatttaatggggattactggacattattcaattagctatcctggagcagggctgacctgggtttaggacctggcactcccrcaccagcatggaacatacaaaaggagatatcccagctgttggtactgtgaggaagtctaaaccaggagacagagcccaggatccaaacggcagctctgcccccattaacagtaccgtgggcatcaggcagtaaaagggtgtttcagtgaacaagttaaatactgcaactgggaatattcaagctgataggtaaagtctcaaccattgggtggggatcagtggcaagacttcaactccttgtagagtcaagaggggtgtgagggctgagagaaagactaggactagcccwaagcaaaataaagagcatgaaaattattaggcagatccccaggcagattcagttaacaaaactgggagccaatcattcaagataaggaagatttggaatcacagctcaaagcacaggccaaagcctctagcagcaaaggcttcatgggtgctgaacttttacatccctcgcagtagagacagggcctgactgctcaaggggcaggccacttgggatcgcacttacactgggaggttggaccacaggaagagaaaatgtgtccaggcggagaactgagccagcgctggcccctctaacttgacaaactctcagcaaaatccactttagcctcgactttcctgagctgtaagatgaaattctgagaagaaagatgagaaaagcaaatctgtagagttgccgggagctttcacactcctccttctttataaaaaccagtttctgcttagctcaggtagtaacagaattatttctaattacctaaaatttctcctctaactggatttcagcaggaaatgatatcctcaaaagcttaaatttctggagtgaaaaatgtaaaaagttaagaaggtaggagtgttaacagttaatggattatcagagtggtatgtgcagcatagatgtgtacactgaaacaaagaagtgtgaatttgcaaggaataattctttttctttaaaaatagaaaatgcatgctaatattgagaatagaaactgaaatttattttgcataagaaacataaatttatggcctggcacggtggctcatggctttaatcccagcactttgggaggccgaagtgcgtcgatcacgaggtcaggagttcgagaccatcctggctaacaagatgaaaccccgtctctactaaaaaattcrccgggcatggtggcacgcgcctgtagtcccagctacccaggaggctgaggcaaaagaatcgcttgaagccgggaggcagagtttgcagtgaaccgagatcacgccaccgtactccagcctaggcgacagaccctccgtctcaaaaattaaaaaaaataaaataaaataaacataattttgaaattgtcaccatataattaacctagccacaaagaataggcaataagagcatagctgaatgtattgaattgaaaaataatgaccttgaaaacactggcacaggaatttatatttttctattttaatttatagcttgtgaagtgttgatataattttctacattttacataatttgggagtgtcttctttcaaaggagctttaaatatattggaatttattgggcaactgctaactcagaagcaagtggttgtccatctattggcttccagagagaggttgcactgsttcatttaggcaactggaatcccatttaccagaaagctaatcaacaagatggctagttacatttatgagtatttcttttagaggcatttagtttcaatcccacagatggtagctgcagaccattagtttctgagccaagcttttcagtgtcctattgtacttagcaagattgctatgcagcaacacaattattccaaattcagcaagagtcagcgggcctaaaacaaagctatgccataacaatttaatcccagctcaccttcccctttgctggataaataatcaaacacctgctgaattctgttccatataatgagaacatcttagcaacaaagatcaaagaacactgacatttgatctctaagtagaaccccattataaaaaaggatttttattacgtggtgtcggatagctattttgtgggtcagataatgctgggacaaataaacaataccaaaaaatcctaactcaacatgattaatttgtaaggcatgggtcattcctttgcctcagcatcaacatttttgagtgcttcattctatcagagtcagccatcttttgaatgacttgtaaaacagtcatttaaaatgtacaggggcaagcgaatatgtgctttctggttttttattcatgctttaaaaaaagcagtaaaaatgcaaggtgaaaggatattaaggatgtttatctttctagttgcactagaattcccactttcaagaacaagcaaaatagtttgagctttgaaaatgtccaaaacacacgttttccaatgtaattcacataagacaatttgacgattccttctggggtttcttttcatgcttgcagtgaataaataaatatgagtacaaatgataaggctttctttcaggattttattataattgctgaatacatctcctacactcaggcattaactccttctctgaatcttttttaaaaaatattgcatgtatgctatagaatgcaaatcctcctttccttctcccatcacacccagacagcttgtgaaaccccatattcttcataaaacctctcttgaatgaaaatgacatagggctttcacctccagtccttcatataaaggtctaattgaagcagctttccccagattctcttctctgtaaagggcacttgtactatttctcatatatgaagtaaatacttattttgatgtatttagtcaaaagggcagctgggcctctatacgtttgcttatgagattgcctgtcttaggaaactttaataagtcaaacattgaacaacaatcctttggcactgtgtgccactggaacttaatagagctcaatggtgttttttatattagcggttgtgtgaacgtaggctatgtgacatctagatctgtgtgaataccacagtgtgcacaaataacagtacagattaaaaacaaacttaacaggacatccaaagccattaattgtattgaaagtattcttaaattaaaaccatttatgtgacaatattgagcagaagactagttttcagtaagaatatttaatggtcatcaagaaaaacatagkcatttcctactccctatagaatacaaattcttgtatttaaaattaacactagccaaaagtaccagagcatcctcctaacatgaatagcctcacttatcttttggctaaatgttaatctaaccaacaaagggaaactcttttaagcctgtctcttcttgatatgacaggatgcagaattaccacaattttggacagtattttaaatcattcaggactacttttgaatagttgataaaaactaaacttttgtatatgtgtattacacttttttccatgtaatatcaaagtggtgatatacctcagatttaaaatttgtgctgacctaagaaatttttttttaatttttaaaattttacttgaagttccaggacacatgtgcagaatgtgcaggcttgttacatgtgccatggtggtttgctgcacctatcaacccaccatctaagttttaagccccacatgcattaggtawttgtcctaatgctctccctcccctgccccccacctgccaacaggccccagtgtgtgatgttcccctccctgtgtctatgtgttctcattgttcaactcccacttatgagtgagaacatgtggtgtttggttttctgttcctgtgttagtttgctgaaaatgatggcttccagcttcatccatgtccctgcaaaggacatgaactcatccttttttatggctgcatagtattccatggtgtacatttgccacattttctttatccagtctatcattgatgggcatttgggttggtttcaagtctttgctattgtaaatagtgcttcaataaacatgtgtgtgcatgtgtctttatagtagaatgatttgtaaccctttgggtrtatacccagtaatgggattgctgagtcaaatggtatttctggttctagatccttgaggaatcgccacactgtcttccacaatggwtgaactaatttacactcccaccaacagtgtaaaaatgtttctatttctccacagcctcaccagcatctgttgtttcctgactttttaataatcaccattttaactggtgtgagatggtatctcactgtggttttgatttgcatttctctaatgatcagtgatgatgagctttctttcatgtttgtttgccacataaatgtcttcttttgagaaatgtctgttcatatcctttgcccactttttgatggggttgtttttcttgtaaattttttaagttccttgtagattctggatattacgactgtcagatgggtagattgcaaaaattttctcccattctataggttgccttttcactctaatgctagtttcttttgccatgcagaagctctttagtttaattagatcttatttgtcaattatggcttttgtttcaattgcttttggtgttttagtcatgaagtcggcatccctatgtcctgaatggtattgcctacgttttcttctagggttttattatttattttttgagacagagtttcactctcattgcccaggatggagtacagtggcgcgatcttggctctctgcaacctccacctcctgggttcaagcgattctcctgccccagcctcctgagtagctgggattacaggtgtccgccaccacacccagttaatttttttgtatttttaatagagacagggtttcaccatgttggccaggctggtctcgaactcctgacctcaggtgatccacccgccttggcttcccaaagtgctgggattacaggyataagccacygtgcctggcctcttctagggtttttatggtttggggttttacattaagtmtttaatccatgttgagttaatttttgtataaggtgtaaggaaggggtccagtttcacttttctgcatatggctagccagttttcccagtaccatttattaaatagggaattcttttcccattgcttgtttttgtcaggtttgtcaaagatcagatggttgtagatgtgtggtgttatttctgaggtctctgttctgttccattggctgcagacctaagaatttataatgtctagaaaaatgatcttatggtacctagaaatgaaatttccaattcaaattattctagaagtaatgattttcttatatcaaatcattctgaaattataattttatgcattcggatgaaggaggatatatatgctgcaacagagatcaaaagtgacagaagcttacctctaagagaagtttatttctctgccaggtgyggtggctcatgsctgtaatcccagcactttgggaggccaaggtgggagaatcacttgaggtcaggagttcaagaccagcctggccaacatggtaaaaccctgtctctactaaaaatacaaaaattagcgaagtgtggtggtgcctgcttgtagtccyagctactcgggaggctgaggcaggaggatcacttgagcctaggaggcagaggttgcagtgagctgagattgtgccactgtactccagcctgggtgacagagcgagactccaaaacatctccgccacccctcaaaaaaggaagtttatttctcatgacctaacaattcagaatgagtagtccagattggtaggttggttctgctgcactaggttattccaagaccctattcttctgtgtttcaatcaacttcatcttcatggttgaagtgaggtcactgccatgccagtgtccctatgcatggaggagcagaaatgaagggcaaacaaccctcttaagtgatgtggaagttgcacacatcacttcagctcacgttctatcagtgagaattcagtcacatggccacatttagctgcaagggaggctggaaaatagtctgtggcatcctcatctgagttcgtaccccaaatagccaaataactatgtgttttcaaaatcccactcagtctttgcatccagcacaaagtcatgtgctggcttttccaacaagagctgagatagctcttttgtgctggtaatgtgtaaacagttaagattcttgactttgcccacagagtccccctatatagtgttagtgtagtaataggataatgcagtataatctcccattcagaaaagaaagaaagggaaacacatagtagtccctgatccataccagtgatgaaagcctgctgctcagtgtattcagctgttcttgcatgccataaagaaatacctgcaactgggtaatttataaagaaaagaggtttaatggctcatagttctgcaggcacaagcatggcagcttcccaggaggcctcggagctgttactcatggcagagggtaaagcgggagcaggaatatcacatggcagaagcaggagtgagggaatgggggaaggtgccatacacttttaaatgaccaaatcacatgagacctcatcaaatattgcaaagacgcaccaagccatgagggatccmcccccatgatgcaaacatatcccaccagtccccacttccactgttgggaatttcagttcaacatgagatttgggcaggagtgaatatacaaaccgtatcacttaggaacagcctccctgcccttctaggggttgatgccctctgcttagaccctggtggacattcttggccattggcctccatggcttctaactttcctctctggaggttcttccttgcccatattctccttagccacatgtgaggtgagacagagagaaacactcctttggggacctcgtttagggattgaacaatcacaggactttatgggccagacttctactttctttaacgatatgattctctcagaacttagtcaatttaggtcagccaactgtatcttctgtaagggaggaacaaagttgactacctttaaaaaacaaaaagtactctttcacagtgctcrcagatttctatttcaaatattctatttagctgtctttatggttggccgttaggataaagctctctactctcaaagattgcttcttgtagaactgtggtttacagagaagagacatatctagargcaactggactctgtaattttttttaattttagtagaaatgctaaaggtgattttatttctaaatcagactatttttttctattgaaaattatgagagtttggacccatttagttagccagtctccagtagcaatccattccatcacaacattaggaaaatgtactttcctttcagatgtccattggtttaaaggtgatgcgacatctcaagggtatcagttcaattaagatcacttaccacaaattctttaaattcagctatgatagatacagcactgctgtgagaaattatcctcccaaagctgagggctgtggcttaggggcagacagctgtgttcctgatgagtgaggaaggcccctgcttcccacagcacccccacacgagccctgcctcccactgcagttcgcagcagctcaagactcaactctcacttctgcatctgctgtctttgtttgctttggtgtccttgaccctgcctgctccacgtacctggccactctcattgaacctttatggttttgacatctgtcattttctgcccatgtaaactaccctggccactctctccagactccctccttctaatcaggcaggctttgtgtccccatgtgaacattcctgtcattcctctggtttggggacctgtctctcccaaacccgacattctcatttcatttcaggcttgccataaaccagggctcagataagccaggcttactgctgggaccactgcaaataatacctgagatgaaactcgaagcacactaaaccattttgagaaagaatctttcacaataaagaaactctattcctggagagatgrtgaaatttcagtgtgaggtgttttgttttttgttttgttttagcaaggcagtctttgagctgtgtgagataggactggaatgtgctatcaggaccaacctagaagtacaaagctaagccctgcctccggggcttgtaggaatgtggacagaataccagaacctagttggtatacagggtatgaagtcaggttcaaatgccaagaagtaagggtcaggtcagcagcaaaaatcaacagagagtggaggaactggagtgaagttggagcacaagtgagagtaatttccgtgagcatcagctgagatgtttgaatggcccaggctctgcagacacaggtatgtcactacctggccaaggctcccactgttcaggtcccaactaacagcagagcaacaagttaggcagacataaacgtttactgaatagctgttatatatcaggcactgccacaggagctatacaaacgttactcatttaattctaacaactgtactttgaagtaggtatcaactcagccttttacagatgaggaaactgtaacatggttcagatgacctagctagtaagtgtcagagctaagattagtgcccagttctacctaatgccaatggctttgcctttcctgtccagcaggggttaaaatatgtttaaaacaatctatggatttttgggacctgctacctccagtttccatgtttctgcttatgtcctgtagatgcatttatttgagaactaacttctggatagaagtttcaagattaaatgctcatgtttggtcatatggtaggaacttttggagagtttaattttaggctgtgtgggaccattatgcaacttatcaaagaccgtcccaaagctgaaagagttttctttctttgtgatgtaactaaaaatgtctttatcgggctctgattttatttgtgaaatttcaatctttgaacaatgactggtgggaaatccagttaataatgtgaactcttcgctaaatgtatcggtcataggtcatccaaaggtgatgagaagtctgccaatgtttgggaatgctgcatgcttgtctctgtacagtccaaaacagagtgaagtttttcagcctaaaaacacaggaaagcagctctcctatattcatcaatctggtcaggggcagttctgtgacagtctgctcaggctacagagtagagtggtgaacacagttgccactgggaactctgggactgcatttacactgcctgctggtttcccactcacttaaaacctcaacataaaaaatagagatgagtctcttaagtaaaaattgttttatttgagaataatatacaagaagtaggactgcaatctgggacatatatacagaccagattggcctctggagtgtccacagaataaaggaaaaggttagagtttattgggaaaggcggaggctatgcgttggttttggaagaaagcttattggtgctggcagcaacaaaagagctggtgagttctgactggcgagtgycaatagttattaggtaggacttgtaatcctggagttacagttaggcccttgtagttttggactgggcttgtgagactgtgtcaggcacatgttcttgtataagcagctagctgtccttatgctgcaaactgtccttgtgtgacccatgtaataagctgcagtttggaaaaatttcttctgatggctcctgttatcaagaaaatcatgtgtgagatccctccgttcatgatcctccttggcgccatttgcccgggtttgacacaagtgactctattttgaatcttacaactttcacaccccaaatgctagtattggaatagtaatgatactacatatctaatcacctcctattctgcaatggacatgcacaacttcctaaaaagaacacaaatccagaagaggaattagacaatggttatatatagtgatctcccactgaacacgacatatgtgttattaacaatgataatcattattatgctagacattttgcagtacttattatgtgccaggcattattctcatactttatggatattaactcatttaacctttacaacagtctcatgaagtagatattattattcttccaatattacatcttccaagatgagaaaaccaaggcatagaacagttaagtaatttgcccaaggccacatgtccagtgaaaagcaaccactgaaattatgcttcctgtttgaaagaactgacgataaggcagatttaatgagtgacaagtactttggagtcagtaaagggaaaagagagagcgtgataaacttacctatagtgtttagtctaagttaccccactcttcactgtggccaccgtccaccacttgtagctcttctccaaaagcctgaacatttttccccgttaatgtgtttaggcaaagataattgctgtggtactaaggcaggaattggtgagtgaggtgagaagataacttttacttagtagcagtccagaagaaatgacaacattcttcacagcactcctcccttaagcttccctatcccctataaatggatagacatacaggaaaaccttggtatgggactatttgtgtagagctcatgaagactagattgattaagggaagttatgttagcttctcttatgagactttgaaatcgttttattatgcagaatgctttctgtaaatggcatttacctgtaagaggaaaaagatgattatatctattgattatataattattcatctttacaaacattttgcaaagattatcacatttaaattctgtctggctcacaaggcttgtgttatcctcacccaccctcgcagtaactgctccctcctttctcccagccacgcttacctcccatgactcactcgtgagcctgccacgtgaccgtattcagagcttccacatggaacaggttaaaatgaaaaggaagattgttgacatcactttctgatgttactttattttactcgttcctttcattggtttaccaatcccaaactgtaaacsttatttgacccaggactttttccatgttttaaacgttcattacaattgcacagctcctataaatgcatgctcctcatatccctgtctaaagaattctatacagagatgggaagttgttatccttgaaataatcagacagtgatgctccaagcaggaaagcttaagaaatagggatgataaaggagacagtacacaaatggaaaaatttaaaggcagggcattattttgtgagagagagaagagagacaaactggaaaccaagaaatatcatgaatattacaaacaaccagctgtaggaaatgaggaaaaaaaaatgagatggaacatgaagcagggaagcatttgttttattcaaatagataaggatctgagagccattcgcatggcaggcttgtatgcaaaatacacacacacacacacacacacacacacacacacacacacacaaactatcatcttagatagagcagaaagctgacaaagtggcaagatgctgagaacactggcagtcccaagcccatgtctgtaggacaggagccaatgggcaggaagggcacrctcaccttctcagcctcgccttccaaacagcccctactgccttgtcacattccaactgagtttcatgcatttggtattgtacatattgttaaaatgaaaattaaaactgtcatacttgggtgactcaggcacatttataatttatcacctttctttatagttaaaaagaacaaccagggaaatgcagcttagctctcactcacaaactctcagcactacataaagcatgcttgagcctcataagacagatatactgcacacatttagcatatttctttctccccttatggaackttttcttacccctcgtatgcttagctttaaatatattcagaagctataaatattacatggaattttgagatctgaaaaatgacttcttcattgctgatatactgatatgctgaagaacaaatttagtatccatatttacatgataaaagttttcagttaatacactggactgtttttagccatccatggcaatgctgtgattacatttcaatcgttgagtgaaggagagaaaaggatccaatttagaatgaacccaggtttctgggtaagtggagatttgctgaatttgtaggggcaggaagagacacaggtctccagtggtaaagttaagtatattttaatgaggcactgtagccagaggtgtcctcttgatatttaaagtatgtataatgcactcatttggaaaatgccattttatttccctctgaataaaaataatagttactacttattgagtacttgatttgttacaggcattgtttctcactctatcttatttaatccttataacaaccttgtgggtatatttcttcaatttacagatgaggaaactgaagcagaaagaaataaaataacttgctaaaaaaaaattacataactagtaaatgcaaagaactgccaggctccaagatcttgcctttgcctctgccctgtactgcttccaacttgaaaaataacaaactagccatttttgacagaacagtcacrtttctcccttgtggctcaatctcagagcagccctctctgcattcctcgtgctcctctgcccagcgtgctcttctgtgtaccgttggagcagatctgaacatgacactaatgccctgtgttggattcacagccaaggtgagggtagaaaagagtcagcaaggtccagtgctttctaagcctttatttattatacaaatgatcttagaacactataacaagcaaggaaggggtggaccttagagaacttctgattcatctcaaacatgtaatgcatctcaaatttcagccagtcacacaacatcttcgtgattttggccagatctaccaaccacttttacaattatttaatacaccgtttaaataaactttttaacactttttaaatgcatttatgttaaaaaaaatttatatcactattataaatggcaagccagtatcacttttcataaattaaagataaccataaaaatgtacaaaaataacattatgaaattctagtctaatattgccaaactctttgaaattgatagccagtatagattagacattatttaagaggtgtgaaagatactgtagcatcaaactgagacttttccccttgaataaatagaaggattgaaaaagaagtagaagaaaatcactctttcctcaggtagttcagtgttatttaatgccatgtctgtgcattactgatagtcatctctagtgtagccagtggtttgtatccatcactcaggaaagtctagggaatagctatttccctcattgaaaagaacaaagactaagggccagaaaggtgaaatgtttacatgtctgatacccgacatctagcatttagtagatgcattaacatcttaaatgagtgaataaatgaggtatttggaaatatttgcactttaaaatcaaatatggcttctaattttgtaactgccatttcctgccagtatgaccagaacccaggtggtctcttgactcccaacaatgttcttgttcatgccacatactgctccacaagttgaagatgatgcataaatggtagttgagagctagatgcagattctatgacaggtccaagttctacaaggcaaaacctagcacagagttgggaatctagcatgtattaaataagtaataggggataaatctttaaatagatagacaggaatcttgttgtctccttccttctgaatttagcaattaagttcaacttctgtttactgagaatacctatgtttccagcgctattcatatagagtagaatcagataaatgggtctactcatgctgaattacccggatgaagtgatcaacaaacgcacactctgcctcctccctcatcttttttttttttgaacttttgtccctaatgtcatttgcgagagtgtaaaattctgagttcttcagacttttccaaccgctcttcccacctacttcaatctcttcaaccacagtagcccaagagtggccaccattaggctatgatgttaatcatcccagatggcctgactgttcaacaccaaagatcagggttagctggaaaccaaacactccttcagtcactgcagtgagaacaatataagcacatctgaaaggagagtggggagaagatcaaggcaacagggcaaagatattcctgtgggactgaatggtgctgctgttggcaaagtgcactcctgctatagattgaatatttttgtcccttcagcatttttatgttgaaatcctaactccaaggtgaggacattagggggtggggcattctgaagccctaatgaatgggatctgtagctttacaaaaagagatctgggagagctcccttgccccttccaagtgaggatgaagcaagaagatgccttctgtgaactaggaagcaagcgctcaccagacactgaatctaccaagcctccaaaactaagaaatacatttctgttgtttataagctacccagtccacattattttgttatagcagcttgcagggactaagacaactcaccattactatctttggtggaattcacattcatgtattccattccaagagcaggagcttgaagaaatgtttgccataaattacaactcaggattttttaccaggggagccacgtagatgggtccggtacaaaggactgtcaagtgtcatattttcagccattccgagagatgctaggaaggaaactaaagtgtatatataagatattcctgcatggttacctgctcattccaactcagcttctcctaacgctgggttctgtttttatgtggcctcttcagacatcaagaccttttgcccacatttccaccattccatcatttaagtagcaactgctctaacagtaataacaggaaaaatcttactaacccaaatatattttgcttttaattatgctagtaccatagtagacatcttttttagagaacaaaattaatccaaaagccgttttgtgaagataatgattttttcaagtcaacagatgaaggcaatatccatcactttatgagatcagtgactgtccttttcccagcacctagaactatcatggcatatagatgttcaataagtacttgttcaatgaatgaatgtaaatttggacatataatggactaaggaatcagaaatgggtgctaatttaattactactacttctccatctgaccaatrtgacttcagacaaggtacccaactctcagagcctccttttttttttaatctataaaatgctagtgytatttttaagattaggattaagtatttagagtacctagctcataacagggatttaataagtggtagctctttttattatacttataagtggatctatttggggatattgaagaagtctgaaaactcctttaatttcaaagacctaacaatcagtgccaccaattagtcatcagtgccaccaacaaggcacagcgttggatgccagaggagacatcagaagcaggaaatgggaagagtggaagagatgaagtaggaataaatgaatggataggaaaggcaggcaaagaaggggagctcagtggaggagcagtgacttgccatgaatccctgccttgttagcacttggcacagtgggacctatccacataagaaatcgcatttcctttcctcaagagtccactgagacttcaggagagacacaacttgacaacttttgaatggacacctgaaaaaggtcctcttattttctgccactgttttgtgtttcattcttttgtttggccaacttaatattaactatttcaatttagcagatatttcaggagcaacaccaagttcaaaacccagttcttggcacccaagcaatgatatactaaatatttttcacctgagactacagaagatcttacatccctgtgatgtctataggtgtgtatttctcttaccaccttgacaaaattaagtggctttctcatatgcaaggagaattatgctttctagtatccaagtgttaaagccagcatactgttacttttgtactttgaaactataaatgggatatggtttgcgggggggagaagaaattggaattggtctcattaagggagaaaaatcttttcctgataacctattcaagaagagataattctcaggtttccactttggatactgccattatccagaaagtcatcgaaacaagattgctatgatacattatattgtcatatccacatatccatttaggaaaaaaacacattggcaatagttcttcagcagaattcattatattctctgaatgaatcagattgggagggcaaaatatcaaaaaatgatattctctccaaaagtaatttttcataaaaacaccaggacttttggcactctgtaaatattgtttttgtaacaattataattaaaagagccaaaaggaggtcagaaaaatgtagagcccagtgaaaaatgtcccaatgccttactccatgaaaatgtctagaatgatttaaagtattgggaatatgcaaatgaatgaatattccacaacagcctccacttgaacaaaacaaggcttttgaattggcataagttccttgaatagtattctgaagtgagtctatgccaaaaatataaaataagagcagcacattaaagtagccaacagtcaaacagacaaactggcccttcgggggagactgaaggatttcaagttaatgcccaattcacttcaatacaacaaaaacatgttaacttctaaggtgctatgagagatacagggtgtattagtctgttctcatgctgctaataaagatatatccgagactgggtaatttataaaggaaagaggtttaatkgactcacagctccacatggctggggaggcctcacaatcatggctgaagacaaatgaagagcaaagtcacatcctacatggcagcagccaacagagtgtgtgcaggggaactgctctttataaaaccattagatctcatgagacttattcactatcacaagaacagcatgggaaagacctgcccccatgatttaattactcccactgggtccgtcccatgacacgtgggacttactgaagctacaattcaagatgagatttaggtggggacacagccaaaccatatcaaagggggatgtagcctgattcctgttttgtgaggtttgtaatctaatgagttagacagctacccttgcaattacaacacaaggcaggatttattcattcattcaaccagtatgcactgagcacccactgtgtgtccgtctgtgttctgagtgctagacataaagcagaacacaaggatctctgccttcctggtatgggattctaacatgtggattgttgaaatgaccatgagtgatatggaggaaaacaaagcagacaagggggatgcaacctgggctccagtgataaagcccaggggagtaggagtcctcactgagaaggtggcatttgaataaagacctgaaggaggtgagtgagtcattagggtggctggggaagagccttccaggcagagttgaaagagcaaggacagaataaacactatgcctggcatgtgcaagaaacagcaataaataaacgtcacgggaagaagaaattaatcttgactgtggaataggagaaaacatcacagaaaaagatgacatctgacctaaatcttgaaaccgtgccctgggtggagagggaggatggtgacatgcagagtgagcagatgagccaggagcagagtgagaacaagacacaggtcagctgtgctggcacccgcctgtctgttccagctccggttctgtgggttactggtgttcattacttcatcaacagctccctgctgtttctttttgccattcacatcctcatctacctcttggttttttccctgcctggggagtgctaaggtcatcaccccttcttcctcctgtctctgggcatagtccctgcccccagaaaaccctgttttctcacctgacttaacgtatatatcagttacccccaggtcagtatctcagtcacaatctaatcaatagtgctgtgaattatggaaggaatgatcagggtgtaggaaacatttgcaaccacctataggaagagcaactgtcaacagtgggacctctgcarcctgcaggtatctgcagtggctctgaagaaagagctcatggtgtcctctccacattatctatttgccagtttaggcctctgtatgtctcatgccccttccaccctggttcaccartctagaagtcatttatagagaaaaccagcgtcaccaagttcacccatgtctctctccacctgctcccctggtgtttctgagcctccttaccctgtgcaacccttgtgccgtggcacccgcatggtaagcatggatggcagacttggaagctgtggcagtaacgtgggcttaagatcactttagaggattccacactgaaatgcacacaaaatttcaggacactggaggaaaagagagaaattcacagaggctggggtcaaagaggaatgcatacagggtaggggctaaggcatctcccctcagccctggcagtcccagcatagaaggagctagataggaatgatgctttccagcagcccttgttgcacactagaatcacctgaggagcttttaaaaaamtgattctccatccctaattaaatgggaatctctggggtaaggcccgagcaggtatttccttgacaattccacgtgcggcttaggctgagaacaactgagctagaatcaaagctgccttcttctcactgcaggtcctgcttcctgtgcagctctatgcaaaaaattctgcctacctgggaaggactccccctttagcctctctgccactcctgtatctccaaaatggggtttcaaccagacagttctttagaggagaggaaaatagatggctaagtgttagaaccttgggtcagaccttggatccaagccagcagtgcaaccttgggcaaattatttaacctcccctgacctcattttcttcacctgtaaccagatggcaataatcatacgctcctcatggggttgtgatgactccatgatatcataagtgcagagcccctcacatagtgcctggcacacagtaggaggctgctatttgctgtcagtgttgtgtgtcttaacctggcttatgcaagtccttaccctgccctccagacacaaggcttgccagtttcttgactcaatgtactctcaaacttgaattgttttaaatttctctctcctcctcctcctcctttttctctccagccaccgcctcccactaccgctccccgccgccctctctttctgtctctctctctctctcatgctcccacatacactctgtggtgtctatcacatcccagtcttgctccctctgcctggcctggcctctctctgtccttccaggcatggacccctatgcatgctcaagattcatcttataatcacctccctggaaactgtcctgaacaagcccctgcaccctatctcaaccagaatcctctcctctgtgctactgaaatgtcctgcacatatttctaactctgcatttaccacattatattctatctgtgcatgtagctcttgcccccactacaaatgagcatcttaaaatgcattatttttcttatatttttggtgcttaaaacaatgtctggtacacaataagcactcaataaatgctgactgactgaataaatgctctaaaatatctttcccagtggcatattaagacatctagtcccctcctcttagcctaaaatttataccattggcatcatttccatgggttaaacaaggaaaacaccaccactgtatagattctctatgcaaatctagctaaagtgcaactgtgtatatacgtgcacacacaaacacatgatactacagaggagcaaggactatctactgcagccattctcatcacctccctatccattggtgtcctctgaggaacagtggggtcatgggctagagaaactctcaggttctctccaatcctggaacttcgtggaggcaggctcaggtctttgggaagttcaaagaagctgactctgagggaggaaaacggagaactggacagggcagtgaggaaccaggcccattgtcatcccttgatgggcagaagacaagatgggaatgatgagatctgtgcaagaacatcattcaggaagggcagatctagatgcaggatctagaggaaatggagagggaggtgacaaatagggggtaagaggaggatgagatcttctcacagcaagcaccatggaagggtttggagtgggggaaagatgaaatcagagggttggttggggatcaagttgacaaaaatagaatgcggataagagaacaaggaggacagaacaatgaaaatgttgtgtaagacacattaacattagccctgaaaatctcccggaagaaagtcaaaactcaagtcctctgaattcagaccggcttgaaagagcctgggcttctggtggtgaatgggacaggagcctcaaggtccagccgttagcctccccttcagacctactaaaacccagccttcgttcacagtaggtacatgcacgttgtttggtgaagaccttattcaatactcacagagatggtaactatttataagcctgccctttccccccttatatctggccaaaacctttgtttcacttggaccaggcaatctccatcacttcaggccataacgctgttctgtttgctgttgctcttagattataggtaaacagtacggaaaatgctatttgtgaccaggagcacatttctggaaaatgcctgccctgctggtatttggctgaattttgaatagctctctttctgactaccttggccagccaaatggtatgcaaacaagagggtgagctttactcattcccaacatttatatggcgtgataagacatgacaaactttataggaaattatgcataaatttatatcaaaaattgatgcattggttgtctgaaaacaaaatcgcatttgctgataagctctaatttattgtgggaacaagcaataaaatgaaggtttcctttggcaaagttttactggaaattcataaaatcatgcaagtgtactgattacaaatcagctgtctataccataccatgcacagatatgatcattgcacaatacttatctttctcattttgtcacttttggcaccagtttgtgtttgagaacctctyaactatgatataagctatgagaatattgaaaaagggaatcattaatatgcaaaaaacaaattaaaatttagggtgcaaataagataacaattcaaaagatttataaggtaaaatattgaaaaattaaattgaaggaaaaacatattaaatgataatgagagaggaatttccaaatggaagcatataccacaatcactcccttggcaccagtgaaagggcacattggaatattaaacgcccacatggttacaagcaaggcttattgtgaccactgataatgaatgttactaatcagacagagaggtrcagaaacaatagtaaataatgatttcacagaagtaaaatttgtggattttttatttttacataaaaagaaacgtaatcagataaagataccaagtaggtctctgacttcttaggcccaagagcaaagtctacaatagatagtttcaaaattcagtttcctgaaagaagtattttaagaaatttttttaaatttcaaattgtcccccttctccaactttttaatcatgatrtaacaccatgttccctaagaagtttaaggacacttttttctctatatggcatattcttttacaagacatcttttaagatctaatattctatgtatttttacactgtgaaaaactattgtcaaaaggaggaaatactttgcagttttttacttcctaaatttataggaaaagtcactttttaaaagtttacttttataacattttaagaaagcaataaaacccacatttcctcccttgtattctactttatgaattctctcctgaaatatgatctacttaaatttcacttacctcctttttttttccttttgataatctgtagtagatatttgcattagattgctcctgaaatgtatgacaattggaacattaaaatggttccacctccatttccaaaaattactcatgcaactttgatgcatctgcaaagttaggcattcagtgatgatgcttgcctgacttttaatgtgaaacatttgagtgcaaagttagatttttctatttatttattttttagagacaggatcttgctttgttgcccaggctggagtgcagtggcatgatcatagttcactgcagccttgagttcctggatttaagcaaacctccctgcctcaacctcctgagtagctaggactacaagggtgcaccaccatgctcagctaattttaaaattttttttgtaatatggctgggcacggtggctcacacctgtaatcccagcactttgggaggccaaggtgggcggatcacatggtcaggagatcgagactatcctggctaacacggtgaaaccccgtctctactaagaatacaaaaaattagccaggtgtggtggcaggcgcctgtagtcccagctactcaggaggctgaggcaggagaatggtgtgaacccaggaggcggagcttgcagtgagccgagattgcgccactgtactccagcctgggcaacagagcaagactccgtctcaaaaagaaaaaaaaattgtaacaacagggtctgtatttcccaggctgatctcaaactcctggcctcaagcaatactcctgccttggcctcccaaagcactgggattacaggcatgagccaccatctcccaccccagatttttctataaactagcaattgcataggtaactttagaagtacatttgaaaaattcgataacaacattaaacaagctttttattcattgtgaaatgctttcagtagtgactgaaagttacttttctctctcattgtgtaaaactaacacagtgcaactcaatagaatgttttaggatgatgaaaatgtgctatatatgtggtgcttgataagggaggtgctggtcacattgaacagttgaaggttgttagtttaaccacggaattaattttaaaattcttatttaattgtgattactttaaatttaaatagccaaatatggctagtggctaccatactggacaacacagaaccaatagatgtggcttgttatctatatacttcrtttcattgagatggaacctttgtttgtattttcatttaccccatgtgcgcctcaattttcttacctagatgaaggtgtagactacgtgatttctaatattgtttacagctgaaacttgtctgactctcctctttatcccaaaatatcacattctttaaaaccagctttatcacagatctaaacatcaaatctaataatatgaacctttaatatctgtaagaattatcctatatgtttgagttttatacaaaatctttgaagtcaacattatcatactacttttcacaaaggtggcagaaaacattttctctgaaggtatctttgcacgattgcaattacataaaaaatactagcaaaaccttctacttaatagctcacctaaccttcctttctctcttctctccaccccagagaattttcggtgatgttactgagctctcctaacaatagcaagcataatgcttcatttgtttggcatcccaccctctgctagatgttatattaagattcttggctgggcgcggtggctcacacctgtaatcccagcactttgggaggccaaggcaggcggatcacgaggtcaggagatcgagaccatcctggctaacacgatgaaaccctgtctctactaaaaatacaaaaaattagctgggtgtggtggtgggcacctgtagtcccagctactctggaggcccaggcaggagaatggtgtgaacccaggaggcggagcttgcagtgagccaagattgtgccactgcactgcagcctgggcaacagagcaagactccgtctcaaaaaaaaaaaaaaaaaaaaaaggttcttgttgcaggtgtgtgtctcaattgtctttgcatctccagctcctgggaaggaagatgcctggccagtgatgagaccaatataccaatgatgttaattaacatttactaagagctcattatgtaccaagcattgtgctaaaggatttatattctcacttctcactcacaacatctatgaggtagatactattacagtctctgtttaataaaygtatgataaatggacaaataaacaatccagaaacttggctttttcttttcctggagtttgacttgtgcattacagaaagatgaagagaatttatcagcagctttttctacaatgacaagccttagcagcagtttttcttcactgcaaaatatgtgtgtctacctaatatttttaacaactaagggttcaaagagcaacactgagagctataaggaaccagatttattcattgacattcacactggactggagctcattgcttactctctttttctgtaccttttactctcagcagttgtcttaatcacttggcatgctcctaagctggttcagtactctcaattaaattacaagatgaaaatacaagttgtaaaatctacaggtttattttgttttgatttgttttacttttttaaatctcttagactaatgtgtgcctattgagtagtgtttattttttaatgaaaacctgcttacacatcattaatttttctctgagatcgtttctactagtgtgtaagattcgtgaaggcaggaactttggcttgctcatccctgcgtatatccccaggccttggaaaagtgcctgacatgtagacaggcaatcaacattagttacataaataatgaccgaagttctaaatatttacrtggctgcactatgttcctctgcctcacttttttttggtgcaattttgccacctttaaaaaaggttattatttacacaaagtaattgtatttacataaaataatcagaacatggaacaaaaacgcagcatacaaaattgaaagttaaaaattcttaaaatgtcarttatttaagtagattcagatgtgatcacagaaacttttcagtggttaaccagaggtgtatatcagaattatctggaggagttctttaaaactatagaggctcaggtctttgttcaagagatgctgatttagtgagttcagggtatagtctgaaaatccacgttttcatagagaatctcaagtgattgtcttttactttttcctttttcaggcagctgtatggttgtattagaggaagcaggctataaatatgcacacatatatatttattttatatatatataaatttctccatatatatgaataagtttctctatacatatgtctctctctctctatatataagtctctctctctctctctmtmtmtatatatatatatttgtcctttttgactgaatgatttcacttagcataatgtattcaagattcatccatgttgtagcatgtgtcagaatttccttcttttttaaggctgagtgaatatttcatttgtatgtatagattacattttgttkattaattcatctcttgatggacacttgtatgcctggcttctttcagtaggcatagtgctttaagattcaccccttttatggcttgtatctgtggttatttgcccaggtaattttgatagttctcaaactctgctagccatatgaatgctgaaatgcccaaacttggaatcaaaattgttttgggttaaatatgtgtgtattctttccttctctggttgattcttgaccagttaggttactatttgtttctcagtggtaagaaatttgtatcactcttgaggcatgttccatgacaagggcaaggaatggatcatggtaataacttacagttgtatagcactgaccattgacagtactcaagtactcattttcatgcctatttccagcatcatctacatcaaaggcaattcctaagaaattggtaattaagtagaattttcttccaataacggaggaatttgttttttgtttttgtttttaatagagatggggtttcaccatgttggccaggctagtctcgaactcctgacctcaaatgatcagcccacctcggcttcccaaaatgctggggttacaggcatgagggtatttctattttaaagaggtttctagaggattggagaactcgcaggactaaaagatgtcattttatgctttgtgtcatataaccctcttatcaacatcttataatgacctcttatatatcattatccccaccttacctatgagaaagcctagaccatgaaggattaagtagtaatgtgcttaagggtcgcacagttggcaagtggtaaaaccatcatttgaacctaattcttctgatccagtttcactgctcatggcttcctgtgcatctgtttgaaaggtacaaggatggctcccatgacagaaattaactcacccaccagcccagcagggtgcctgaaatgcctgaagtaaattgacatcttttggtcctgagagttctccaatcctctagaaacccctttaaaatggaaatactctacagatgagttgcagtgacagcaaattcacccagggggaatcagtttatagcaataaaaacaacagccacttattgaacctgctcttacatacattagatacctcacttcattctcaaaataatcttttgaggtcagcattattatccccatgtaacaaatgaataaacagtcccaagaatrcttaagtaatttcttcaaaattacactgcacatagctggaggatcctgtttcttaatctcaaatctgcatatgtgtatagatagtgcttttcataccacctcttaccagacttttttccaataagatgctgaacaggggagatgaaaggttgggacaccttgaggcaaatggctgggaaaaggagtcaagttggacttcgtgtataagtgtgtctggagctggcttgaattactatttatgaatgactagctataaaaaaaagttataaagtcctctctgtttttttattttcactctttttaaaaacatctccctctacaatgaattctttgcttgcgtagaatgtgtatttggcacttttttcttggtctatccagggagtatttttgaaatgttgtttcttactgagcgccctaaggaactgatgatattaatcgtggtgaagaaagaacaagaatataagattcacgctgctctttgattaaagcttcttaratagaattttacctcaagagctttgttgtctcaatggcctcctataggtatttttctgagcrgtctctgagggttttgtttcctagttccctgtaatactgcctgtcagcttccatgctgcatgtatttcacttcaaaagagagcctggataatttgcctatttctgcattttagagcagagtcaaacaatgccaaatgggctatcacgtgttgacaagaagtcagcaggaaaggctagtcaggtaatcatcaagttgatatatttgagacactgtgcgatgatttcagctttgcatcaactaagtactctccctgcacagtgggtatctattaatcaggtggagttcaactcagggtcccagttatgctgtttgttgtcttagtgccttaaataggaatatgtgatataaggctccattataggagtaaaactctacctaactaccaatttcttaagaattgcttttgatgtagatgatgccggaaatagagtgccttttgatccttctgaatatttaagaaccttcataaaaaagataaaaatttagaaaactagtttactagaattcaatgactcttttgctgaaccaaaatagttttatatatttacaactatttttgatatattgccctacattttgcaaataattttctcagaatattcaaacatttttaagtgacctttactatgtaccttttgaattttaagccttggtaaggaaatttctactgaaaaacataaaagtttttaagttgtatatgcttttcctaattgaaaggcatatgttagattgctcttgatatgtgatgctagaaagctcaaattgtaattctttctaaaaatatttctacttcagaagtgttttgtatttaaaaaaaatcatttaatttattgaacatattttattttacatatttcagtggaaaatcacatcttccagagaaaaaatcaatgatattttatttgctttccccagactgagtttaatgacaacccaagatatataaacttatatcctggctgcttttcttaagagatttccagcaaaagtagccacctaggcaaattgcttatgccacacaactagactcaccccatggatcaagctttgaaacattgcatcttactgctcattttatagaatattttctttattaccatcaagcagttttctggagagaaatataacaaatgacccaaaacaatgtaaacctgaaaatcgatagctgattgttaataatacgatctaaaagagagatttcagttactttgtctcatggaccaagaaagcaggataataatgttaaatcctttgtgtattttttttccwctggttatcaaggtttattttcattagctggtcccatttgattaaaaaaaaaaaaaaagagctaatcctggacagagctgcttaccaaaaaactgaaccatagtaatggaaaagtattaatataaactaggatatttccaaaatgtattcacctaaatgtctgtttgatataggcaaaaatamaaacaaaacacaaaaacctcacgtattattttagtcacatatgtggttgggcgccagggaatgggtgtggttagttgaagcccctgtagaataagaagctatagactgagagaaatgaaagaaattgataagctgccttgggagtttcagtctggccaaaatgcatccttggcacaccctgcattccagggttccatattccctctgaggtccagggcaggtctgacctgggttgggactcaggagctgggattgtatggggttgtcagcccagtcatttagtgcwacatcaggaagaacaggggtctaaggtatcaggtccatggtggttgtcagtcacagcaagagctggacagaaaggcagggactgcaatgggaaaaatcaaagctagggagttcagaagcattccagaggcaacttgaaaccacgggaggaagatctttatggcaagatacctcttggtggaagggagatgttaagggcactgccagctttgacctcagccttagaaagtggatgtgataatgatcatggtaaagatcagtgaaagagctggtatccttatataattcttgaaaaaagaaatacatggagcaacagtgaattctcctccgtagtacatcctgagaagttcacagggttgtaaaatcttggaagaaaaaaaaattatcttggagttaccaaataccccaacatatgcaaagaattattaaatttccaaagtaacatttatacttgcaagtgagtatgtgttccatacagagtacatgttagccaaagattcatagctataggacccacttgtctggaaggcaggctgaatttctgaactaggcatgaagcaggtcaagtcatggattagcatgctgaatgggattgtggatctatatgcttgcattcaaaaagtgacttgattggaaaggagaccttatgttaggaaagacaaaaaatggaccttgaatgtgtggcttaaaagttgggattttatttaattggacaattattcatttttattttcattttcttgatactttttaaagaattatcctcttgggtatatactttgttcagtttttagtcagacatctcttaattgcttttggacattcaaattctgaagtgggaaaacctcaagcgatttagtgttggcttagttttctcatttctacaatgaatgtcttgggctagaagatatttgaggtctcttccaactttgagtgttgagcctgggcagtgtaaaaacaatctgtatggctgggcgcgatggctcacgcctgtaatcccagcactttgggaggtcaaggtgggcagatcacctgaggttgggagttttagaccagcctgaccaacatggagaaaccccgtctctactaaaaatacaaaattagcccggtgcggtggcgcatgcctgtaatcccagctactcggaaaggctgaggcaggagaatcgcttgaacccaggaggtggagtttgcggtgagctgagattgcaccattgcactccagcctaggcaacaagagtgaaactccgtctcaaacaaacaaacaaacaaacaaacaaaaactatctgtatatacacttgacattgaaataagagaaaagttttcactggcttaatgattcagtatccaacaataaatatcactgcagattggaagttcagagtatcaaatgttacaatcttgtttaaaacaataatgttatgacctacaagtcatccctgtgttccttgcttctgtcctcacactttacctataacacacacactcctccaaggtagggaaggtggacgtggtggaggcatagttggttcttcacactgcagtgtatttgtaacatatgttaacagaagggtaggtttcacatcctaggtgaattattctcttccaatcttgaattaacaaggattgctatgaatgtaagagggaaaatcattgaaataaaaatacctaatgccacaattgttccaaactaaatgtaatctaccaccctgttgaaaatttagaattccagagattttctaactggatgccataaataccttctctcttggctcagaattccctgggagttctgaaacttagccccaccccatgagggtagagtttatgttattcacacttgtgtctccagacccagacaaaatctactgaaaagtaggatctcactaaattgtgtgataggtgaattaatgaatgcttatgtgaatgatgaaatgtttacgcacagcccccaaaggtcagcctcaaaggatgatatgggtatcctgcagagtggctcctgagggctccaggtaccaaagcatgactctaagggctcatcacacattctggaaactgtcagcttagcaaggctggctaagcagagtgacagacaatcccagctggaccttcccttcaagtattatgcaagacaggttcatccccagggacagggggtgatgtctggactgggtcagggaagagccccagtctcgacaaggagcgaagcaagggcatagaaggtagcagcgcctggcatctagcacccaggtggggcctgggacaggacttccagcaggaagaaggtaggacacgctgtcagaactaagatctaatattcattaactccttatcacccaaaattgtattcccacctccaaaatgttatttttaacttttgctaaaaataaacaaatatacagataaataaataaaaataaacattcaatttgttttatggcagatatgctaaggaatgatgtgataataacaaaatattggagacaacttaaatattcaaatacagtggttgtttttttaaaaatatgggaagccatgcactaatactatacaactatgttaaattatttgtaaatattcttttaacatgtgattaagtgaaaaaataaggtaataaatactagtattgtattttttataaaaagaaaattttatttatctacaaagaaaagggtttggaaagtcacaaaccaagatattaccaatttttttgttaggtaattagattatacatttttcctttttttgcttattaagaaatttaaatttttctttaatgcaaaaaatatgtaaaagaattaacaggcagtaaatttgtccttgatgcactgcattacagaaagaactctgagtggaataaatatcacctgtcttttggacgtcctaggagttgagttgacactgtggtggttgcttgtgttaggtggagtgagcaatatcacagaaacctcccacgtggagatttctattgtatttgaaaagcttagaacactgttatgtgatgtataaactgtgggtcagaacagtgatacaaaaataataagagtacttttgcttcaagaaatccaacttaatttaaagtgactggattccgatttataagcctgaggtacattagagtttgaaagttttttgtttcctttcaaatgtacattaatatttggctcaatgctcatagggaagcaattcagcaccaaaggtgcaattattcttccagaatgctaaaatcaatttagctgtttggcttataataaatgctgagttatattctcagatgccaaaattcctccaattataggtgtacattactgggacttctgaaaaaagaaatatgtaagacctccctttttaattcgtggaattcaagccctaaagaaaaagaacaaaatcctcttaaaaataagaaatttctaccctcacctatacatttgtaaaaccaatttgatcgctgcttgtatttttagagaggattttgttatttttctctaagagtatcctttttttctctgttaagtatttttagactctgctgaaaagcaactttatatcttccatgtgacttactagaaaggttctcaaatcatagcctataaatcattaatgtcccctgattttctataactattttccaattgaactgaaaaaaatgaccaaaataatcacataaagaagtattttttgtgtgtgagataaatctgttgttcattttacacacacacacacaaacatttttaaaatgtaaaaacagtatatgtaatctcaaagttagatatgaaaggcatcaaagtatggttgaaagaatacagacattgaaatcatagaagattgactttctgtcatagtttggacaattactgtataaatgtagggctaaattacttcatttctctgtacctcagtttctcctgtttactcctatctagaggcttatagttaggggaaaaaaatcaggtaaaggtacagtcataatcactaatgaatactaaatatttaataaatgctactgggkgcttgtctgttcattgtttatttggggttttttttgttgttttttgttttgttttgttttgttttgtttgagacagcatctcgctctatcacccaggctagagtgcaatggcacgatctcggctcactacaacctctgcctcccaggttcaagtgattctyctgcctcagcctcctgagtagctgggattacaggcacatgtcaccacacctgggtaatttttgtatttttggtagagacggggtttcaycacgttggccaggcyggtctcgaactcctgaccttgagatccacccaccttggcctcccaaagtgctgggattacttctttattgtttatctctcttgctttactgtaaatttcctgagggcaggaccgatgtcctctttgaaccccaacattttgacataatttctaactcccagtagttactcgataaacatttgttgaatgaattggtgaagcatgtagtatccagcaaagattgagggctcctaatcaggattatttgtgacattattgtaattgaatatgctaaatcttcccatcctgccagagttccaaacccttttaaaatttataattaggatatcacaaatatctcttctctaaatctttcatattcgcttctctaaaagctagagtgcaattctgtgtgcagtgctctccctatgttggttgctacttaatctcctaggtttttcatgttgtccttaacattacacagttcttccttattgaggcagtttaatttcaatttgcagttcccctcactgcctccccaacttttgaaagaccacattgttggttttaaaagaaaggtcacattattttctggaagtcaagaatttatcagattctgccattttatcagaacaaaagttctgtcatctatcaaatggatgagtctcccaatggtggtccaaccaccatgccagtgttgccatctgtgtaaggaaagactttggctgactcacccctatgaaataacttctctactgtcttgtttatcgtccctcaggcactttgcattctacttttccctttaggtttgtgggcatccattcactgtgtgcctcttcttatgctttgctattcttactcctttagtgccttcgttctttttgaatcaggtgaattgtctcatagggacagtacatgttatgctttgattacaaacaaccctscaatctaagtggtttataatatatgtttttctctttctcatgctacatatccatcatggcttgggtactcctgtgttcctcttggtcttagtccaggaccagacaaacagaacagccactatctggagcattcccagacaccagacatggtggcagagagaaagagacccacatttcacaccaactgttaaagctctcacctagaggtaacatgtgccatttctgctcatgttttattggtcagaatagtcctattctactcctgtcttctaaaggggatggagaaatactctcctaccacctgtcagaaagaagaactgtaaayatcttgtgaagagattaatgactgagacatatacctttctatcaattcattttggtcatgaggcctgtcccacctgtgggagctcatatttacttccatgttttaaactttcaaatttactttatttgttcactayatattcttgagtagagaaatgagaataggtagtcaagataatggtaaataatggtaataaccccatataattgctttcttatatatagattgtttataatgcagttaactcccatccttaagaaatacataaagtgtttgagaatcactggtctccaagaaagaacatcagactcttaaagacaaaacacagatttgcccttgtgtctcttctttgtattacctgcctgactatatatagatcagtggctcctttctatatgccattttttttccgctgaaaattatacctagctgtgacttatgtggaagtggctaagctggcaataattgtatagatgtccatacatgccccctcagaatctcaatggtacctcaaggtcatctgccttgaggactggtaaatctggtcataatgtggataatttacaactggagaaataaaggagttctccttgctatgcaaagaaggcctctttgaatgttggtgtcggcattaattccctttatgatgtgaggcaaatcacttaattgctaggtgtcttctttttctgatccaaggataatattaacatacctctctaggtccttgtgaagcataatatatagaattgattgcaaaggcattttcagaatatgagacactatagagacatttgttgcactctgaattccctacgttgcccacagtgccactcctagaggtagatgtctggatagggagtgaatatttgagggaaggggtagttatacagggcagagatgtctatttctgaattcccaattagcctaagtcagtaatctacgttgtggattatatctggcctgcttgatgcactgatcttcctcctttaggcatttttctggtttctttttacttggcagaggagataaaattcaaattggtcttttttgcctggtatagtatctctaggaagaagttagattggatggccaatttataaacaatactgacagtttgggtttagggttagagtaatagcatacttgtttagcatttaactcttttgaagtgctttcacatcatggatcattttacctgagacttgccataactttgtaagctgggtattaccctaatttacagaagagaagactgaggttcaaaagattccatatgttgcccaatgtcaccacactaagaaatgacaaattcaaacccatattttctgattttgcgtggagaaatattttgttccattattccaggctacctctgtgttttctagcagagataagtgatgcccagatataaaccatgatcacatggagccaagacagggttgaatgaaaaattagcccaaaggaacttattatttgcagtcaaattcaagatattttgcctagaaagtaaaaggaatgagctatttcttcaacattaattttagtattctaatgaattaaaattaattcagttaattaattagttattttccaccagaggattcagccggaatggggagggggaggaattttgaattcctggtaaaaatgatgacttgatttcttgatgatgatattagccaatgactcaacttccatctccccttcccctataataataggaataaggagagttgattttcatgcattcattattcagttactaccctttgccaagaagcgttagtctaatggatgaagggagggggagaacaaataagtaaacagattattataatacagtaagtgctaaaatgtaacaaaggatggcaccaaacccaaaaggaagggcagcaattaagrtgaagtaagccattacttaaactcattaagtaagagttaggtcagtggtgggggaaaatggagatctagctgttagggcagaagttccattagttctggatggcaagaggatggggaaggaggtgggaagtggaaggcgaagggcaaagtaaaaggtaagcaagggttaaaccttgaaagatatctatggcctgctaagaaatttaactttattcttaaygctcttggagatactgctgaaacttataaaaatagaaaggtctgtggggtaaatggatttggagacctagtaagtttgtcagctgactcaaaaacacttcaggctgttagtaaaatccaagcaagaaaagaccaggtaaagagaggttatggtctttgctgcacatcatttagcccataacctaggcaaactagaactggggtctcctaattcttaggctggcatttctttctcccatcccacattgccttcccatctctttggcatttttttcctttagagaattgtattccttttggaatatatgctgagatgctagaatatctttaaaggtaatctcattctccattaaaaacagatatttatcatggtgatgttaacatttagacagttcttaccagcagtctcattcgtgtgatctcatttggttttcttctgagaacgccaaagtctttttactcctgtgrgtaaaaataaagataccctaaatttctctggtggaatactttaaacttcaagcagtgccttttctttatattgtagtttggagaatagagcaaaaaaaattgttttattttatgctttagtatcaaaaaataactgctcattgttaatgagaattatagggccagttcaacygcagtgataagttcagggcataaaagatcatatatcaacatgacctcactaaccttctctgtactaaatgacaaactgctaggaatagcctttggatcaggccacagagacactaaaatacttacccttcaccacagaactgtattgaactctatctgtcatttaccaccgtcaatcatagaagcctgcttggatgctaaacaggatttcaaacaaaaaataaaaagaaagagaacttccttcaaatagttcaacttctgattttatttagtgtctttctggacatttgaaataatgtggggaaggatcacagcaagttagccatgttttttgcatttgtggagggattgtgtataagggaaagagcaagattttcgggccagtgggattcaatctggcatctatgcttctttccccttccataagaggttaacactatgtcattgttataatgataggacagatatgtgacattattcttttctttatagcaggactagaccaagctaacagagacttggttagctttttaagagaaagagactcatgtaatttagccaaaaggttctgagactgctaacttcatgctagacatacttgctgcaaaaacttattccccaaaattcaactaaatgccattgtttcttgtttgtaaatgtgtctatgagagacttttatagttttcttagaaaatcagaattaaaaaaaattatcttcaggaaaatgaacatacccttcaaccaccatcaaccactctaaaattcatgtgttactttcatgcctttttcatgtgagacagaaatatatgggatggcataaaaaataaaatatatcctcatataggttttattattatcctcataatttgccaactgggaattactgagattccacattgtacatagcatttatgcacttgatttcgggaccaggactctggtcgctgcagaaaaaatactgaaccatatgaacactgtccttgcatttataaagcttatgaagataatatcaaaggtgatttgctgagtgaattaatgaaatcacataacctttgtgttcacataaccttttaacacaaaaagagtgcattttcctatgactgagtctaaattacagcaaagcaactgatcaatacgatttttttaaaaagtaacttgcagtttcaactgcagcattttctttaaatatttttgtcctctmagtaatatatattgcttcatttagatattatactatgattaatttagtcaagaaaggaaaaatcaaaacataaatattgtgccaatcataaaaacatatgtgtaataataacaaaatagacctaatatctgcacataatcagattttaaagagcagttttgtaagtaggaaaaatgtgtgactctatattgccaatgactgaggcctcccagcattcctgtttttgcaaatcatgctgtaagagatcacataattatatgatcctattggatcttcagtagctaagactctgttgaaaagttctgagagttcttatgtcattaccatcaagaaaactttagtaacatcctattctgtaaatcagaaatgggagggattattcctccacttactgctaacacttaaaagtaacagcacaatggataaagtagaaggtgagtgcattgctaggcatggaggaaaggaaggcctcagtgaggcaagaaatatttgtgactccatagaaaatacatcagtgagtcaaactagtcatagagaacctgctacatgtttggcactatagtggtttaaagaactataaattgtttccaccacccaggttattccattttagtctcagaaaccaaagcaatgcatgtgtaacaaatgcagagaaagcccacaacttgtcattgtaatggcagaacaaaaattaaaatataagcactctcagttaggtataaactattcatttgaggtaattatcactgtcactaatcctgtcacagaatcaaagtagaaacaaagaaagatgggtaggtactgcagctggccagcctgatttctaatgataacaatgtaatgatacacaggcatcctactttcatactacttccaaggacaagtaaatgatcacataaaaaaaaaagactttgacagttatcttgcccaaatctttcttcaaccaagttaactctggagtgttaacttatagactagcgtaagagtagtcattaaaaaaattattgaaacactatatgccaggcattctggtgggggcaggcagataataaatggatggtgttttagctaatggatcagtgagagtttggatactgatatacgctatgagtaatttaatagatcaactttaggcttgcttggctagcattaatgaagtcttcttagaagaggtgacactcgaattgaaacatcaatggaaagaaggcagccatccattgaaggagaggaagatcattccaagcagaaggaatagcaaatacaactctcctgggtggaaacaagcctgtttaatgtgagggagagaaagggggccagtgtgactggagtaaatgaagggaaaagttgtaataaggctggagtaaacaggtgtccagttacatatattttcgtagcgcatgctagagtttagattttttactggttgcagtggagataattttgaagattatgggtgaagaaatagtttaatctacactttagaaaaaattactaaggccatagaacagtggagagtgaagatagaaaggttattgcatccatccaggtgagagatgaagaagaactggaccaagctgtagcagtctcatctctagatgacagaagtaactggactcagggcatctatggtgtagagacaacaggaattaccagtgcctttggatatggcatttgagggggaaagtggaattaagacttcagcatattttgcctgagctactaagtgttactgccattagggaggcccctgagatgtcaagaggggtgggatccaggactcaatggaagagatgggctttcaattggctcatggacagttcatctactactataacatgtggaagacagaacacctgtgcaccaatagaaacattaggaaaatggcaggaacatgtggtattttccaattatttatcattgttttttcggtaaagtaagaagcataagctaagagttaattgaggaaaggcagtgatggagatttgaggaaagaaaagttgtaaaataattatcttggaggagaaggagaagtgtggtaagatagtctggaaaagtcaagaggccaattttgacatgtagccatatttaaagtgaggtcaactagcatggtggtatgctttttgcaataatcaactctgtagatgctggcagagagtaagtagatagttgaatttaaccgtgggcattagttttctattgcttttataacatactcagacttagtggcttagggaacacaaattgattaccttgctacaggtcagaagtccaaactggatattactgggctaaattcaagaagtcagcagggctgcattccttctggaggcactaaggaagaatccatttctttgccttttccagcttctggagctcatctcttggctttgttgatcccttgcatcttcaatgccagcaatggctgccatacctctgcttctccctcctctgcctcccatgagattacactgggcccacctggataatgcaggacaatctctccatctcaatgccagctattaccaaccttcattccatctgcaactttaattccccttcgccatataatctgacatattcacacatccagggattagctcgtggcatctttaggtagccattattctgcccagctcaccatggttgaggttttgccaaatgaagagaatggaaaagagtgacagtgtttatragggataattatacagcggaaccatggactccaagccaaggagaaagtgaggttatgagaaggacggcaaggaggaaacacactagtcatgtaaaggagtgatgggtctcaaggaggtcagaaaatttctggagtggagtactggaatcagtgaactggatgaataggacgtgacggttgaggcaggaggtttcaaaataggatttcagagatgtaaagttgttggagatggcaaggttttatgagttttgaaactgaaaaacccaagaaaatgagtaacaagtcattttcctctaaaataagtcaaatacctagcattggccccaaggttatggtaaggttctagggtgcttattttttaatagaatatgcacagtttattgattcctgaaaagtaaacccagcttcacattctgtttctggcccctagacctctatggagaggaagttattccccagcactagttatgtgagaagtagggagtgcagtgcatagagagggagttctgtcacccagggaggcagaggccaaaagacctaggcaggagacccatgctctgtgtgaggaagataggacattctgtttggggactactaaatggcttagaaaatgatatgcaaatgtttccactaaagtgtggtagagttatctgtgatgtctttatggcacctagggaacatttagcatttaatttgctaaggatgttcctattttgaacttaaaactgtttcaagatgtattttgcaatacaaatatgtgccatctcattgcactgttcattgaaagatttctctctagtgtactatgcccagaaagcattgaattagttatgctccattgaaaccagtacaaaatggactgagaagtttatagtttctatgtcagattattaaaataacattttcttccaggcccatgcatatacttttttccaaagcagtaaaaaacgatagtttactaaaaataagaggtcaggtttgcatattctctatactttgggggtgaatatgagttggatatgaaatccaaataaaactagaggatagattaaatggtgcatgatgtattccaaggtcaagaattaattaaatgtaattttcacartgatattcttagaaaataggaaattgccctatgctttttgaagagaatgaaatttggttgtttaattgttagaaaatagtacactatacatattttaaatattttgtcaaactaattgaagccactacattatagaatatgcaaaaacaagttgcagtttttaaaaattcatgtgattaattccatgacacttttaatagcctcacctgtctcatcccacatcatgcccttcatttactctcttatatccactctccccaaacccttctttcaacttttcaattttctaaatatcctataaagcctagctcttccacagaaagtcctttgactgtaagacccaaacactattcatttctgatttcttttggccttgggtttagtaccaccattccaaagcaaatggcctctactggctagttttcacatttaacaatttgaggtttgtaaggacaaaactgaattcttacatggctcttctcatccctacagaaccagcctggtcctgggcacagagtcatgctcaaaagcatgtttcattgattgatttaatggataattaatgcatgtctcaactcaccacccaacctccagcacactctagctgccttttaataaacatctagtatgaaattcattttgtgatggcagtggtgacagtggcagggaaataaaataatgtatagactctaggccacagttacatatttcatcaacaacaacaattttaattactttttgacagattaatttgaagtaggctaagggaaaatcaaaccaattctctaataagccctcatctatcaaaaagtcatcccaagaggtgaatattttgtatgtaaatgtgtgtatatgtaaatggcatcactgtagtccatcgtttctgggtccctgcccttgaggagcttacagtaattctggtttgaagaatgacatggcatgttgagagagaaatcattatattatgtccatttgaccattatataagtccagctaagttgggatttttgtttatgttttctgcagtttctcctaaaaggtaagcaccatgaaggcaaagactatgtctgcactgtcccttgttgtagccttcatagctaacacaatgcttgcatatagtaggcaayaaataaatattaaattaaggcagaattgctatttgacataaagaagactggggagtgagaaagggarggcagtcagtacgctctaagactgcaaaggtagcacacactgtggtaacatggtgtattatctacacctctcatgaacagcagccatggaccaggtcctcccagaaaggagagcgatgagggtccagggatatccattacccaggaagcaagacatggccagagaggaagggaaggagtgctgtgctgcagccagacagctggagctcatgaacaccaagtatctgttaagactggccccggggaagtccagccttggctccagagctactggattttggcaaggaaggtttttaaattcttggtcccactgaacaggcagatggaggtgagcttccccagccaaactgggctcctgagctgtggatctgaaggtagagcccctaggggatttcaccctgaggaagagtcctcaatggtcagcaattttgctcttggtatgaaaaaataatacataaatgcwtatatatatatatacacacacacatatagatacaaacaccttccgcttaaacctttaatcagtgcaagggttgcttctgttaggagagtagtggaagactttcagatacatttttttttttcttgagacagggtttcactttgtcacccaggctggagtgcagtggcacaaacacaggtcactgcagccttgacctcccaggcttaagcagtcctcctggctcagcctcctgagtagcttggactacaagcgcctgccaccacatctggctaacttttgtatttttggtagagatggggttttgccatgttgcccaggctggtctccaactcctgagctcaagccatccaccagcctcagtctcccaaagtgctgagattacaggagtgagccactgtgcttgaccagttacatttttaacagctttattaaggtagacttgacatataataaatggcacatattttaattgtacaatttgataagttttgacatatgtatatacctgtcactacagtcaagataatgaacatatccatcaccctttccccctaaaatgtccttatgcctctttgttatctatttgtgccagttaatgttttattacttctcagctccaaatgcattttttgcctgctccatgaaaatggacctaggtcctttaaatattttccctttggagctgtcagcatgttgagctttgtcggtagagggcgccggagagatattaccagaggaaagggtttcccttctgggttccagtgtgtgcactggacaggctcttctaggggccggcatcaccaggtggccacaagctccctgcaatacgtcctcgggcattttcataggtgagtgcctctgatgagacacgttctatgaacagctcctctggcaccctagaaagtggatttcaagcaacttacaccagtgctgcagccagttcctttgctgtctagttctgtatttcaaccttattgaggcggtggcagaggggcgaggagtgggactttttctcgggtgctctgcctcagcattcaaaagcgtagctgctccttatagctgctattcctgtagagttctctttacccctggttgctccaatcccttgttatagttagtaattctttwtattttctctgttttaattactgtacagattccctctcttgactggacccagactgtatctaccttctcatatatctatatttacatgcacacacgcacacacatctgtttatatctgtatacctatatctgccttcccatgtgaatttccmtatgaattttagaactcctatcaatttctacccaaaaaagcctactggaatattgagtagaattacactgaatctataaattaatataaggagaaatgacagcttggcaatattgtgttttctaacccataaacaagttatactgctccatttatacatgcatctttaatttctctcgataatgctttttaattatcagtgtacaggttttgcatattctttgtmaaatttatttcctaaatacttcacacatttatgttactgcaatgacattgaaattcatattgatcactgctagtatatagaaatacagctgagtttatatgctcaacttgtattctgcaacctcactaacttattctagtagcatttttataaattccatcagtctttctatgtaatcatgtcatctgcaaacaaagacagttttaccactccctatccaatctstcttttctttttcttgcccatcgcactggctggaactttcaaaacaatgttgagtagaagtggtaagaacagacgttgtcttcttcctgattttaggaggaaagcattaagtcttattaagtatgatgttagctgcaggttttttggtgatgatctctatcagatcaaggaaattcccttcaatttctcatttgctgagagttttcatcagaaatggacgttggattttctcagatgcttttttagcatctactaaggtgatcatatggtttttcttttttagtctgttactctgataagttacactatttgattttcaaatgtaaaaccatccttgggataaactccacttgttcatgatgaattattttttaaatgtttttctatttttcttctcaaaaagttagaatataaaacttttgggaaggggaaaaaacagcgaggaaaatatgctgatgccttcttaatctcttactcaattttagtaagtaatttgagctttggggaagaatagaatctatgtttgcttcccattacttctcagtatcatttccaacccaagtctttttgttcagtttctgagatgggcttaatgaatttttttaaatataccatttgttggtcttctaattttagcatcagaaacaaagtctgagatgtgataaaatacataacaatcttatagaacttatatcttacctggtaacttttctccaatagaactaatattcaggtagtttttccttgttaattattttctaggaatagatgattgtatgtgttctcagaaccttgtcttgattttcaacttttatacattgtaccttgcatttcataattaccttgaataagtgatttcagtaatggtataagcttcagctctaaaccagcaaggaagttttttcaaaaggaaagttttaacttcatgttaaatattctcccaacttctagacagtcattttactatagttgccacaaatcaataccttattttcatgtactgcataaaagttgttatagatgtattttttaaagtatggatatgtgcccattatatgtagtttttactctgtactgttatttacagaaaagtacaaatagaatatattgtaagtgggaaaggcagaatttcttttttgtaggtcttttttgttcaattcaaatcaaggaacatttatggaatgctaactctacacagcgttcttttgttaatagtatttcttaatttgttatccttttcctaagtgacagtattttatcattttattcgataggtctattttaacagagagatggctactcttagattagtcatatgatggatgataatgtaatttatttcattcaagtagggatagttcgtgcatttctgggaatctcattatcttgaaaactttgccctattatcttcttcttttcatgaaattacctccttagcttaattacaagtgtagtgttttcccacaggcaatataatatctacttaccctaaataycccaaagtaaagaacacttggagcattaagtaaaaytgatttgttgagcccaaatcgaaaacaacattacagcttactggttaatcaatgtaaatttcactaatgccacaaggagtcaaatccatttgtaaaagaacatgtgtgcaatctatttcataaacttgtatcatatgcaatgttaatttgatctaaggtagttctgtgagacaaaaagaatattaccccaaaatgctctatttaatcattgtataacaagagttatgcccagttatggcaggagatgtgcacagagctatgtagaaacgtttattgacacagaaaacagcagtttataaatttgatcagttagttattatagcaaatttatagtgcacttatcctaaggaaaatctactcattagtgaccacaagaataagaagtccccactttttaccaaatttaattcttgaaaattgtttctaaggtgacaacaatatttctccacaggcagaaaatgttactgtggttacatttcccgatcaaataaatatttggtatcaaataaataaaaaatataatcaatattatatcacagtagcaaagatacaacaaatataaacttcttccttgagataaaatggtaaaattatcctgccaatcatataaaacagcaccgattaactaattacttgctccttaagaggtcaaaaatcccactccctgtacacataattcctaacagtgctactctactgtgtggttacctaaagtagcatactagctgaaacatgctttggctaaaattttactgacatttctttggcttagaatttaggaggatttggagggattatatatcacttttcagcrctcctgaagctgtccatagacatttgagctgctgccttctttttcctaatgtatttttcctctagcaagcaaaagtgttcattcataattattcctttgaccttaaaaccgcctcaaataaggtaggcactggttactcagtggttctattgacagctatgagagtagtttacactttactgggagatcataggaaaaaaaaaatcaccaggtcattagcacaaacttttttttttcctttttctgtggatgtttgaaagtgctcttgtaaaccgcaaagatgactggtatcccagagcacaggtayctgcttcaaaatctgtcaaagttttaagtggatggacaaaggtggtaaaaattgaggtttgggtgttcactgagcctgaactgaggaaaatgatacacaacgctacaaaaaatgagtctcgtgacataacccttaatccatgggtaacttgaaccaaaagtattctccttcttctgtatatttgttctcaacccccaattcctcataactttctaagtaagtagggtgaaaagaaagtcagggctgcctagggaagctacatttgcttctcaaggcttgcacctgcatatttcatgcccgacatgttgctgaacacarccgagtaaagtgccagaataaaatcagctctgtccacgtggtaccaggaatgctgctgaaatgaaggtaagtataggattccacaggatctaagacagtccagggaactgggaccaattgtgggaaacctcaaagctgagcatatttgaagaaaatgcagagtaaaatggctatgggctgccgggaggcctggatttgagataccaagcaccactgatataaacactgatgctcagaaaaagaaatgatgagtgtgtatttgtgtcccttgagacctaatttaatttataattattcaccagagataagaggcaaggtatgtctacttgctggatatctgaatttacacagttctctagtcattagtattttttacaaatataccactcagactaggggtcagaggatctgggtttaattccaagacctgtcacttatctgtcatgatttttgtagcttataaagatctctacagtttaaacattttttttaaaagtctagcactccccctccctggataacagaattgttttaaataccaaaaggaatgaaatacttaagagtgctttgaaaattagaacaataggccgggcacagtggctcacgcctgtaattccagcactttgggaggccgagatgggcggatcacgaggtcaggagatcgagaccatcctggctaacaaggtgaaaccctgtctctactaaaaatacaaaaaaaaaaaaaaaaaattagccaggtgtggtggcaggtgcttgtagtcccagctactcgggaggccgaagcaggaggatggcgtgaacctgggaggtggagcttgcagtgagccgccactgcactccagcctgggagacagacactccgtctcaaaaaaaaaaaaaaaaagaagaagaaaaagaaagaaagaaaattagaacaataaagaatacagttaggcttgaggccaggagtttcagacaggcaacagagtcagaccctgtctctataaaaaaaaaattaatttaaaaaaagaaagagaaagaaaggaatatagtcaatcaacaagaaatgtattgctgactatgttctctgaagtcaactagctgatgttcatgagcttttccatcatgtcttgtaatcatctatacaattatttagttaatattttttcttaaatcaactcatttttccccttttgcacccacattactcttatcataaaacataatattcataaaatcagaggttgatgtgtttatcattttttttaagcttttaagagtcaaggtcttgctctgttgcccaggctggagtgcagtggtgcgataataatctctaattcctgagctcaaacgatcttcctgcctcagcctcccaataatttaatacgtactaaaatgaattcatacttattaaaagtttttaaaagttctgtatatcatgcctcaataaacactgctagggaagaagaaggccttaaaatgcaggcaagtagctgagactgaacagggtaagaaacagaagccataaaagggttgaacaattgttatttgatcctttttcagatagcatcactctcctctttaaaagtacagtattgatttttaacttaaggtgagttagaaatttattttgaaaattctctttttcaaaaaaaaattctttacagtcactaaagtcatctggaagtgtagaatctgaagaaaaatttttatttgaggtttaaaattttatcttggtctggaaacttctgttttgtcaaaggaaggggtgatattggcacattctggagttcagaatttttctgtaatgcgtgcttaaaaagccagattttaaactttttacacagccctacctgtggctcagcatgttagcattatgatgtattttaaggatggagtttgaactaagattatagtgtgtgatttttggcataggcaaacaatccaataaactgagcgttcaaaaaaggaaaacaaagaccatgtaaatctcttcaagccagaatgtctacctcttgcttccttgggtagagctactgtggtccaagtttattacctttaagttatccctgtctgtaccctcctcaatcatggcacaattctccctgggcatctaaggcattggggacccatcatggtaatgttcaaaaggtctagaacaccagtcctcctgctccagatgggggaaagtagacaaacaacagtgagctcctccagatccacaaatcagctcccatttcagtgccgaatgacagagattccggaaccagcttacgttctgggaatggcaaagacctcaggtagaaagaactatgtgcaaccatttccaagccaggagtgcagtaacatattgaatggttaggcagtagaggcaactctgcagttaatacacattctttaaacttttattttaggttcatgagtacatgtacaggtttgtaatataggtaaattgtgtgtcacagaggtttggtatacagatttcaccacccagataactaagtatagtacctgataggtagtttttagatcctcacccttctcccatccttcaccctcaagtaggccccagtgtctcttgttctcatctttgtgtccaagtgcactcaatgtttagctactacttataagtgagaacatgtggtatttggttttctgttcctgagttggtttgcttaggataatgacctccatgtccatccatgttgccacaaaggacatgatctcattattttttatagctgcatagcattccatggtgtacatgtaccacattttctttacccagtctaccgttgatgggaatttaggttgattccatgcctttactattgtgaatactgctgtgatgaacacacgtgtgcatgtgtctttatggcagaataatttctattcctttggatatgtacccaataatgggattgctgggtcaaatgataattctgttttaagttgtttgagaaattgccaaactactttccacaatggcagaactgatttacattcccatcagcagtatataagcactcccttttctctgcagcctcactagcatcatacacagttttctttattgaaaatatttttggagcttttgatatacccacaggcactgtaaatcaacaaaaggggcactctgtcctcaattacatcattcttcaaaattttttaaccacgtggtgcttttttaggagcatgtgaggagaataacatcccaggagagtcctactctaaaaagatactgctgtttgggacaatatagatataaygcaatatcatataggaagttgtctttttgtatatttttaaaacatgttacttttgtgctttggagttgccctaaataaatatgttgtaaacctttgtgagtatctgcttattcggcttaataacccttttgtggcttttgaataatgtaagaatttgattcattatttagaaatctgagttgctgcagcaatgaaccagatattacatttaatcgagactkycaatactgcacagattgccagcctcacaggacatcagacctaactgaactttcctgctagttttagaaaaaaagacagaaaaataattcacttccaaaagttagagaaaacactttgccaattactagtgacccttgatgtgacttttaatttatagaaaggcccagattaattgttttcaaaccaaaagctatgactcttagctagcactttaattttacacaaatcttctcctccatcttgactgtgagatcgtacctatagagtgataagccttctaatgatgcctggcatagtgtcagcttttgaagccatatactgtgtatgttttggaactaaatatttcttctttccattgactcttgacccccttagaacaactgtcaccttcttcaaatgctttcactaagtaaaaagtcaattggctgtaagtggtgatgaagaaaatgtcgtgtgattaatgctacagtttaggctgttgtgattagtcacaggaaaaacagttaaacttcctcccccaagaaacatggtatgttaacrgcaaatggcctgcctcaagcccaataggaagaaatagttgggcagtgttaaaagctgcctattgatttgtgccccgactgaaagccatgtgctgatgtaaatgaaaatgtgtcaagagttgatatcgattttttttttaaatcagaccatctctggggaaatactgctagccatactactgctcgtctatgagtgaaataaggttcctttccacaagactacacatgtccagacatcaaatttttctctttaaccgaggtgtggtaggatgcctctctatcgtctgcaatctctgcgtggagaacgtgacccagagactataaagattgtcttgatgaaagacatgtatgtggggaagggtgtgagctcatgccacctatctacacattggtctgtttgtgtatggttcgtaacacacatgtaggcttcagctaggaattgtcatcctatgtctcctagaataaatcattgtagaagaataaatttatttttagaaaattctatccagagagaaccacaatataggataaaaggtaaaacatattagaatatgaaccatgaagttggggtctttcttttccttcagactgtaggaaaactagccacatttttttccatttcttaggagttattccctgagctgtaccttattcatagactgcagtgcttgtaaatattgactaactatatatgaaaaggccaagagtcataataatcatgcagctttgggtcatatctgtggggatttcagctgcctaggtaaggctgcactcctgattcagctgggataaagcatggacgctaatattaggctattagaatggaaaattagtgtggaagaggagaggggtcatcacctagcaatatatgtggattatttggaatcaactactgggattagagaaaatcctaataaactaataagggatatggtctttccctccatgctagcttagagagctgaatccacttagtttgatttattggccttaggtacagacacatgatgaaaacttcactttgcaaattgattaactttttgttgattactcaatgacttttgcagtactctaaattttatgatctgtgtgccttgtgctccagattaaaggaaaaacaatgatctgaaatagaccttagggaataggaattactatgatgagacaattttatactgaaagttctgcattaaaatttaggaatctgtaacaaaaactttcagaagacagtttgttactagtaactgggaagacaaatgaggtcttacaaatgatctaagtagatggaacttttcaattagggctgctgccttaaaatccttaaaattaacttgtacttyttaaaacaggtgtagcttgctggccctgtaatttgactaacaagctaaggcttatggctgaccctctagtgtattcctaaggtggctattttctgcagcatggaagagcagccctttctgcaacatggaagacyagcgctgactcagagatctttgcctatctatcaggagttctagaccagctcttgactgctccacctcacatcatttcttgtattgttatttaacttygggtatatatttattatctccaacaggacattaaactcaataaaaacatgcattatagttcattgtgttggcaccagtgcataaattcataactgctcaaggaaaaaatacacaaatatatgtacatacatgtacacatatatgtgtgtatgtacatatttttaatgcaagatgagctagccttcctatgacattaaattatttaatcactttttacactgaaatcaaaaaaatacacaccaatggctttacacagttatttattctaagatgaatgcaaattacctcagaagatattatccagaataacaataaatgtttattctttcttcttacggtttatatagctgcttaatatgcccattcatcaagtatttcctagttgtctttcacgctcaagcatataaatatataatttcaaatatataatcattttcaaatatatawtttaatattatatattaaaatatatatttgatagtgataaatatatacatatcatacatatatatgtacttgaggaaaaataatttgagagtggccataaagtctgaaaatatagacaatattaatttatcatctatatttaatataatattaatacattatttgttatatgttttgtttccaggtttggtgaccactcagtgtttgcaaatatattgtaaaggtatatacatttaacaaattaactgatcttctgattttaacttcagttaccargttgaaggtttttctttacttgctttttttgttttaaataaaagaaagcaaatgattttaggaagagaattgtcacagccaaaaacttccaggttaagcaaaagatcataataactttatcttaccaactaccttgaatgttctaaastatgttcttcactcgcttagtaaaacgtctgaattagaaagcttatattaccatttaattcccagcctttcctttctggggccaccctcacttttccaagtactatactagtgaaagaagtagagaagtaaatgtctgtacatgagtcatgcatttgtcttttgattgtagagaagaaaaagaaaatacatatmtacacatataaacctaaaaataagaatgaattatttgccagcccacaaaatttttcactactccatttttgtcctttaggggtagagttagttaaaaatctgttttttaaattttggtttggaattaataggctgagatgggaaaccagaaaataatgagaatatatactatactttgattttttttaaaaaaggaaagaataaggaagtagagctcaggaaaattaccttccttttctcattccctaaatcttctatccccaaaataattttgattacttcaattcaaagtgctcatattttccagagcacaaaatagactccaaatatagttctatacagaattttatatatttatgccacaacatttgacaatcatagaaaaatataagaaatatgcaacacggaattcttataattggaacatatttgaaagcatggaaacaaacataaattacaatatacaatataaaggatgctaaatacccaatatttccttccctggtaataatgcttttgttttaatatgttttaatgttcctaggaaaagttgttaaacaagttttgcattttgcatatcttagaacagtaaatgaaatataccctaataagttaccttttttcataagtatatccacataggaccaagccttttaatgaattcctttaactggtaatatattagtatttacaatttaaaagctttattctgtatattctgttgaataaggttaaacaacctaatatccaattatatatatgtatagagatacatatttcatatctataaataattatctattaattgatggaataattcaggtggcaaaaattttaaacattttgttttgtattactcaggaagaaaagtaatcaggaaactagaggaagctctttttttcccctttttattacaccaaagaaattgagtgcaatgaagcacattattcctttctttatcaggtgcatatttacatttgcatttctaaattatttaccataaatacatttttaacactagaaaaccttaaaataataaagttccatttttcaggctttgtacaaacatgcaaatgttaatatgactaaggaatatactttaaattacagagcatttttattcattattctattacccctgctgtgatagtcaggcctcccacctatggaatattagagwgccccctagtggcacttatatgcctattaaatttccaaacgaagaataaagttagttactttccttactaactgctaggaccagttttgatacctaaacatatttggttgacttttttccccaatttttaaacccaagttgacttccctttatgtaccacacaaattgtgcacgtttatggcatcaaaaatgtaataataacatcatctctggttattcaaatgctcagttgctaaacatctctcttcattttttctcacctggtaacctttccagtcatctcagaaatcatttggagattcactgtgaaaaacatttttatggggaaaaaaagtcctacgttaactggtaaaagcgtacacttacccaaatagatgttattttaatgttattgcagtaaagaggcatgtcttcattatactttcatgtagccggatgaaaagatatacaaaatgatacctaagatgcattatcactgaggcagccatctaacatgtttggaactttttaacattacactagtttatggtcaagatttgatgacgggctcaagggtgatgttcccttggactagtgaacaatttgcagtatttttgatgctttttccactggatacccacaaagcctctgcccttgcctaaaattatccttcttaataggtgagtgaacgcttcctgaaggtttaaaatacatccatggaatcttaamaggtaaggtgaaggtagtcttacaaatgctggaaaagaatgttctgcacagtgaaaataacttcaacaggaatatggagatgaaactagcatgaatatgccccaggaactatactgtaaatgattagtatcattgaaatacagagtgagaggtaggagcataggacaggagacgtatccagagatgtaacagggaccaactacactatggaaggctttggggactacagtaagggttttaatttatcctaaatactagtagaaaatattgtwagataaaccaggtttctgctttaggaaatcagtctgggaatagacgtgaggataaattagagggggaataagattccaagtcagagtgaacatttggtccaagcaggaaatgatgagagctggtagagaaagttgtcaaaagtgcctctacagtaaagtgaggtcatttttgggctactgatgccctggacaacagtagaattaactggagtctcagcaaaggccttagcaccaccctgcttcagttaaatcgcctatcagtgttgtcttctttggttatttgccccttatccttggtaattctgctgcctccctccctctcccatattcatgtgagcatcttgtagccatcagccctgaagaaaggcatgggttgtgtagtttgaacttcactagtttgacgggtatgaagcaaagaaaagaataactggttgaaaggtaggattttggaacatgcagagtggttagatgctagatgttgggcataagggacaggaagaaggccagaatggctccagggtctytgtcattgcaactgggaagatggaagcactaatcactgtttatacagccaatgaaagaggagggccaaaagtgaagtgtatttgctttctatgctgtgttacaaattctcacgaagttagcagcttaaaacaacatgcatttattacctcatcaatcctatggggcatgagtttgggcatggcttagctgagttccctgcttcagagtctcacaagactgccatcaaggtgtcacctacggcttggttctcatctggagactaaactaagggaaggagatgtgcttccctgcatgtggttgttgacagcattcagtttctagcagctgaaggttcatgacagcttcctccttcaaagccagcaacagagatagagagtccacagtaagcctactagaaggaccatcttatgtcatgtataaaaatcacaacggtgacattgcatcacctttgctatgtgggctagacacaagtcacaggttctgcccatactcacggggaggagattmtacaaaagcatgaatatcagggaccagggatcatgacagccaccctgtctatcataggagtacttttataatgtttacaaaatgtgaaattactgagtgtttttacctccaactattgctgtaaggaaattatattataccataacttggatcgttattatataggcttaggattattagaataaatgtcccaagaatagctaccatataggaggaaaaaaaggaataactccattctttctgatctttaccccccattcagaagggttcctacatttctaacaggaatttgttcttcagtgtctcacatacctctgagaaatctcagtttatggtttggaaactatcaaagagcaaactccaagaatacctaaaactaaataacactataacattggattgttgctggttgctttcctatccactgtgaagtttgacttgttgtaaatatttagggaagtatcaaaactaactttaaattatttccttgtgcacctcttcttgaactcccccaaataagtcaagattttttaaaaactagggcagtcctaaaatggcatatattatatccrgtcgtcttctaagtcctaacaactytttctttaaaatattaatactggctctacctcatccccttttttctatttacacaacttctcaacactggtgcaagctgttactgtcttatgtctggataaatcagcatcaccatcctatttggtayccttactctacttttcccttccctcttctgtcagagctattcaagattgaatttttattatatataaacagctttgaacatgcagtttcttttttcagtcctgcatgctggtgctctatttgctatactaccatctacatgcccatgtctgcttttttagaaggtctattatctaatgtacctgcctattcaattatattcccattcttaacacaaatcatattttctcttccaaataatttcctcttggcctctatacaaagcaggcttgttttcgttttttttgtctgctcagattttasttccagcttgggttgtccatgcatctgtcatcatgtctgccctaagtcatgatgaatagatactgcacaatggggagcccaggtaaagagtaagaggaaaccagatgtatagaaaagaaaaggagaaagatgagatgaacccataacagaactcagaaggcaaagcccatggcagagccagaaggttggaagaaggtaggcgaaatgaacagtaatatcatcagattctagaagtcaaaaccaatccaagcctggtaggtaagccaggacaaatgtaaatatcaagggtggagacaagcaaagaggggcagacagaaaacatccagacacacacacacacacacacacacacacacacacacaaacaaacaaacaaaaaagatacaaggtcattctcaggccttatagggatgaatgagcaaagagaacaggcaggtgcatattcatcaggagcagcttgattagagaggccacattcatcctgaaagccaggttctttaacaacccagtgtacttcctgttcaggcagactggtgcatgtggaggattacggtctttgaagccagtcagacatgggttcaaattcctcttccaccatttgttaactgtgtggccttggacttgttattgaacttccacaatcctgacttcactaatctgtaacatgtggatcattctaccagtctcatggrgttataagaattaaatgtgattacatatactatatgaaatgcctgacatcggccaggtgcagtgactcacacctataatcccagcactttgagaggccaaggtgggtggatcacctgaggtcaggagttcgagaccagcctggccaacatggtgaaaccccatctctactgaaaatacaaaattagcagggtatagtggtatgtgcctgtaatcctactacttgggaggctgaggcagttgaatcgcttgaaccccaggaggcagaggttgcagtaagccgagatcgcaccattgcactccagcctgggcaaaaagagtgaaactccttctcaaaaaaaaaaaaacaaaataaataaataaataaataaataagcctgacatctggcaagtatacaacatatatgttgatttttatcattttatttttatttctatttttctgtctgccaaaaccaaaatggctgccaacttgtagctatccttttataaggtctgcatgactttctctaacctcttgtgatccataaaacctgcctcatacattgtgccacttaccacagagtgttctttaggtgtgctaagtttcaggttattcaagctaatttcttcaatgatattaaaagctccttggggagagatttcccagtgctgagctcatcatattcagcctacacttgagattacaatgcatttcaaggccccgcttcattcacccattcagcagctatgtattcaacaccatgtgtgatgtactggggatgagacaacaaagaagacaagctcagcttcctagaggtaggcatgggttatgtcactaaagtaagggcactgtcatcttaaaaatggaaggaccctaagagattatctagcccagctctttacttttacaaagatgcaactgagaatcacagaaatgacagtggcatataatttcttctccactgacctctttttggcctgttgaatcactgtcatttggaaaaacgaagagataaaagtctaggatgttttaactgagtgagagtttgagagtggttttgccttctgccatgtcactgtaaaagaggccacttatctcagacagcattgccagcaaatgtccatggcatagcctcctgcaagtctctaccagaaaacataagagttctctgtggctgctatgctctgacctctttgcttgttccccagtgtgagaaaaataaaaaaatcatcataggaagaaacacaggtaattcaggaaacatgcaaagatactttcgctttctttgttgggaaaggccaaaacatggtggcttcttccagcaatcattccagaccactgcttagtacatttttttttttgagatggagtctcgctctgtcacccaggctgggtgcagtggcgcaatctcggctcacagcaagctctgcctcccgggttcatgccattctcctgcctcagcctccggagtagctgggactacaggtgcccaccassatgcccagctaattttctgtattttttttttttagtagagatggggtttcaccatgttagccaggatggtctcgctctcctgacctggtgatcygcccgcctcggcttcccaaagtgctgggattacaggcatgagccactgcacccagccactgcttagtacatttaaaatgacacatctaagcatttgtatgtagggatgcatttgaatcaataatatgagactggcatctgaagactcagtggctttaatcaaactgtttgctcaacatccttcaatacttgatccacaaacttatttcaaaattagaatgtcaaggtgaagattaacacctccagttcagtggggctaatgagacatgacttattaatcctacaagaaaatcttaattaggcactggggcactgcttgtttcattgttaaatactacccaatccccaaagaattggaaaataaatagggactaaaatagaaaggagtgttataattaggccccctgaaatgaaagaaatagtttttttctccccacagaaagtatttgtcacttttttccctaaattacccagtattagcatttgtaataaaagtttgatacaaacattcttgaaatagctagacatgtgaacaccagagaacagtgagagtctgatgcaccagaactctgctaagagggcaattgtactgctgagtttcagctgcagcaaaattcacgtcaccgtccaggttaattagcaagataacttcattattatttacttcttgttcatttaataggctcttccattaagatacactcatttttaacactaaggatttcgtgatgcaagttgaaaaggaattgcttcactttatttcgttggcatttttttscaaactatccatagtacccaaaaaggaaatgggagaagggagggctgcagcacaagggaatagcagacatttacccaagcttcctaaaactgaaaagctggaacatagcatacccatagtaacactcatgaccaacaagttttccataacatttggtgttctaaaatttgttttcatcagtggattaaagataagtgcagaaaagaagaaagaaggacagagaagagggaggagggaggagggggtagggaaagtgggagagaatctttgtgacattcatttactacttcagaataagtcaccttgttaagttacagccagaaaaaaatatcactggcattcgagacacaatttgttacaaagtatactaataarccagattgccaaattatgtcagtcacatctaaataacaacaagcaaattgccttacacagacggagaatgtgtaaggtgcatagatttcctgtgaggcaacctcaactaagacttattgattaatgttatcctacttgtttattctgtttaaaagcacggactgcattattttcgccttccattaaagcctaagccccacatttcaaaatcttcaagctttaaataaagtttccttatctttggcagagggttcatggccacatgtacagggttctcaaagaaatgtcagtgactacctccccaacgccagagcttcagaaatgcaagagtacccccaactaaagttttgggaagccagtttaacaattattccgattattgttatattagataaagctattaaaagaaacgttttctttccatgtgtactaaaccatcaaaattgtgtttgaagagaataaagaataagaaattatctggggagactgagatcatgagattgcccaacggcttctccgttcagtggccacaaattataccccttgcctcagcataatgaatctgtgctcttatccaatacaattaataatgagaagcaatcagagaagcaatcataatatttgaaaataatatagaagacacatacagctccaacatttcttagctatgtgacgtttgatcagtttaagttaacttctttgagtctttggctccacatttcaaagtggaagcgctaataaaaactaataagtttgctttgaaaatttgatgatayagaatacataagacaggtgctctgtaaaatatcaagcaacaaataaatgtatgaaagggaccaggacacgaaaggataggggatcaatgaaaatccatcactgataattaggaaaattattgaaaacwcatatatactcttttctgcacagaaaaatgccagcaagatcagcactgaccaacttggagagggtmattcaaaaaggaaggaaaggtgtaattaactattgtgaatccacatatgcctagatgccattgccagaaaaactgttaaatggctaatttaatggttggctgaaattctgttttaaatatagctccccattgcttcccaactgtccttcccctctctacatggtagaatgaaaatactactattctgagaatcaggggctatgtagcctagtttgagttcaccagatgtgtttactttgcactgatcatttattcattcattcattcagccaatgtttactgacctcttaagtatcaggtcctgtacttaccacaggagacagagcagtatacttctcacgtgccttcctatctagcaggggtctcttaacttctccagcctcagctccttcatctgtaagaagagggaaatgagcgcagtgctctctgcagtatcttccagccctaatgttcttagtgttgattctctctgaagatttttgttctttatccttctctaaggacctacaaaatcttgctgagtctttccctattcattaaattatgaaatgttgagtctgtatatatatttacatacatgaatatgtatatatatacacacatatctgtatatagcctataacctattttctaaatagaattcttcccttcaatttatgtattgcacatttttgagagttattgagggaagtcactgtgctatttgtgaaggcatatgcagataggtgtatcaaatagtccctatcttctaagtacttataacgtaatagatgagacaagataaatatacaataaatacacatcagaatccttcctttagaagaaatccctttccattagtgggatcagaggaggtttcttccagtcagtgaagctaaagtgagcttggaggagaggataagatattgataagaaaaattaaaaaaaaaaaaaaagagaagatcatccaggaaatagtataggcagaagaaaagaataagaaagcacagaatctctgaaaaaatactggccatggtggacatttcatatgtgggatgtgagagttgagacaagtagaggagattacagccagatgtgaattacagcacaaaattcaggtgctgggattttatgctgtaggctagcacatcccagtagagtataatacaagccacaaatgcaaaccacgtakgtaatttacaattttagaggcctcattagaaaaagtaaaaagaaacgggaaattaatttcagtgataaattttctttacccaatataggcatcacaacataaaatcaatatatttgacattctttttttcatactatgtctttgaaatccagtggacatttaacacttttggtacatctcaagctgtgctcatggctagggrctagtgactaccatattagaccatgcagttctaggctatggaaagttattacggggttttagagggagagttgtttagtaaaagcaacttttaggcagctgaatgaggcttttgtatgtagatgtgtatcagattgtaaggatgttatagcacaggacagagagatgaacctgttgaaatcatctggttttgaagcrtggtggtcgactcacaggttatgaaaacttgggagaaacattgaggctacacaatccaattaaagagaaagtagtgagcaatatgctgactcatacatttaaaaaaatagaactattcttttgcatagaactcttttttgcacctgattattttgtttatctcactgggcctgagccacattaggttcactcaattccacaaacaaggatcaaacatctaataatgaactgcaccaggctttggggattcatagacgtacaggccattgttcttaatgtcagtaacttaatgtcatggcaattacacaacagagggcaaaagctattttgaagcctttggaaacacaaaataggaactatccaattctgcctggaaaaatcaagaaatggggcaagtgacacctgagctgaatattgaatgataactacaatttctacaggtggaaatggaagaacgggcatcatgcagggaaggaagaacaatgctggaaatttggaaagtacctggcatgtctgggcaacaataaatatcttccaaatttagggtctgtgtggacatttatcagaaatgaagccagaaaggcaattaagggtgaattggaggaagagggaggtcaacatgtagctaaatgcaaagtggctccactttgccgcagagacctagagcctcatcaaggaaagagggcacttccagagcccacaggtgagcactgaagaacatggctttaacctgagaaaagacagagaggagtcagcttctgtgagagttatgtgaagacaatagtttacagattacaacccagaacactgacttggtgtcagatataatgatctgccttttcaccgaaaagtatttgacatttcactaaattgacctttgcttgccaatagcaaactcaattgcattatcttctctgttcaaagtttaatagtatagtcataggcacaatgtatctcttgaaggtgagcttttgttgtttggcattctgtgttccccgaacaaaaagcttcaagaaaaaatcactagttttgttttttcttaaagctacaggtgatagrgaaatatgcctgcattagttttctattgctgcataacaaatgcccaccaccatggaaacttaacatccatttattagcagatagttctttaggtcagaaatccaggtaggctcaactggattctctgctgagcatctcacaaggctgaaatcaagctgtcaggtggattgtgctctcgtctggagatgactctcgggaagaatctgcttccaagttcattcttgtggttggcagaatccaattccttgtggttgtaggaatgaggtcccggttttcttgctggctattgactaggggtcacagctcctagaggctgctttccaaatccttgcatcttcaaactagcaacactatgttaatccttctcttgcttggaatctaatcactccttctgctacttgctagagaaaatactctgctgttaaagggcttatctgattaaattagacccacctgagtgatctccctatcttaagttcagctgattagtaacattaattacaatctgcaaaatcttttgccttgtaaatgtactgcaataatagtagtaacaccaagacaaaggttatgggagccatgtacaattccacactgcctttaatagcatgtcagagtaactttcaaatagaaccgttttttttcctgtaaactgaaagaagcatttgttgctaaaaatgaaacaaaaacaaaataaaatctttgaatgtccataaaagaacagatatagaagtttttcctctaagtggctgattaaatgggggggggggcaatgaatttatatgaatttaagagaaaatgaataaaataaaagcaatttttatttctgatagtatggtagaataggtaccctatatcatttatatcaccctcactgttgaaataactaaaatatatgatgaaatatttaaaatatatgtctaaatctataaatataaaactatatctatgaggctgctggaaagtaaggagtgaacagatccctaacataaaataaaatcagaacacccaattggtaagcaagttatcaagtggctattgctgtgagaatttttgctaaaccctagaattctttggcttccattctgatggttttgtgggaccagctgtgagatacagcctaggtcttggtcagtgcagggaatctaacaggaggcattcataaaaacagtattctagagagctatactgccaatgtaagaatgaatttgcaatgaactctgatatttcacaagcaaattgattttggcatagtgtgagagaatggaattctctgaggattcataatcccaaattggtctttgcttgagtttgggttctgattcatcctgcatgtgtggtccataaaacctcaagcatgatcccagacgaccatgtccttaggtgactagtagaaaaaaatgtataacttcttcgaaagaactcaacttcagcccaggattcaagataccacaaataaagtttcttataaaatgaacagtcaagagtgaagtatcacaaaacagtaaaagaagtaaggcactgtgagtaaaatgacagaccacaaaatcctcatataatagaatttttgacatggaatataaaacagttatgtttaaagaaattttctcactttgggaggcggaggcaggcaaatcacgaggtcaggagattgaggccatcctggccaacatggtgaaaccctgtctctactaaaatacaaaaaattwgccaggggtggtggtgcgcacctgtagtcccagctacttaggaggttgaggcaggggaatcgcttgaacccgggaggcagaggttgcagtgagccgagatcacaccactgaactccagcctggcagcagagggagactccgtctcaaaaaaaaaaaaaaaaagaaaagaaaagaaaaaagaaattttctaagagtttgaaaatatgcttaagtttgctgctgccactggagccactccaattgctggcctcttcacgcctggaaccttcactaaccaaatccaggcagccttccaggagccacggcttcttgtggttactgaccccagggctgaccatcagcctctcattaaggcakcttatgttaacctacctagcattgctctgtaacaattctcctctgcactatgtggactttgccatcccgtgcaacaacgagggagctcactcagcgggtgtgatgcggtggacgccggctcgggaagttctgcgcatgcgtggcaccatttcccgtgaayacccgcgggaggtcatgcctgatctctacttctacagagatcctgaagagactgaaaaagaagagcaggctgctgctgaaaatgctgtgaccgaggaggaatttcagggtgaatggactgattcagctcctgagttcactgctactcagcctgagattgcagactggtctgaaggtgtgcaggtgccctctgtgactattcagcagttccctactgaatattggagtgctcagcctgccacggaagactggtctgcagctcccattgctcaggccactgaatggataggagcaaccacttaatggtcttaagctgttcttgcatgtgttcttaagcaacatggcaataaggttgatgggaaataaacatcagtttctaaaaaaaaaaaaaaaagaaaagaaaatatgatcagggaacctgagaccataaaaaaagaccaagtgtttgtacaatataagattctgcaaagtaatatataataattaaaaattaaaatgaaatggataataccattcaacatattagatgtaatgaagatagtgaactggcagatcaatcctaagaaacaaactagaatgcagtccagagagatgaaaatatagaaaacatgaaacataggttattacagaggctagtgtaagaaggtttagcatacatctaatcagagtttcaggcggagataatagagataatggagmagaggaatactcaatggggtgacaagaatttccccaaatttttaaaagatccagtcttagaaatgggaaacctagtggatcccaaacaagataaatgaaaagatttctacacgaagacatattaaagaaaagctatagaacaccaaagtaaaagagaagatcttaaaagtggaaaaagtgaaaagagagattgctttcaaagtatgaatagttagcctgattataaactgcctgtttgagatgtaaatcttctaccacccagaactgtctccttaatgacctggagctgtctctttgacctcaaaggaggtagtgtgagttccaccgatccccaacccccactcccccactcccatcccgtctcctgtcttcttacctccctcttgttcttttgcctcccaggctccttgggagggtaagggaagaattttgttaggtgccttacctaatttgtaaaactgcctcctgtcctggaggtacgaagtttgtttcttctccatataagtgccaattaataaaccagatggcctgattacattgaccaagccccttcttgtttttgtaattttccatttccctcactctgttggacctgccactggtttctccttccctgtttcatcagtctctctttaaaccaccatcacctctacacagttggagtcgagctcagttttatacttgttataaataaagtttccgtgctgcaaaagaaatagcacttgaatgtaaaattttctttttaattctcagcaaggcaatgtacttctatagaagggtgtgcccttacagatggagcaatggtgagtgcacccttggacaagggaggggaaggggttcttatccctgacacatgtggcccctgctgctgtgttkttcccctgttggctagggttagaccacacaggctaaactaattccagttggctaatttaaagagaatgacggggtgagtaaggtttggcaggaaaaatrgttatgacagagcaggtaattggaatgagtcagggtggagcaggtaatcgaaaaaggttgctttccgaggaagttaagtttaaaagtagaaggcaaagaattgaacatactgacatattgattatttgaagagaaatttagaactcatagctaacatactgaagtctctctctactactgcagtagtattactgaatagaagctgtctttatcacctttaactagtgtctagctttgtttttctttaacaccgctcaataaatgcgaactttattctgatatctcaatacatttccctggtccccgtgaaggtgttttgcctcctggatgctgactcttctttacaagtttgtgtcttatatattttggaggcaattactaacctaagaggtctttactgaacactaaatgacttaaaatccagttaagaaaaagaaagtcagattaattttttgaggagaaaattttagtaacttaactcttttaaaaccagcttcaactcaccgctagtctcaacagctgatcattaggatgatatttcaagaattagttcatcctaatgaagaaaacagctcaaagaaagaagtcctacatatttttgcctttgggaatgagaagaaattaaggaaaatatttctgcatttggtttgaaacgtcacaatttttgtttgctgaatggaaggaaattctacttctggcagaaggaaaatgaaagagctgagatgcaagaaggaatagtgcgacagaaattagattagtggttgccaagggctgggagggaaaaatggagaaatggggtagactgctaaagggtacagtgtttttttgggggatgatgaaaacgtaaatgtaaagttaattatggtgatgattgcacaatactgtgaatatattaaaatgtaggtacacttttaaataggkgagttgcatgtgaattatatctcaataaagctgagaccaataaaaaaggaatagtgagcgatggtattgataaatgtggataaatctaaaacaaatattatctaaaacagcaataaaaataatgtcccatatagggagatttggagaatcagtctataatgaaatttctgactaaaaaatgtacctattagtgtggaggagatattggaactggtgtactaattctactgttgtcattctcagaaattattcaagcaactagtttatctcctcttttgctagccttgatgaatctactataatccttctcatcccagcatgatattttatgagaggaaccgttgctccatccagagagagtaagactattaacaactgtaagtttcaaattatttgacacctctttcatttcttctaagttctgtacttttacaaaaattacttcagctctcttttaaaatttgtgcgtaccttgttttactgtgcctcactttattctgcttcacagatactgctttttttttttaattaaagatgtgttgcaaccctgcattgagcaagtctgccagcagcatttctccaaaggcatgtgctcatttcgtgtctctgtgccacatttgggtaattccctcagtattttaaactttttcattattatatctgttgtggtgatctgtgatcagtgatctttgatgttactactgtaattgtttcgggcaccataaactacacccacataagacagcagacttgatcaataagtgtgtgtgctgtctgctccaccaaccagctgttcttgtctttcttcctctcctcaggcctccctattccctgagacacaacaatattgcaagcagaccagttaatagtcctacaatggcctctaagtgttcaagatagagtcacacatctctcattttattttttattacttttgttgtaatttcaacttttattttagattcagggggtacatgtgcaagtttgttacctgggtacattgtaccctgaggtctagggtacaaatggtaccatcacccaggtactgaccataatacccaatagttagtttttcaatccttgccccttctctccctcctacctctagtagtctgcagtgtctattgttcctatgtttttgtccatgggtgctcaatgtttagctcccacttataagtgagacatgcggtatttggttttctattcctgcattaagtcagttaggataatggcctccagctgcacccaaattgctgcaaagaacatggtttcattttttatggctgcatactattccatagtgtatatgcaccacattttctttatccagtccaccactgatgggcacctaggttgattccatgtctttgctattgtgaatagtgctgcaataaacatgtgagtacacatttcttttggtagaacaatttaatttcttttggatatgtactcagtaatgggattgctgggtcaaatggtagttctgttttatgttctgtgatgtctctcactttaaataaaaagcgttttaaacatatgtgtaaatatcacatctgttcacagcatcgtttattgaatgtgtttaagcttactgttgagacctactgtttatttaaaaaggctcctttcaaaagattactgttcactgacagtaatcttgggtgayctaatcacccaagagtcctgatggagatgtacaaggagattaatgttgctttcatgccttctattacaatatccattctacagtacatggatcaaggagtaatttcaactttcaagtcttattatttaagaagtacattgcaggccgagcgtggtggctcacgcctataatcccagcactttggaaggctggggcgggcggatcacctaaggtcggaagttcaagaccagcctgaccaacatggagaaaccctatctctactaaaaaaaaacaaaattagccaggcatggtggcacatgcctgtaatcccaggaatttgggaggctaaggcaggagaatcgcttgaacccaggaggtaggtggaggttgcggtgagctgagatcgcaccattgcactccagcctgggcaacaagagccaaaactccgtctcaaaaaagaaaagaaaagaaaagaaatatatttcataaggctatagctcccattgtgattcctctcatagatctgagcaaagcaaattgaacaccttctggaaaagattcaccattctagctgctattaagaacttctgtgattcatgaaaggtgttcaaattattgaccttaacagatgtttggcagatatggatatcaaccctcatgaatgactttgggaacttcaagacttcagtggaggaagtaactgcagacatggtagaaatagcaagagaattagtggaatctgaagatgtgactgaattgctgcaatctcatgatcaaacttgaaaggatgaggagttgcttcttatggctgagcaaagaaaatggtttcttgaaatggaatttactcctggtgaggatgctgtgaacattgttgagatgacaacagtgggtttagaatattacataaacttcattgataaagtagagacacattttgagagsacacactccaattttgaaataaattctactgtggttaaaatgctgtcaaacaatattgcatcccacygaaaactctttcataaaaagaagagtcaatcaatgtggcaaatcactgttgtcttaatttaagaaattgccacagctaccccaattttgatcaaccaccaccctggttagcagccatcaacatcgaagcaagaccctccatcaacaaaaagattacaactcaccgaaggcccagctgatcattagcatttttttagcaatacaatattttaaaattaaggcacgtacattgttttttaaaacataatgctattacacacttaatagactacaatatagtgtaaacataacttttatatgcttgggaaaccaaatgatctgtgtgactcactttactgcaattttcgctttattgaagtgctctgaaaccaaatccacgacatctccaaggtgtgcctatactactcaaggattagatttgcactaatgaatgcatatccagtcctagaaccaaataatgacaaatcttcatagaaaggggatgaatttacccagcacaaacactgaaggtcaatacagctagactgtattttgaactctgctagttataggtgctaggtagactggggcaccacactttaatgaggtcttggcttcctcatctatagaatggagaataaaatatcttgtgtctcttatatttttgttgtgaaagtccaataaaatgtttaaacttgtgctttaaaaactgaaaaagcactatacaaatggatagtattttgaaaactgtgtgtttgccgggcatggtggctcacgcctgtaatcccagcactttgggaggccaaggggaggtcaggagttcgagaccagcctggccaacatggtgaaaacccgtctctactaaaaaaaataccaaaattagctgggcttggtggtgcatgcctgtagttccagctactcatgaggctgaggcaggagaattgcttgaacctgggaggcagaggttgcagtgagcagatatcgcaccaatgtactccagcctggatgacagagcaagaccccgtctcagaaaaaaaaagaaaaagaaaaagaaaactgtatgtttatgtttcttaagtgaacagtgggttatctgtctctaaagttttcaggaggttatacttacacgaatttgctaaaattttatatcaaacatgttaaatttttggatctaacttggtaatttgaatatgatacattcatatttctgcacagtctgctaatggtttaattcttcacataaaatatttaatgttaaaaatcagcattcatcatcagtcattatgaaagaaatacatggcatagtgttatggaaattaaaaaggagaaaaaagtcactgcagagagaggataatgaaaactacaatgaaatgaagcttgatgataaaaataccattatacttttaatgtatctatggcattaaaagccatttatatacacatttctttggtcttcattaaaaacaaaaacaaaacttgaggtaaataaaatttaaaagttggctttctgtctggtmgtgaatactacctttgattttaaaatagataccttcaactgttaacagatatgacaaatagaactaatattactataaaactgatatttgctacatggaacagagggaggagcttaatccagttaactggaactctttaactgcaggagcctatatcactagaatgatgtttggaccatgtatattaacttaattaactataattgttacctctccaactcacacttttcyatataaatgcaagattaaagaaggaaggattctgcttctgagctccctagcaggtcaaatttactaaactaacaattgtttaatgcagtgaaaagaaatttgggggaagagtggataaacattagtttatcccttctataaacattagttacctataccagtgagatactgggattaagagtaattgggattccaggcccaaacaaaattcagttcccatattttttcttaagacatcattctactaaatgagacccctgagcagaagcagaattaactggctccttttaagtttggtaattacaaatgcaaartgagtatcctcctgcagacagagccagaggactactcaagctgatgcaataacgggagctgtgataaataatctatgcctgttatggaaagctgaatggaggacagaaatgaagaacccatatgaaaatttggaatttgctcaaagctattctcaccataactccagggaagataagcagtattccaccctgcagttctgtataatttatcaacctttttccttttcatttctaacattcacccttcatggttaactgaagaaacaaagagctaaatagcttccttagccatttgatagagcaattatgagcatcctgactgatacactttctgcttaatctactaacaaatggtgtccattttcctcttaatctctacyccatctcccattcgacttgacacstgcacaacactgctttttgtgccctgttcctgtgcccctcttcatttgtttctttctcattacagtgctcttacgtaattattattacagaaggaaaacgagttctttatgacaattttcctcagctgcccttggttaattttttcaaaatgtgatctctatgggctccctgacaacagagcaaattgaaagctcatcagtagaatctttcttaagatcggtatcttttctaagaaatgttatgtcttaggacaagaggattgtttctcccagtaataggcagtatgatgtggtgcagccatctttaaagaggtcaggactatttaaaactgggggctattaagacattaaaaattaaaatgtacctcaggcataaatttcccaccacaatgcagttgtctttacttccttctgcattaatctctcattataagaacattcattttttcctagaataagagaatttggggcccagagggattgctgaactcatcccttctcaggcctttgtttctaggaaaaaacagaagatcagggggttaagtggtttacacaaagtcacatagcagcagggtaacctagtttgagcttcctgttttgtttttcccttgaagggaacatgaaatggagaaataatttcctgccccacagaaggagcagatgtcctcaagtctctgccttttcttacctgtttgatagagatactgtcctcttcacctcacaggatttccctcagtaatctattgtgatgaaaccctttcttctgggggcatgtgtgtgtgtgtatctcacagcactaccttgtgtggcacatactctgctatggttattgttcttaggactctaaggctttgtggagagctaccacgttcttgaaggcagacaccattttcagtgttggttacccaaggaaaagacgagcctcaaggacgaccacagaactgagagggagaaataaaagggagtgaaaatcccagctctgtaagaagatgtgaagggttgtgttcctgtgtgatggagttaagacagtgtctgtctcttaaagttcagtatctgaagaagaaaggaggtaccactgtgaagagccatagtccccacacaagtaatctatcctcaaagaccaaaaagtctggctgcagaatcaggcacataatttatggggcccagggcaaaataaaaatgcagagaattctaagacagcgacaatagagcattaaaccaagcacagggcctttctgagcacacagccccacgtaaacgcacagctaccagctcatgtctcaccacaagtagttactttagtaatgtctggtctaaacatacccagtgaagacttcactttgcatgtggtttttgaagaaaagagtcttgttgaaggaagagttgtgctttttggagagtagtttgtggctacttgggcaggaggcaaggactcttcaaggtggattttagggccaggaggtgagattctgaagtgcagcggatcctgcctttgtagcgattcttccttcactgccaatctaagagaatcagaggctacagccacatcaccctgaatgcgcctgaactctcatgagaggatctaagctctatgtttaacagatgatgcggatcttatatgtatatcaagagttgaacactagaaaactacaaaagtaatgaggcagaatctgtgtctgttgtccatattatttcctgcatctgcagttcctgatgcatggcaggtcctcagtaactatttgttgatgactggtaacaggtggttatcttagtgttgaaatttggtggagtccttctggccctaaaaggaagatcagagatttagagaagaaaggtgcctctggcaataaaaagaaaaaaagttttgaagcatgttaagaatgctaattttaatactgcaatttaagaaaatgttagcatgcctaagaaggggagacttttagtatcattttgcatataagcttattatatattattttataggtttattaaatatttataaagtttcctaagatttttagctgtacttttgctatcaatgttacttaagaataatatctcagtactcttttcgttttaggttattttatttagagaacatagtcagtggcagggtatagggagaagcaaaaaagctgggaagaaagacttagaaaagtcaaaaagagaaagaaaaggatcacaggggtctcagaawtgaaaacaggcctctgtaaaaaggcagaatagagagggaggctaaaaacagaagatgaggggtaggcccccttcttttttagaagagttattggcaacatactgcacacttgatgggaacttgggaaaggcctgattattgaatgtgcaaaagaaaaataaatggggcataattagtgatgtcctggtaaatacttaacaactagctcttggggagtggggtgtggtttgtagtatttgtcaatttctattgcataaattcttcatggcctttttttttttgctctttttttaattattatactttaagttctaggtcacatgtgcataacgtgcaggtttgttacataggtatacatgtgccatgttggtttgctgtacccatcaaatcatcatttacactaggtatttctcctaatgctatccctcccccagcctcctacccccaaacaggccatggtgtgtgatgttcccctccctgtgtccatgtgttctcattgttcagctcccacttatgagtgagaacatgcggtgttggttctctgaccttgtgctattttgctgagaatgatggattccaccctcatccatctctctgcaaaggacatgaactcatcctttttatggctgcatgatattccatggtgtatatgtgccactttttctttatccagtctaccattgatggacatttgggttggttccaagtctttgctattgtgaatagtgccacaataaacatatgtgtgcatggctctttatagtagcatgatttataatcctttgggtatatacccagtaatgggattgctgggtcaagtggtatttctggttctagatccttgaggaattgccacactgtcttccacaatgattgaactagtaggtagtttacactcccatcaacagtgtaaaagtgttcctatttctccacatcctctccagcatctgttgtttcctgcctttttaatgatcgccattctaactggtgtgagatggtatctcattgtagttttgatctgcatttctctgataaccagtgatgacgagcattttttcatatgtctgttggctgcataaatgtcttcttttgagaagtgtctgttcttatcctttgcccactttttgatggggtttgtttttttcttgtgaatgtgtttaagctctttgtagattctggatattagccgtttgtcaggtggatacattgcaaaaattttctcccattctgtaggttgcctgttcactctgatgatagtttcttttgctgtgcagaagctcyttagtttaattagatcccatttgtctattttggctttggtggccattgcttttggtgttttagtcatgaagtctttgcccatgcctatgtcctgaatggtatcgcctaggttttcttctagggtttttatggttttaggtcttacaataagtcttttccatcttgagttaatttttgtataaggtgtaaggaagggatccagtttcagctttctacatatggctagccagttttcccagcaccatttattaaataaggaatcctttccccatttcttgtttttgtcaggtttgtcaaagatcagatggttgtagatgtgtggcattatttctgaggcctctgttctgtcccattggtctatatatctgttttggtaccagtaccatgctgttttggttactgtagccttgtagtatagtttgaagtcaggcagcgtgatgcctccagctttgttctttttgcttaggattgtcttggctatgtgggctcttttttgattccatatgaaatttacagtagtttttttccaattctgtgaagaaagttattggtagcttgatggggatagcactgaatctataaatcaccttgggcagtatggccattttcacgatattgattcttcctatcctcttcatggccaattttaagctaccaccatgaattgactgaatatgaaatcttaagctaccaagatgaattcactaaatgtgaaattgggaagagatgtgtagtattccattgtacagatgcaacagacttaacctcaagaccataggtaatagtaaaatggagtaagataattaggaaataaggagtttttcaaatttattacctttgctttactctacttaattataaatttatataatacaattttaatttttaataatgactttaacaactggcttccaaagtaggagccagctgtagcatgccagtggatgggcatcaccacatgactctaccatctgtgttaaaatataaaaagagctttttcaattttttttttctttcttaaaaggaattcagaaaagtgtatgaggagacaagaatctcttaagagtattttttgtcaccactttgccaaaggtttttttctttttaaacactcaactcagaatttgcagattgaaagtttagacaaagatgagagatacatctttttctaccaataaaatctgcaatattttcagctttgcatgaacttcatagggaggcagagtggtgcaatgtagaaagccctaatataattatttacaaccccagactaagcagtctgcagctttgagcaggacatttcacctccctaggctttgagacaagaatgcccactgccccacttctatcacagggcaacatgtgcatgtcaggtgggggcttctcacatgctgcaatgttgagatctgccacttatttttaatggttccataaaagtaatatgtgcttctatagagacaaataaaacaaatatggaaaaacattaacaatcagcgaatctaggcaaaggatatatgagtattcgatttttttcaaaataaaaagatagaaacactaaagtcatttatacacagacagcatttggcaaacctgctaagtagtatacaaagacaaagtaccacatctaaagagatgtggtatccagatgccayaatcttaggatagtcaaagttcatttcatctaactgattgrattattcagcaatcatttactgagtatcaatgaccctaaatgctggagataactcaataatgcacaacacatacttcttaatctcacagaatttaatgtagttagagttacacacaaataaacagagaattacaatatggcttaaatagaattaagtagagactgctgtggtgccatatasgaagaacatctaaaccagccctaaatgatcaagaaagactttcccaaggaatctgagagcagtgagaacctaagatctaaaacataggaattaaaccaaggcctgggagggagagcaagcatccatctacgtgtctagcatttatactataagccaagcaacacatgcccatttactcctcacagcagtgctgtggggcaggttattggtatcccatttgacagatctgattacagacttggtattttcaagcaagggaaatcttaagaagaaaggccctgaagcaaaactgatcatggcttattcaaaagaactgcaagttgttctgtgtattgcagtttgcatatgtaggccttgggtagggtatgtggagttacagtggaaaggagtacagggtcttgtggataataggcatctattaaagggtattaagcctggagatgatgtgatccagtttccactgggaaagattactctggcatcagtagggagaataaattgaggaaggaacaaaactaatagtggggataccacctgggagctcataagttagtctaaaacacacagtggcctgaactaaggcagtcacaagtgatggcagaaactgggtggattctgacaggactggaggtagcatcttactggctgattggacatggggacagggtggagccaagaatgacaacttccaaggtttttggcaagggtgaggggcagatggggagccagtcactgagatattgagaggcagtgttgtgggaaggggtgggtagggattgggtgataatgagagggcaaagacagatttaatcaagatcttacaaagaccagcacataagaatctgagtctgtgacaagtggcagctaatcccaatggtattttgatcatctactataaatctttctaagagatagttcttgagttatggagagaaaaagtggggtatccatgattctggtcagttttaattataagtggcttggtgaatatgaaaaaaacccttggtaaattatggaaacatgacctttcattataattgctactatcattacttattagtattttctccctgctttcatcaggttcaaaccacctaaatggtcccttttacctgcccttttatggaaacatttctcctctttttttttttttttcatctccccatcctctaactcaaggttcagtggcaggtaatttgggtggagttaagtggtttttgtctgctctcaatcaatgaacgaatatttattaagaatctcccagaagctaagctgtgagggcacaaaggcatgagagtgatagaatggactttggggactgggtcggggtaaggttgggaggggatgagggataaaagactgcatattgggtacagtgtacactgcttgcgtaccaagtgcactaaaatctcagaaatctccactagaggatttatccatataacaagataacatataaccacctgtacccccaaaactattgaaattattttttaaaaactctcccatgtaagtgtaaaccaccactagaggacttatccatataacaagataacatataaccatctgtatccccaaaacaattgaaattattttttaaaaagtctcccatgggccgggtgtggtgactcacgcctgtaatcctagaactttgggaggccaaggctggtggattgcctgaactcaggagtttgagaccagcctgggcaacatggtgaaacaccatctctactaaaatacaaaaaaaaaattaactgggcatggcggtgtgtgcctgtagtccagctactcgagaggctgaggcaggagaattgcttgaacccggaaggcagaggttgcagcgagccaagatcgtgccactgcaatccagcctggcgacagagcgagactccgtctcaaaaaaaaaaaaaaaaaaaaattctcccatgtaagtatccaaagctctatgactggtgctgcaatcatggggtcatgttctttggggtcagataattctgaatttaaatcctccttctgcatttatttaccaaccacagcccttgggtaaaaaatctacttatgtctgctcagtttccattaaaaaaaaaaagataatattacagaggtttgttgtatcatatgaacatatgaacatatgaacacagagcctagtgttcaataaatgtagttcctgtccacctcataaggctgttgcccaggataaatgagctaatactcaaaagagggttatgatttccttggaataattctgctatataagttcagtcgtttttaatgaattttgctgctattgttcctcttattgtttttactggtaccaagggcttgtggtaaccatstctacaagcctttgagcagcacttgaacacatctttattattattatttttgaatctccttatttctttgtttcatctggggactcatttctttctttgcttagtgctgctatagagaaacagccagatgtctctacaatttgtcgtttctggccacatactctgttatttagatactctgctttgttcagccaagataccgtgtctgttaaagctttaagagtctgaagaaactaattgtgctgttattggcaggcaaaatgaaagacactgagagattaaaactgtggatggggggagcttaaatgtcactgtaggtcttcaagcattttttatataaaaagaaataataaactttctaaaaaaaaactttagttttatataaatttcccattaccagtataactgctctgatgaaagattattaaaatatctgttaaagctggcatagctaaagggatgggatttgggggttggagaagcagttaacactctacccgatttaacagcattgtccgtaaggatcaaatggtgtgccttctctttgtcttatattcctagaccaaaagcaacaatctccagcttttaagacaccatcctggcagattcaaatgctttataatgttatagaaaaccaaagaggcattttcaaagttaaattaaccggatatctttggttttccctggggaagttttattcagagctgctatgatattgtatcttagcacatagtctgagactggttacaaaacagaatgagatttcactttctgtctgctagagagcctcattagaaacttctggyttggcatcctcatttctcaaaaattccaagagatttcagctcaagaagagaaatattgactgtgtgtgtatgcatgcgccatcttgctttgaacaaaaaaatagcattagcattctaattcttaataagaatttccattaaaagttatttatactttaaaatactatttttcataattccgtatactgtttatgaaaactgcattttttaattctttttctctgtaaaataattaatctacctcccgaagctattaattatgtttcatttttgcacaatgcacaaatgttcccaaagttctatcctactgttttactcagtgctcacatcataagaaccctgtgagatagacattattatcataattttatggatgagaaaaacaaaactcagaaaatttccattacaaaaccaaaccaaaatgtgacccaaggtcttttgactcccaatccagttgtctttccacttcaccatgagtggttcactcatgttagttgagatcttcaataaaaatattagtttttctcagtgtcacagtagataggaaggtaccttggaatgcgtaccgggcctgccataaccagacggggcagtgtaaggagccaggccagccttgcaaacaaaatgctggagaaatcaggtctcctgaagagagaaaaacctcagtaggcacatttaaggcatctcaggcacagagaagctaggctggcagtagtatctaatcccagggagcaaaacctctatagtaataactgggtttatcataaagcgagagttaggtttaatagcctagtatataccagatgacctgtgcattgcaattggatgctgacagttttttcgtcatagtttcctaaatcttgcactacttcttcagcaggcttcacattctgtcatgtttttcttctttttcctgtctgctaaacttaaacagtttaaccatgaggtcattttataacttcactcacccctacatgcaaaagccttgcaagttttattcccaagcccagctattatcctttggtccygtaattatttatacaatggacatgacccattcctacccaccagtggaatgcatattgggatttttcccctaaactccacatccaccgagatcaagatcacttcctaggaagacaccagtaggatctggaagtctcgaaggaggagacataggaaagatatcccaggccagcaaggaagctgatgattgcacagagataagagaaaaggcatatggagaacagtgcaggggctgacctgacaggctcagaggctggagtgagtgacttaagagggtgagaagctgactgtccacactgggacctcagaaggaagggcatagactttcaagaggaagtgattgaacttgatccagtgaacaaccaaaaatagatgrgggacaaaataacttatattaggaagattaatagtactatacagggccatagaaaatgaacaaggggagcatacccaaatgttaaggaacaagggaggcacaaaatgcctgcacagcacaaagcaagaagaaattaaggagaaatcatttgtactgaccttggtgactgaagatacaaaaggtggtagaaaacgataagctttataactttattctaatttttttgttgttttttttatttttgtttttgtttttgagacggagccttgctctgtcacccaggctggagtgcagtggcacaatcttggttcactacaacctccgcctcccgggttcaagtgattctcccacctcagcctccagagtagctgggattacaggcacctgccatcatgcccggctaatttttgtatttttgtagagatggggtttcaccatgttgtccaagctggtgatccatctgccttggactcccaaactgctgagattacaggcgtgagccaccatgcccagcctgttctagttttataaatacaagattaatgcatacccattgaatcagaatatctgagggtggtagcaagtgtgtgtgttttaaaggctctgcaaacttgccatagagaatcactggcctgtgcagcaaagcagattctgggcttagtacctttctgtaagctttctagtgcttctgagtcagtcagtcggtttagcccattgccccattgctaggagatgatgataatacacaccaaagaagcagctaacacaaatcaaatgcttatgcacaatgaaatgtctaactgtggttttgactgaaagaacaagagttagtggaggtgggtgattggatcctggactggaagctggagaagccttcccagaggaactgtgatatagcccagaccttaaagaatgggtggactggagctaaaaacagacaggtggaccaaggagctggtgaaagtggacgaagcattgtgcagtacagttttaagcaggarggtgtgggcactatgtttaaatagcagaggaggtcgataacttccctagccttcctctgaattggtcccctgtatgaggctggagacccttgcaaaggccatggggcaagaacatttttcctttatttttcccatccattccctttgcagctcagccacagacaagctttattccctcacactactcatctgtgaatgcacactaaattcagtcatgctaagaaacaaatgacacataatcctttgcattagtctggcaagctaataaacctttatatagtaatatcacctgtagaaaactcatttcattcttactacagcactatggaatggggaagccagaagtggtcctcatattgtagataagaaaaggaaaccccagagaatccaacctcaaaaccatagagctactaaggggagtatttaattgggggacttgaacacagttttctttctgccaccctgttctgcaacttgctgcagtatttgcatttcaacaaggatcagagcccaaagcacgcaggtctaactgaggacttcagacatcaacctgtagacaggagattggttctttcagtgaagctctgaatcacattacrtaggtaactgtctttgtcttcacattatctgtcagttgtgtgatcacaggcaagttggagaaaattgtgagcttcacttgacctatgaaatggaaataactccatctactttatagggtttttgagaatttcctgaaataccacctggacaatgtccttgctacacagtaagcctcaagaaacctcactctctttctcttccccattttatttacacacaaggcaagccctgctatgttaaaaccacaggctcatccagcctacctgtttttgctctctctttgcttatgctcttaatcctttctctctttccctctacctttgtccaaccacacctgcctgccttcacttcttaaacaagccgagccttttccctcctcagtccctcatgtgagctggttcctctgctcgctcatgcctccttgctcctcctcctccaggtgtcaccccaagtgttacttcttcaggaaggactgaagtaggttcctcctattactctttctcactagatcctgtaactttcctttgtcatattgaatacaatttgtaagtatgcattaatcctgtatgtaggcttaatgcctgtcttctccactagactgtggactcccacagggcaagaacatgtctatttaattggccactattctccatagtacccaatacagaatctagcacataagacatgttccataagtatttgtcaactgtgtgttggatgactgctggtcttatctctccctcttaggatgccctcctaccgtctcctcagcaattcacatagtacattccacacacacaaaaaaattttaccatgcccacattctctgaccttttccttaattttcttttcccaacacttattcatacattatcataattgggtaatgttctctggttatttcatgattccctaatcacattatcagttttctaaggaataaaactctttggggatctgttttgaaatctctgataaacctagtataatagttgaaaatgctttgggaattcagtgatttcttgaataatgaatgaatagatcaatcactcaatcctagtatatcccttttgcacaaagaaaaacttcacatagcaatacagagatatcattgcagcaaaacaatttctaaccatgactcattgctatctatatagcttccttcttgggttactattttgagtttcaataagaggcaaacaatcttatcttgaaagagggattggatttatttttaataagaaaggctgaattgggaacttgcatttttccccaaaatttaataacagcactagtaaagccctaygctcctcagctggccttatttcaggtatatgagaamagagcttccaggtaagcttctttcatgatctaagagtgagaccaatatcaccaaacctgtctaaattcattgacagccaggggaggtcacatagcaaaagcatctagtcygaacatgtttcagaacccaggactgagcagaggacatggagggaaacatcaggttccccaaggccattgtcctcaaacatgtgacatcctgatagtcaccactgataacttcagtaagtatcacttcgatttcacccccttcttctactcacaactaaaacaaaayaaaaacatatgtaattaaaatatgtcattgctatgctcaaaatgataacttatgaactgggatttcaaattcaccttgttattctgaagcagagccttcagtttatggttgccctgctgttaagcctcaagytgctcttttttttttttttttttctgagacaggtcttctctgtcacccaggccagagtggagtggcatgatcgcagctcactgcaacctccacctcttgggttcaagtgattctcctgactcagcctccctagcagctgggattacaggggcccaccactgtgcccagctaatttttgcatttttagtagagacgaggtttcaccatcttggccagggtggtcttgaactcctgacctcaggtgatccacccgccttggcctcccaaagtaatgggattacaggcttgagccaccgtacccggccaagttgctcattctatccatattctttgaatcattttatatatacacacacacacacaaacacactatatgttacatgcattttaatttactttgacaattatctcacaggttctgtctagttagtactagttagtatccttccccattgagttagtatttgatcttataacatggtccaggaaaagaaaggtaagttttgctaagtacctgttacatcatgacamttgtgagagttggtatgggatctgctctttgtgcagtgtcacttatcacctgtcttccacctctgcttagctctgtgacaaccaacagagcctctaagagatggctgctgatgagtccttctatcgcaggctgcagcagtcctgaaggttgatggagggccatgctattcaaacagcaggcgtggctgagacagaagctcctggtgctgggaagccttgccgttgggagtctcctgtatctagtcgccagagttgggagcttggataggtgggtgcttaaaacacatgcttatacccctgtgacattaaggcttgatttaaacttccttaggacataattttaagtctatccacttgtttttctccttcgaaattcccaggaaacatgcttttctgcagtattgattttgatttactgagcctttaaaagagagagatccaagttcctcaaaccaagatgttttgtcaagatccatttgtattccgtgtgcattgacacttgttttcaggaaagggataaagctgtgtacagtaaaaatgtcatttaatagagctcagttggtcygtgtgcatctggtgttgacctctagctgtagcaaaacagtgatgatgtatctatgtatctttcttttgaaatttatgagtggacacttaatgtgctatcaggagcattaaaattatgtatgagcctctaaaggagctcatcgagtttgcaatccattgctctggaaagatggctgcaggcgtggggagttttaactatgttaattagctctggttttcaggggctgaacgcaccagacaaggaggctgttgctcagaataattgcccagaaagcaatgggaaatccatggagagaaaattacagtgctagggtttagctctaaataggtgtacagttgagaggtattggacttgcagaagtcccagcaacatcagctggcttcacagtaaatgtttctggtgtgttctatgtctagtctaatgggcaaagacagagaagttaatttctgaaatgtgaagcttccctttttgcccttaaaaaaaaattttttttttgagatggagtttcgctcattgcccaagctagagtgcaatggcgtaatctcggctcactgcaacctcctcctcccatgttcaaactattctcctgcctcagcctcccaagtagctgtgattgcaggcatgtgccacacacccagctaattttgtattgttagtagagacagggtttcactrtgttggccaggctggtttcgaactcctgaccttaggagatccacctgccttggcctcccaaagtgctgggattacaggtgtgaaccactgtgcctggctggccctttaaaattaattcttgcactggaaagactgaagtgtgttctccatgagttcagttctcacagtcagtgaaaacacatacaaaattaaaaatgaaaatcttttcctttcagttttcttttccttccaaaatttaagctaatctgtagaccttatcacttagattatttagaaataacatagcagtggtccttgttttccttcagttggtgtcattttgactggtaaagtgaactcctttgatgcttctcaattcaaaattcctgagtaattgtctcactcactagttgttacctaccctgaaagtgtaatcagagcttctcaccgacttccagtagtttcctaaagtagcacttgatggttattgagaagccttgaggtggtgccattggcctacctctgtaatggaactcttatatccagccctccccaactgacctttaattagcttccaatcatttaccttttacttagtaattgatctaatgatcactaatgcattattatttagttgatgattcttttcatttttttaactctgtctctagtctctaaggggatagcttttatttggaattgaattgtttggtgggctttstaaaagcctctcacttcagactttgagattatgtctgaaggtaacaggcttatttaggcccactctccagtaactgaagaccctgctttctgggagggagacagaggttacttctaccatcccttccaatcctaaacctgtatgatttttcagtctgggacccatactcagaatccatgctttcagaagtgggaaagaatatgatattttctcawattttcacattctatcttgagttagggagtccaaaaagcgactattctgcaggatgtgatctcccagggtagaagatagaaagaggaaggaagtaaagaaggaaaatgaccctttctacaagtggggaaattccatttgacctcaaacaaagcagagactgtctatatcagccactctcagccagggtactatgaaagaattaaatcctacaaaaaagaatttgagtgactgtttcctcaattcttccaaggatggtactagcatcattctaggtgcttaggacagaaatccatcaatggatgccttatggaattagagcttaattctcaaccagaacccaagaagaactgaaagatgaacttgtattattccaatcagtgtcacaattaaaagcatctttgcctatgtatctattgataattttacatcctccatttaaagccctagtacattaatctcattaacaaatttataaaaacaaaattcatgtttctctaaactattaaccgggttaaatcctgttttttaaaagctgtctaggccaggcacagtagctcacgcctgtaatcccagcactttgggaggctgaggcaggcgaatcacgagatcaggagttcaagaccagccaggccaacatggtgaaaccttgtctctactaaaaatacaaaaattagctgggtatggtggcgcacgcctgtaatcccagctactcgggaggctgaggcaggagaatctcttgaacccaggagacagagattgcagtgagccaagatcgtgccactgcactgcagcctaggcaacagaccaagactccgtctcaaaaaaaaaagaaaaaaaagttgtctatattttcacactttccacaatgagcatgagttgttttaaaaatcataaaaaagaaacatcgtgaaaagtagtatacattgatatttttccttaagcattatgatagatagctgtttaaacagaacaaagaccaagaccatgctcctcaattctgcagaacaggctgagtgtattagtccgttttcacagtgctataaagacatacctgagactgagtaatttataaagaaaaaaggtttaattgacacacagttctgcatggctggggaagcctcagaaaacttacaatcatggcagaaggcaaagaagaagcaaggcacgtcttacttggtggcaggagagagagggagcttgcagggggcggtgccacacagttttaaaccatcaaatctcatgagaactcactatcatgaaaacaaggggtaaatacacccccataatccagtcacctcccaccaagcccctcctccgacatgtggggattacaattcgggatgagatttgggtgggggcacagagccaaaccatatcactgggcatgaccttgaggttgtttctcatctcagaaaacaagaaagatgcaatacagtctcttgggaaaagcaagcaacagcctcattgccacagagggggagacacagattccaaattattagaataactggaagctttcaagtgtaagaattggtttaacagcctttttgactgatattatttaattttaccaagaaggctaaaatgccctcacagatcaacttaggggaattataatgaacttcagttcaattcagactatacctaaaaggaaactcaatttgctaaccatatatgttagccatgacaaattaaacagtcaccatcgtctactatcattgtgactgttaccacatctttctccctgagaaaagcagagatggttgttcactattcaggataatactgaagtggaaatcctcctgtctggctatatccattgcactccttccttaatgagattgagttcctgattttaatgggcttggcaatgagggcttgaggcttctggccctgtcaaggtcttgttgatgcctggtcccaggtgtggtaggtgatatacagcacttgctgatggcaattgggtttgattctatattcagcaaagtggatatataatcctgacctctttagatagaaagagaaagagaggcagaagaaatatagtattcttctggctatcctcaaggcccagggcagagagtctcagaatgaaaatctcagcaagttccaagattggaattttgcaggttgatgatgcaaacagcccggggcagaaactgggacctcctttcagattatatctcaaagattttcaagagccatctgagtgctgccgagctgcaagaaaataataccacacaaaatgtgaaacacatggcctccctgctacccttccacctcccagctgaagattataatctcctgcctttcactttttcttaatgattttaactggtgagctgttaaaaagctattagtatggctggtgccacttgtctatcctgtactgcaaacagaagtrcacgccgtagtcaattaagtgcttggagaataaaaaattttaaggagcactaataaaaaaattcatcaattatgtgtgctccatttaatacatggttgcttaaaataaaatttcccaaacatatgttcattatggattgcagcaggctgggaaccagtggctttatttatgcatttaaagtcttggtctgactggggaaccagaaaaatgaaaagttagttgcaatgagcttaaagtgtctctgtcttgcttgcaggctacaacccatttgccccattgaaggtcgactgggtggagcccgcactcaggctgaattcccacttcgcgccctgcagtttaagcgtggcctgctgcacgagttccggaagggcaacgcttccaaggagcaggttcgcctccatgacctggtccagcagctccccaaggccattatcattggggtgaggaaaggaggcacaagggccctgcttgaaatgctgaacctacatccggcagtagtcaaagcctctcaagaaatccacttttttgataatgatgagaattatggtaagggcattgagtggtataggaaaaagatgcctttttcctaccctcagcaaatcacaattgaaaagagcccagcatattttatcacagaggargttccagaaaggatttacaaaatgaactcatccatcaagttgttgatcattgtcagggagccaaccacaagagctatttctgattatactcaggtgctagaggggaaggagaggaagaacaaaacttattacaagtttgagaagctggccatagaccctaatacatgygaagtgaacacaaaatacaaagcagtaagaaccagcatctacaccaaacatctggaaaggtggttgaaatactttccaattgagcaatttcatgtcgtcgatggagatcgcctcatcacggaacctctgccagaacttcagctcgtggagaagttcctaaatctgcctccaaggataagtcaatacaatttatacttcaatgctaccagagggttttactgcttgcggtttaatattatctttaataagtgcctggcgggcagcaaggggcgcattcatccagaggtggacccctctgtcattactaaattgcgcaaattctttcatccttttaatcaaaaattttaccagatcactgggaggacattgaactggccctaaaataatatgtcatacaacactatgtgttgtgcctggagacacacaatgtctcctgtagattaaaatatgcacttttcctaggcagagctatccaagtcatttttccatgtatatttgtacatacgcagtgtgtgaccaaatataagatcagttctttttctactgaaaatttacgaaaaaaaaaaaattgctgtctgcatagtcgcatcttttaagctatttacaaaagagaagaggtggtggtattgggggaaagtgacttcagctattctcaragagttagtcttcctttgattcagaatttgtcacccgccattttcatagatttaagccaaaagataaatgtgtgaaaatgtaccaatggctgcgaagcttcaggaagtagaggatccagtgatgcattttttttttcctaagggaaagctggctctttaattcagatgctgaattggtgccatgaaaacagaaaatgctattttcttattatttaaaagaacgtcttatctcataaaattgacattgttccaaagttcttgtggtgattttgcactattgttttctcgtatggaccatggtgtcacttgtagcatgtcaatcacacattggaaagtcaagtccttttacttccatgttgtatgtcaacagagagaaatgtcatgtacataatgtatattgttgtaaatactggtttcacactaagtaattctattttgtaaactgaatatggctatttaatttattgtgaaaattaaatttattgtggtatttaaaaatggaatggattaaaattactctatgtgcaattttttttttttttactcattttgttttacgtgccccctgctggcttccaaaatggaagctgtttacgtgcatatgagagcacttggaaagatgtgcttccctgctggatttctgtaccccagtgaaaatgtatttatgaagtgaggttgagtatattaaaaaagaaaaacctcaaccatctggaaatcaagtataatagccacctcaaagaaccctagtgctgctctgctacaactttgtaacaattaatttactcgcagttgctgctgctcaggaagagagacaaggaatattttaacagaatcaaggcatagaagaatcaccattttatttgaacctctaatcagagtcagaccagtagagaaattaaataagattagaaaactctgtactgaaagctgctgatgcttcaaaaatgaaaacaagatctcacaactctccctgttagttgaaaatatatcaatttgctctgaaaggattcagctgcctagtgttgccattactaacataaacatatggctcatatttccatccagagaaattaatgctaaattggtgcctcgctaacatcagatacactgtattatgcttaaatatattcagtaaaatgtggaaaggggtattaacaacgacaacaaaaagatggattttttttttctcacaatcacagttgctaatccagtgggagatgtttgagagagttttgttcaacatcacagtgagagtgcctagggaaatcagaaaattacaatggattcccctttgattgtaataagtgttgattttctccatgagttgtttatcctgtctagtgatttgatggtgaacttttctaaataaatagccctttcccctccggtgtcggtatatattgcttctcaagccagcgccttggtaatcatctctattgtctgaatgagcagtgatgctgtactctcagcttgaaacaggcatgacaccaatacatgctggcaggccagctcctcccttactgtgggatgacactagaatgagagcctcaggtctaaatgtcagccacttctcccctaagccatgaatgaagtcaatataaggatcctgcagtcagatttctctgggcctcaactctctgctaaccatcagtataaactatttgaatacaatgttcaaggacacaatcactgtattatcattaatttcatagaagtattcctagagcgctatacagccaatatgattttgtgccagtaactgtcaaattatgctccattggaacacggatgtttcaaaaactcagaccaggtattcaatcagtaaaataaaaaaatggtaatcttttcccagattcacagaggaataaaaaaaagttaataaattgaaatttctccgtaatcatcttttatgttaccaatttttcttagactttgctactgctaccaatagtgtatatcagactttattctaagattctatttgacttatgccaacttttatctcaataagccagtatttcttcaaattcaggggcaggaggggggaagcactgtgatttcagttgttctacttcctaagtaaatttgagaattgttttaaatctttaagcctccccacggagatctaaagcaagggcctatgttgggagaattttttgggtggcaggttctatttcactgaaaaaaacagtcacagccactgctgattgagctaggtagggagaaataaaaatgctatgatttaatagcataacactcgtggagattttaaacctacttgtttagaaaaatgtttcctgttatcagacagacaacagaactctagagaaatcttcacctcattacaatagctccacgagggctctctttaataagttacttcttttatgtcataaacaccttgcatgttttcaagaggcacagtggaaccatacagctttgtggaacagttctagctgcaaagagaaaaattgtttaagcaatggcggggtttctgctggaccataaagctaaaattacaccatttctggaagccaaggaattccagttacaattaaacaaatagcccaagggatggagagagactaaggatcagagagattttagattttagaatagtaaaataaacccatagatacacatcctgaaattccaagtctatctcctacccacctgaaaccactgcatataaacccttaattaattaaggcactaaacttttcttaataattgcaatgtagaataacagaagcccaagacattttggttctgagttaatatatgatcaagcaaaggcttgtaaactcttatgaggtttataatcccatctgatcttagatgtggtaccttttatgttgatggagcagtgacaagtcataattggcagcccagttcctcctcatgagtgtttcatgggcgtgcttcctggaatgctgcccctgaaatgaaggctcttctggaagacaagcttcaaggcctgtggggggcatcacctgggacactgcagatgcactgcttctcagggaaggtgagaaccagggacaagtgcagttcaaattccatccctgctgagaagatttgcttggtccagagagctgtttgctaaatcaaattgccttcataagcctaatttgagaattttccagcaatggagaatctcaaatgattgtagaatcttcccactgaaatcttttatactctttccacacactcagcagccattttccactaaaaatagtctacagtctaggaaagaaagaaaaacattccccctcaaaattactaaatacagaaaaatcctagcaatttgggataacgaggtgaaaatataaaatattttcaaacaaattcattgcaattattgccaagtagacaaagcaccaaaccgggaggccgagtaggcagatcacgagttcaggagttcgagaccagcttgactaacatggggaaatcctgtctctactaaaaatacagaaattagctgggtgtggtggcacgtgcctgtaatcccagctactcagcaggctgaggcaggagaatcgcttgaactcgggaggtggaggttgcagtgagccgagattgcgscactgcactccagcctgggtgacagagcgagactccatctcaaaaaaaaaaaaagaaagaaaagaaaaatatccaattgtgcctgctttgccaaatcaaagcctcttaattggcatattggattttttttccaaactggtattattcaagtatttcaaaatagtctgttctcttaagtaggttattcaagccccctagcatctgtcaatttttacagcacacctttcttttatagctcgtgtaagagtgaaatttagtccaaaatatgatcatttggtaaggttctaattaacgatgccttactatacatcttataaaaacaatttctttacatttgagctttcaaaaaattcttttcagttacattttattgcaccttttaggaataagagtgctatttcataatgattagaaacagattgaggagttgaaaggcagaactgaactgatagcaatacgcagctcccatagaaagtgcctgactggtatttcaaaaacaagtgtctgttatttaaagatagttcagttgaaaagcagtaccctttcagtcatatcaagtaccatggctggtacttgatcaggctagatctattgatgaatttatgaaccacatcagtctaccaggtttgcgggaggtgttggtaaaaggctttattgtttctaaagatatgtgtcaccccctctcaaaaacagtctgtcaagaaggtgagtgtctcctaatagatgggtagcaccatttcaaaaaggtagcttaccttacacatatctaaatgcacatgtctctgctttgcatttccatttctttgatgacaccagagaacatccttaaggccaactctaaaactgcctgtttccttggtaaagcctcaagaagactcacctaaaggtttgggcgtaaattataaaagaagttgtaattgctacgtgatcaggtaatccaacactaggtcctgtaaataaacttaatatgactctttaaaggtgagactctctagcaacgccagatgatcatgttgccataccaagtagaactagtgagtcacagttcagaaactgtaggagaaataaataaataactcagcctggaagaatcagagaaggcttccatgaggcacatttgaagatcataatatctcaccaggcagacaaacaggaaaagcatactctaggatgagggaaacaatacagcaaaagcacaaagtgtgaaaaagactagcatatccagtatagctggagagtaggtcataagagaaggtggaatgtaagaatggaaactgcaacagagcttcctaggccctgagcgagtccttccaccatagccttgaggggaccctgctagatagcaggccaggccatcatgctgagtctacacccggctgatccttagaggctgagggttcaatattggaaaagagatgataaaattaataagccgaaggttatctttcaaagagaaaaaaaaaaaatcacatgattggtgcccatagaatcatcattttccttcccattctgcttcactcttctctttgcttctctcacttcccttcatggccagtagctttgctgcagctgatgggatcctccatatttggctcatttttctcctgagattgaggaaaaagtgtttctgtgggtatactgaccatggaagagtcatattgtctccttgccactgagcttctcactaaaacttcacccatcctgagactataacaggagacataggaatgaaaagaaaaacaaacacaatattctcctgcaagataggtgttgagtgttctcaaaaaaaaaaaaaaaaaaaaaaagccaggaaacatattcatttcattacaaataaagcaaataaagtcatgcatcacttaatgacaggcatatgttctaagaaatgcatcattaggtaattttgtaattgtgtgaacaatataagagtgtacttacacaaacctggatggtatagcctgctagacacctaggctatatggtatagcctatcactcctaggctacaagcctgtacagcatgttactatattgaattctgcaggcaattgtaacacaatgataaagatctgtctatctaaacacatctaaacatagaaaaggaacagtgcaaatatataaaaaattgttaaatgctacacctgtacagttagggcacttatcatgaatagaacttgcagaactggaaattgctgtaggcatcagtgagtaagtggcgagtaaatgtgaaggcctaggacattgctctacactactgtagattttatatataaacactgtacacttaggctacactaaacttataaaagaatatttttctttcttcaataataaattaacattagcttactgtaattttttataaaatttttaattttttctttttgactcttttgtaataacacccaccttaaaacacaaacaacacattgtacagctgtacaaaaatattttctttctttatatccttattctataagcttttttctacttctaaattttctcattctttcactttttaagctttttttgttaaaaactaagacataaatatatacattagcctaggcctacacagaataaggatcatcaatatcactgtcttccacctccagatcttgttccacgggaaggtcttcaggggcaataacaggcatggagctgtcatctcttatgataacaatgctttcttctggaatactcctgaaggacctgcctaaggctgttttccagttatttttttttaataagtagaaggagaacactctaaaataatgataaaaagtaaatacacaaaccagcaacatagtcatttattatcattgtcaagtattatatactgtacataattgcatgttctatactttgatacacctggcagcacagttggtttgtttctatcagcatcaccacaaatgtaatgcattgtgctacaacattatgatggctacgaggtcacaaggcaataggaatttttcagctccattacaatcttatgggaccacctgtcatatatgaggtccattgtagacccaaaaatatcattatgtggcatatcactgtataagctaaactttcaggatgaaatgggcaagccattttgtctttttgagcttcccattaaataggaaaatcagaacagggaatttttatgctccttcttatgacattatatcattccatgaaagggattattggagcatttcttgtgacactgaacgtccacagagtcagggcatgaaggtggaggaggaaggaggggcctctactgtacttgtgcaaatgatctctccaaaaaacgttgtctatgattttgcctttaagggctcttctttgtcaccactcccttgcaactaaactttcgtttattcaaccttattctcaactttggtttctagtttacctatcccttcccacattaattaacctttgccacacagccaaccatccccccaaaatttaatttagttcacaattctgttgttcagctggacaattcttctgttctggcccagcttgtcttccctctgctggcctctttcacatacctgtggtttctgccgggtcagctgctgcctggatgatctcaggtggcctcatctaaatgtctggtggcttgtgctgcttagtgattggtgctacctcccagtgttagctgttggcttgatgacaaaggtgcctaggtcacatgtatcttctcacttagtatatgcaccaggcctcttcacatggtagtcagaaagggcttaagagtagcaagagaaggcaagtcccagtgtgcaagtactttttaagtatccgct

SEQ ID NO: 93555 - DNA, 18818 bp, Homo sapiens
cttgctgcagcctcaatctcccgggcttaaccaatcctcccacttcagcctcccaagtagctgagacttcaggcgtgcgtcaccacacccagctaatttccgtgtgtgtgtgtgtgtgtgtgtgtgtgtgtgtttgtgtttagtagggatggggtttttccatgttgccccagctggtcttgaacttctaggctcaggcaatcctcctgcctcagcctcccgaggtgctgggatcacaggtgtgagccgccactggcaggcatctcctcaacttgacattgcagtgagaaagggcaaaagtagccggtctcacagagcagacatgtgcttcccgtcctgacctgcaacgcgctgcctccttacaagtgctaccagatcacctggttcatatcccggagccccagcccggaccatgtggtgaaagtggccgagtacaacaaagtgaagctgagcatcttcattgcccgcctctaccacgactgtgacccgggattccagcacgggcttcgcagactgcaggacacagaggcacgcgtgcacatcatgtcttctaagggtgagaggttggggcctgaggggtgtgtgtgggggagggacagcatgaggggcaggggagtctgggatgccattgggacgatgtcccaggagagcctgcagggactgagccagcactgacagccaggagatcacacctaggaggggcaggcccagggtcaggggagagaggtctgccgggcctgacttctttctcccctcttttatctcagaatttgaacactgttgagaagactgtgtacaagagagatgtgccatgtcagccttgcaagggacagcgtgaaaactacccatctccggtcaccaagttgcagggtagcctcacagctgatgccctcgctcctctcggctcctgctcagcctcctgatgccttccctctgtcctggatcagattcacccctgcctgggccttctgagctgctcctgccctgagtaccacccctcagtgccccccacctcactgcctcttccccactttcctgaccctgcctgtgagaggctgctttctgcctccatagcaacctctatccaccccccagtctccttcctcccatcctgggggcccctagcctggctccttccatctcctcatcatacctaaatcttgtcattgaactgatataaataggtagtagaaatatacataagtgtgaaagttaagttttgagaaacaccttttgtaaaaaaccgatggtaagtattgggtcattcttgtcacacccaactcaaacagaggccaggagccaggaggggaaaccgctcagtttgcaaaacgtcgcttccacaagcctgatggctgaaactgctcactgtaccctgaaaccagctttacctacagcttctgagataaactgctgcaactctgggacccacgatgcctatcacagtggctcatcaatggaacctgccggctcccaacccttcctagggcccatgaactctctgaaaagaggaacagaaatatttctcctttttgtaaaatctttaaccttccctttgttcttcatgtacacgctgaactgcaattcttcttcccaaataaaacattaaatttagaaatttctctccatagttttattttgacttcaacatacgtggggtcagaagtgggatccaattctcacttccctccaggggaatcagcagcccacagaacgatggtgggaggtacccacgctggtaacctcttctgccccctggcagatctttcttggacaaaactccagaattgggtttgcattctgtttcatttgggataaggctggggaggggtctttccccttcctgtttgggagattttctgttaggagggttgttttcctcccgttgatctgggctgtgaggtttggacctcgacaagtttggaagaggtgattccccctcatttggagaaagctatcatccttcctggtaaacacctactttatttcccatcagtgcttgcatttattgtgcttttgtgtatttgatgtcaaactaaattacctagataaactgagcaacaggcagggcgcggtggctcacgcctataatcccagcactgtgggaggctaaagcaggtggatcacctgaggtcaggagtttgagaccagcctggccaacatggtgaaactctgtctctactaaaaatacaaaaattagctgggcgtggtggcgggcgcttgtagtcccagctactcggtaggctgaggcaagagaattgctggagcccaggaggcagaggctgcagtgaaccaagatcatgccactgcactccagcctggatgacagagtgagactctgtctcaaaaaaaaaaaaaaaaaaaaaaaaaaaaaactggattacaaatgaaatcaaagttcaaaggcatgccaagatattttctgggactcccgcctgtaacgtcttcaaacattatagggattattcaatctattgttctttttgttttgagatggagttgttttttgttgttgtttttgttttgtttgtttgttttttggagatggagttttgctctgttgcccaggctggagtgcaatggcttgatctcagctcactgcaacatctgcctcctgggttcaagcgattctcctgcctcagcctcccgagtagctgggattataggcatgcgccaccacgcctggctaatttttgtatttttagtaaagacggggtttctccatgttggtccaggctggtctcaaactcccgacctcaggtgatcggccagcctcggcctcccaaagtgctgggattacaggcatgagccaccgtgcccggcccaatctattgttcttaaaactaaaccaaaagaccatggtttaaaaatcatacactttaaataagatatgcatatctcattgatatcttttttttttttgagatggagtctcgctctgtcgcccaggctggagtgcagtggcaggatctaggctcgctgcaacctctgcctcccgggttcaagagattctcctgcctcagtctcccgagtagctgggattacaggtatgctaccaccacgcccacctaatttttgcaattttagtagagatggggtttcaccatgttggccaggctgacctcggactcccaaagtgctgggattacaggtgtgagccaccatgccaggccctggataactttctttaaatcaacaaagtaataaattttgtcacactgtcagcttgcttgcatgtagacatggcttaggttttacattggtaagactccaatataaggagagtttaggccaggcacagtggatgaggtcattggggtagttcctaatccaataaatctggtgttcttataaaggggagatttaggccgggcgtggtggctcacacctgtaatcccaacactttgggaggctgaggtgggcagatcaggagtcagaagtttgaaaccagcctggccaatatgatgaaatcccctctctactaaaaatacagaaattagctgggtgtggcactgcacacctgtgaacccagctactcgggagtctgaggcaggagaatttcttaaacctgggaggcagaggttgaagtgagccgagatcgcaccattgcaccacatcctgggtgacagagcgagactccatctcaaaaaaaaaaaaaagaagcttaaaacaaagacgggacgttcttccttctgccttctgaggcctccctagtctgtagtgccggagcttctaataaatgatcacaacttcaccgcaccctgtggctcagcttgagttctttcctgtgagagatccaagaacccattcttggggtctggatcgggtccccctttgcagcaacgaacacaggccagagtggccagcctaacctcccgtcctcctggagataacacctaagcacaggcccgtcctagacaccacagggtctctgctgcaggaattcactggaggagtagtgggaatgctgcctgtgggaaggaccaggaaagggttccgccttcctttccatcctccctgcttctcagcctgggagactcagctctgtgattaaccagcactacagtgtgcagatctgatgtctctcctggcaggaccccgctcattctggaatcttccatggactgtagccccaacatttaggacagatagggtggaggggatgccattcccaggaaccttctaaattctcacccaagctcctgtgaccccaggggccatgcagggtctagagggctgtcagggtgtgcagggcgggaggatatggagggacaagctgggcaaggttcaatgggactccttggtgtggaacctagactccgcagtgactgcccctagtcctcgcccttgggattcaactttcctaggggttctttggtttttctttttcttttcttttagacagagtcccgttcttgtcgaccaggctagagtgcagtggcacaatctcggctcgctgcaacctctgcctcccaggttcgaatgattcccctgcttcagactcctgagtagctgggattacagatgcccgccaccacgcctggctaatttttgtatttttagtagagacgaggtttcaccgtgttgcccaggctggtctcgaactcctgacctcaggtcatcagcctgcctgagcctcccgaagtgctgggattacaggcgtgagccacagcacctggcctggctctttggtgtttatgatctgaagggtgttggttgatatgcatgaagacgaggacatgggttccagaatgcaaatgtgaagtccaggtccttcatctctgacctgggaggccctttaggagcagtaagtcccctccctcgtgtctcctctcctgctcctttccatggagcaatgaagaacctcaaagtagctagctgtgggggagaagggacacaggaagtcctggccagcactccagctctgctgttgatttgctgtgtgacgtggggacagtatcttagcctctctgtgcttgggacctcctctgactgtcaggatcactgccctcccctcccagtgctatctggggactgggctagataatgggcactggatccgctggagatgcagtcctgagcctgaccccagtgctcatttcacatcaggctcagggtcctgccaggaggctgaatgccaaaggtcagtggggtggtggggagggggctgcagcctgccctgtccaccaggggagtggcatctggtctatggtgtcagccctggtctggatccctgctcctttctgtggcttctattcctttcatttattttagtttagtttagtttttgagacggagttttgttcttattgcccaggctggagtgcggttggccaggttgattttgaactcctgacttcaggcaatccacctgcctcagcctcccaaagtgctgggataacaggcaccgtgaccagccatcaattcctttcttttttctttcttttttatttttatttatttatttattttttgagacagggtctcgttctgttgccagggtggagtgcagtggtgcgatgtcggctcactgcaacctctgcctccaaggttcaagcaatttccctgcctcagcctcccaagcagctggaactacaggcgcaggccaccaaacctggctaattttttgtattttagcagagacggggtttcaccatgttggccaggatggtcttcatctccttaccttgtaatttgcccacctcagcctcccaaagtgttcggattacaggtgtgagccaccgcatctggcctttgttcttttgtaaactatacctggggagggagttgagtctggctgtacctggagagggaattgggggtgggaggatgggaggtgagccacctccatcagacttcccctgccaagcccgaggaaatagagaaagaaaggagcctgagggatctgaagcaccccagggccctcccactccagtcccacaaaaggaagagggtggagccaccctcatcaagcagtgactttttgtgacttttgggagagctgaccttttgtgacttttgggagagctgccaaaagtgaaacttagtgcctcagacaagcaggggcaagtctgctaaggaagctgtggccagaagcacagatcaggtactgccgcccactctgtccactgggccctctgctgccacttcctgcctggcagcccttctgtgcctcagccctggcctcccgctgccccagccccagccctgggctccttctcctctggctcccctgccatccccactcccacccaggctctttgccctgctgtgtggtcaccccactgctgcttctgaacgggccgcctccccggcctgcaccagcccaagacccctgctgagactctcccctaagagtcatggctgggctagtgctccccaccttgggagggtgctctctctgtgtgcttcctgccattcctgggctctggaactgggagaactgaactaaaggatgatgggagcaatctggaattttgttcacagtgctttgatgaactttgtgtaagattactttgtttcaatacaaagtcttaggagagggtgtggggaggcaatgatctctgaagcacaaggcaaatcatctcttccaaggatgtctccactgtgggcagaggaggatgcagatgaccctgaacacacactcctcctccatgatcagtattcacattcaccgtttataatgacaccagttaacacggaatatacggaaaaactcaatgatcaggagaaatgcttttattttaaaatttaggaagaagagagcctggttcccaaaggctccctcctgcagggcccgtgatgcagaggctggcagggctggccaggaaagtggcccagctscayggcctgggcaggttaccccacctctctgcacctctggcccctcctctgtaagatgagaatggcccctgcaggcctagggcagcctcacgtgagctcagatcctctcagcacttagaagagtggcctgggcctggggatggaagtgctaccctgattttttgtttcgttttgtttttttgagaaggggtgtctcagtctgttgcccaggctggagcgcaatctcagctcactacaagctccacctcctgggttcacgccattttcctgcctggccaggcaaaatggctcatgcctgtaatcccaacactttgggaagctgagaggggaggatcatcactaaaggccaggagttccaaaccagcctgggcaacacagggagacccccttatctactaaaactaaaaaaataaaataaaataacatgaataggtaaaatgccaggaattaattgaactgaaatattaagagctcttattttgaaggggagaattttattcacttttcttatttttaatgggttagaggatgggtggcagaaatactgggaggatgggagatccatccctggaaagaccagagctagggccctgagctgggagaggtcaccccggccctgctgcccctgccagcatctccttctcttctcctctccctggtcttcctgcttgggaaagctgcagaaattctcaggacttggaggcttgaaatgctcaggggttttccagaaagcagaatagaaagtagatgggcaaccatcaatcagacaggccaaagaaaaggagctcaggccctcggggagacaggaggtgagcgcatgggtcacaatcctggcagggcgcggtggctcacgcctataatcccagcactttgggaggccgaggtgggtggatcacctgaggtcaaaggagttcaagaccagcctggccaacatggtaaaactccatctctacaaaaatacaaaaattagccgggcatgaaggagggcgcttgtaattccagctacttgggaggctgaggcaggagaattgcttgaacccgggagaatcacttgaacctggtaggtggagcttgcagtgagctgagattggaccactgcactccagcctgggcaacagagcaagactctctctcaaaaacaaaaaaaaagcaaaatccaaaattgaatcctctgtagaatgtaatcacaattcaggagagcaaaatctatgtaatttcttcagccaaaaatgtgtcacaacactcccttggtgacaacagcttttctgttcactcaactgtgttctgtgcagacaaacttgtcaaacacacacctgagcaaagagcacagtgctggaggaagccccagtttccaccccatcactccccaaggggaagggttctggtattggacatgtaggggtcgagaggcctgtggacctcaaggagggggtgtccaactgcagctggaaagagggatctgggactcaggccagaggcgtgtgagcagctcagagcagstctgagcccaggggagccagaaaggcacacccacagttctcaggcaggggatccccacccaacccaggaagaatagtgacgaggtyggggcatccccatgcaaagagcctcagctgtgggcagcagccggtgccctcccaggtgggaggatgggagatagcagacaaggtgggagggagcactcccctcctcctgycctcctgccagcccttcctycccctgctccactgcagtcctcctggccaacaactaaaggggagaccctccctcaccaaggggaagggcmcaaatgaacagaaagggttgggtttggctgggcgcaggggctcacacctgtaatcccaacactttgggagaccaaggtgggtggatcacctgagatcaggagttcgagaccagcctggccaacatggtgaaaccccgtctgtactraaaatacaaaaattagccaggcgtggtggcaggcatctgtaatcccagctacttgggaggctgaggcaggagaatcgcttgaacttggaaggcggaggttgcagtgagccaagatcgsgccactgcactccagcctgggcgacagagcgagactctgtctcaaaaaacaaaaaagagttgggyttgaaaagtggcttgagcctggggtgactcaagaggacgctcccttcatctttggttttcccctttctgttgcacagaaacacgatggctctgttaacagccgaaacattccgcttacagtttaacaacaagcgcckcctcagaaggccttactacccgaggaaggccctcttgtgttaccagctgacgccgcagaatggctccacgcccacsagaggctactttgaaaacaaggtgccacacgggctctctgggcacagggccggcaggggctaaccccatctgatgtgtgcagaaaatacatgaaatgcctgcctataaatttctcaatttttgatgtaacaccctctgtgttttcgtaacccttggtgcctgcctgggttttggcttagctggatctgagtggcccagtttccctaggacactcccattctttcccgtccccggacctctgaagaggccaacccttctgtagaatgctccttctgcccctctcatttactcattctcccgatctcagctcagtcactayttcgggaaagccgaggtgccgtgccacggtccgagtgcaactccatcacacccctgtcctctccgctctattgccagcccctacctgccctgcctccccgcctccccgccccccgccccggctctcacctgctctttaggatcatcccgggttggacacagcctcctaggcgggtgtccaaaggcagggtccacagagcttcgggactggggcgtggaggtgttgtctcctcctctggacacagggatctttgtccaatttacagaaagatgtgraagtcctgggacagatgaattaacacacgggtgcgtgagtgcagggctgtataaaccagggaaggcaggaagcgggtgcttgccctgcactaggccaggccacgcactagaaagttcaccggacagacccctctgcccccccatccccgccccygtcccggcccccgcccccagwcacatgactcctggcctctctcttctcccctcccttctctctgtttgggaccctccccagaaaaagtgccatgcagaaatttgctttattaacgagatcaagtccatgggactggacgaaacgcagtgctaccaagtcacctgttacctcacgtggagcccctgctcctcctgtgcctgggagctggttgacttcatcaaggctcacgaccatctgaacctgsgcatcttcgcctcccgcctgtactaccactggtgcaagccccagcagrasgggctgcggcttctgtgtggatcccaggtcccggtggaggtcatgggcttcccargtaggaaagaggctttgcagttataagagtgcaaacccccgggggcacaggcttggcaggggctgggggttgggggttgggggttggaggaggttggcggggggcgggggcgggttggaggaggttggcggggggtgggggcgggttggaggaggttggcggggggcgggggcgggttggaggaggttggcagggggtgggggggtggcggggagcggggggtctgtgggaggccaggaaggaaggattgtggctcagtcaaggcccaagatctgacaccacccrggagggagaattccccrgacagagcaatgtccagggagaggaagagaagagaggggaaaggaagcaagagctcctggcactgcagctgctgcccctggggcctggctggtttccctcttccctctcagagtttgctgactgctgggaaaactttgtggaccacgagaaaccgctttccttcaacccctataagatgttagaggagctagataaaaacagtcgagccataaagcgacggcttgasaggataaaggtgaggcactgtcctgcctgctgcccccgacctcctcaccgcctgccgcagccccatacccagtcacacctctgcccactgcccttacccctacctttttttcttttcttttcttttcttttttgagacagggtctcactctgtcacccaggcaggagggcagtggtgtgatctcggctcagtgcaacctctgcctcccgggttcaagtgattctcctgcctcagcctcccgagtagctgggagtacaggcactcgccaccatgcccagctaattttygcatttttagtagagatggggtttcaccatgttgcccaggctggtcttgaactcttggcctcaagtgacctgccttccttggcctcccaaagtgctgggattacaggtgtgagccaccgtgccccgccccactacctgtttcttttttgtgttctcctctcgcaccaggggctccttcttgttcttttagattccaggggtacgtgcgcagggtcgttacatggatatattgtgtgatgctgaggtctgagtcacccaatctactggaacatagcacccaataggtagtttttcaaccctggcccccctcccaccctctcttcttttggagtctccagcgtctattatttmcatctttatgtccatgtgtacctctcaccatatacaaaaattaactcggccaggcacagtggctcacgcctgtagtcccagcactgggaggccgaggcaggtgtatcaagaggtcaggagttcgagactagcctggccaacatggtgaaaccctgtctctgcacctataatcccagctactcaggaggctgaggcgggagaattgcttgaacccaggaggtgggaggttgcagtgagccgagatcatgccactgcactccagcctgggcaacaaagcragactctgtcccaaaaaaaaaaaaaaaaaaattaactcaasatgtgctgggcatgaggactcatgcctgtaatcccagcacttcaggaggccaaggcgggtggatcgcttgagcccaggagttcaaagaccagcctgggcaacatggcaaatccccatctctacaaaaaatacaaaaatcagccaggcatggtggcatgtgcccgtggtcccagccattcgggagggtgaatgggagattgcatgagttcagggaggtgaaggctgtagtgagctgagatcgtgccactgcactccagcctgggcaacagagtgaggctttgcttaaaaaaataataataacccaagatgaattaaagacttaaatgtaagacctcaaactataaaaatcttagaagaaaacctgggaaatatgaaatactctactggacactggtctatgcaaagaatttatgattaaattctgaaaagcagatgcaaccaaaacagaaattgacaattgggatctaattaaatggagcacagcaaaagaaactatcaacagagtaaacagacaatctcccttttctaagatgctcttgtcacctccgtgtttttctccaggccttctkggcccttctggtgccagttcttttctctycctaatgatctcatcctcacctctccctcccttcctccctgtggtgtcycaccagttggtacctcctaacttctctctttccctctcagcagtcctgaagtgtggatgttttagagaatgacttaagaagtttgcagcttggacccgtatcccactcaytatcaagaagcaactcaagatgactttccctggggcatgtcagttgcctcatagcctgctggtcctgtaagcaagcactaagctccacagtgccagttccttgccccaacctggccccatccaagtacagaagaccttyctttcctcctttttccatattgctttctgttctaagtgggtgaataattttataattgaaaaaataaagataaagtctgtaaatccagccgggtacggtggctcacgcctgtaatcctagcactttgggaggctgagatgctcggccaataaatttctattgtttatgaatcacccagtctgtggtattttgttataggacatatggactaagatactgagttaaggccaggtgcggtggctcatgcctataatcccagcactttgagaggccgaggtgggtggatcacctgaggtcaggagtttgagaccagcctgaccaacatcgcgaaaacctgtctctactaaaaatataaaaaatagccaggcatggtggcacgygcgtgtaatcccagctacttgggaggctgaggcaggagaatcacttgaacctaggaggtgggggttgcagtgagccgagatcacgccactgcactccagcctgggcaagagaatgagactccatctcaaaaaaaaataagaaaaaaggccaggcacggtggctcaccaaaatgctgtaataccagcattttgggaggctgaggcaggtggatcacctgaggttgggagtttgagaccagcctgaccaatgtggagaaatcccgtctctactaaaaatacaaaattagcctggcgtggtggcgcatgcctgtcatcccagctactcgggaggctgaggccggagaatcgcttgaacctgggagatggaggttgcagtgagctgagatagcgccattgcactccagcctgggtaacaagagcaaaactccatctcaaaaaaaaaaaaaaaaaaagaaaaaagaaaagtacaaaggattttattctacagcaccaaaaaaataaaaataaaaaaacaaacaacaacaacaatgctctattgaaggagtctctgttgagtctagaatcgctgcattattttgtagtccaggtaacctctgtcctttctcagtatctgtgttcaaataaataaggtcaaactctatggagcagaagtgcccacaaaattgattgaaaaaagcaaaaaacagccaagtgcagtggctcacgcctgtaatcccagcactttgggaggctgaggtgggcagatcacaaggtcaggagtttgagaccagcatggcgaacatggtgaaaccccgctctactaaaaatacaaaaaaattagccgggtgtggtggtggacacgtgtaatcccagctcctcaggaggctgaggcaggagaattgcttgaacctgggaggcagaggttgcagtgagccgagatcacaccactgcactccagcctgggtgacagagcgagactccatctcaaaataaaataaaataaataaaaattataattatttaaagtcatttccacagttaattgcttaaggctgatgcagtttctgaaaacttcagaagcatgcaaaatcctagaatatggtatcttttaaaaggttcataaaaggactctgaaaagcacctttgaatacaggtttctagtaactttaaaatcatatcatgtaaaaataaataaattttgaaagatcacatcataggtaagaatttcccatgaattccacaattccccaagaattggactgggtaagaattcctgttgcttcaataagaaaagaaaacaactgactggtttataaaactgctaacacaagtaaaacaaaaattcatgaaataccaaaaaactttgccagattatcatgctaaatcggccaatattaaaattgtttagatatacaatttgaatgaactttatggtctaaatcaaattacctatgataacccattagttatcactgctatgcacctagattggagaagcagctggtattcaagaggacataagtccagtgttaagcatggactcatggagaaccaggacggctgccttgtccttcctgagtcctaaaaacttttgttattaaaggttctatattccatgactcatcatggaaaagataaaataatccaaattgaatatgtggacttacaaattgaggaaatagtttatttttatttatttatttatttttgagatggagtttcactcttgtggcccaggctggagtgcaatggcgcaatctcagctcactgcaacctccaccccccgggttcaagcgattctcctgcctcagcctcccgagtacctgggattacaggtgcctgacaccacgctcagctaatttttgtatttttattagagacggggtttcaccaggttggccaggctgatcctgaactcctgacctcasgtgatccatctgcctaggcctcccaaagtgctgggattacaagcgtgagccactgcgaccggccaaggaaatagtttaaaatcaatgtttggttgcatattcttgggaagacaatcaaagcttcaggtacatttggctgcgtgatgggccatttaaacatttataaagggatttcattcaattgtcattttcagtgctttttttttggttgtataaaagctttcccatgcaagagggctaatgtagcagtagattattgtgctacagtgtattttcaccagataaagaaagctttgtgtggttcactgaggacaaccctttcacaatccagaacccgaagaatggatcttctgaacatcagagaaagactgtccttgccatccacattgcagcaaaactttggaaccttgaactttgggttcataatctcacaactgagaagcgaccctccacattcttggaactgttcacccaccagaacccttaaagtaaaactaaccagagaygtcactccccagaagaagatggcatccttaatgtgaacagcttttcccaagatcacagatcaagacttctctaggctgggcgtgggggctcacgcctgtaatcccaacaatttgaggtgggaggatcacttgaggtcaggagttcgagaccagcctggccaacatggtgaaacctcttctctactaacagtataaaaaattagccaggcatggtggtggtgcaagcctgtaatcccagctactcagaaggctgaggcaggagaattgcttgagtctgggaggcggaggttgcagtgaaccgagatcgcgccactgcactccagcctgggcaacagagtgagactccatctcaaaaaaataaaaaaaggtttttctattatcgtgagactcttatccttgaatattttttcttatttatgcctctatgaacaatagaagtggaaaaggggtctattatgtgcacttatggggtatacttttatttgtaaaggagtttgcagccagccttatatatgaataaccttatactttaatagataaaagataaaggcccagtgtaggtgaaaaactttaatggtacatatgttgcctcataataagtcagaaacagaacattcattcatgtctcttaacccacatcacgagttaaagaaaacactgcctttactcttctagaaggacatcatttgttaggtcctttttccatagtttagaataaaagtggcaatacttagtatgtatccctcacaatagactctatagcagattctacttttttttgggtggggggggtaacagagtctccctctgtcacccaggctggagtgcagtgacacgatctcggctcactgcaacctctgcctcctggattcaagcaattctcctgcctcagcctcctatgtagctggaatcacaggcgcccaccaccatgcccagctaatttctgtatttttagtagagatggggtttcaccttgttggccaagctggtctcgaactcctgacctcaagtgatccgcccgcctcggcctcccaaagtgctgggattacagcatgagccaccacagctgacctttttttgtttgtttttaagatggagtctcgctctgtcacccaggctggagtgcagtggcgtgaccttggctcgctagaacctccgcctcccgggttcaagcgattctcctgcctcagcctccccagtagctgggattacaggcacgtgccaccatgcccagctagtatttgtatttttagtagagacagggtttcaccatgttggccaggctgttctcaaactcccgacctcaagtgatcctcccgcctcggcctcccaaagtgctgggattacaggaatgagccaccatgcccggccagcagagtctactttaaagggtagcattatacagcagactttaaattctcttgtgaaagttatgctgaacaatagaattcacgaaacagaaaagtacctgggctgctgttgacacttgtggcctgtggagaaatacatcaaatgtaggttacacaaattcagttgtagtagattaatgaaaagactacttagtcaagatgaagagtagactcttcatccagctcattttctatttaattttaaggtttggtgtatggggaccctgggtactccaaattcttggtgttatcctcccgatagtcataatagtctccctgatgtgctgtattctctcaaaagtttttaatgtttgtacacagccagctctaaaacatcaaatggtctctcttcaactggaatgacaaaagctaaaagaaatgtgtgaccatgaggtcaccatgacctatgaatgacatgctgagacccacaacccaaaatgataacagagtggtgataaggccctaagttttggtcacactctcacttaagtgagaamctggccaaaaagggggaatttttaaaacaaaattaaggacggccattattttggactgagctcatacactaggcctcaacagaccaaaccaaacaaaatggagtcactcgtgctaaatgtgacataatcaaactaagactttaacgaaacatagatcctagaacacaccaggttttgtttttctcctgtaaacagaacatcccagcataaaggggtaccgtctactcagttcttgttccctcctcacaaaacctactgttctactgtttcccagtgggtttcaagaccaaataagcacatttatgatggtaacagtgacatcaatgactaatgttttcatcagtctctcaaattgagaaaattatcaaaagggggaaactggccaggagtggtgccttacacctgtaatctcagcactttgcgaggctgagcaggcagatcatgaggtcaggagatcaagaccatcctgactaacacggtgaaaccccttctctactaaaaatacaaaaagttagctgggcctggtggtacgcacctgtagtcccagctactcgggaggctgaggcaggagaatcacttgaacccaggaggcggaggttgcagtgagctgagatcgcactgttacattccagcctgggcgacagagtgagactccatctcaaaaaaaaaaagaaaaaaaaagaggagggggattgttatagcaaactaaatatggcctgagaaggactccatacttctatatttgagtccttgtggatgaactgtaacctagcttaacagtcagacaacatttaaaacctcatttaggagtatgcacctgtaacaataactgaggctgggccaatcctagcagccatacttcaatcactcatagactgctgtgttcaaactgtgttcaaataaagtaaacgctaacctgtaagcaatccgtctgtttctgtacctcgctgccgatttctgtatgtcatttccccttttctgtctataaatctttttccaccacgtatctgcactcagtctctgtgaatctgctgtgattctgtgggctgaccgattcgcaaattgttcattgtccaattaaactcctttaaatttgggccaggcacctgtaatcccagcacttcgggaggccgaggtgggcagatcacctgaggtcaggagttcgagaccagcatggccaacgtggcgaaaccccatctccactaaaaatacaaaaattggcagggcatggtggcaggcgcctgtaatcccagctactaggggggctgaggcaggagaatcgcttgaacccagaaggtagaggttgcagtgagccgagattgacccattgcactccagcatgggggatggagtgagactcagtctctaaaaaaaataaaaattaaaattaaaaaactcttttaaatttaattcagctgaagtttttcttttatctgtaccgagcttaatacctgggtgatgaattaatctgt

SEQ ID NO: 93556 - DNA, 163565 bp, Homo sapiens
tcaaaatccatttactgtacaaggtgggggagatgttccccctgcaagcctattcccactgcctttgactgacagtaaaaaagtaaacttcagcctggccgtgtatgacgtgagtgctgaattagtttggttccaattaaataggatttactgaattgtgacatggacatattctagaattttaaactctttaccccaaaagtaaaaagaagaatctctactatttctgtcaagagcgtcttagaccccctcctgcagttcatcatcaccttagacagtgtccttcgccccaccacgggcaggcctggagaaggagccccgccactggaggatcatccgtctcaaggatacttgggaactgaaggagtgaccaggagcaggcagtccagtggagatcttttttttttaattaagaagcatcaaaatgaacttgagtttggcaagacctcaatagagtagccaagctggctccaagcctggtttgcatggaggggctggacttggcttgggcatggctctgtcttgggctctggggtcagcaaagccccctgcaggcctgcccacctcaggctgtggggagcgcatcagggccaccaaggcagtgagtggtctgcagctctagggatggcgacccatcctagagagccaacagctgcccccagagtactcgaaccttattccctggttcctgccttcttccctcctgggtactcagcgcctctctgctctgttggattccccagtgtccttttaagaaagtctggcagggcatggtggctcatgcctatcatcccaacacttttgggaggccaagcaggaagatgactcaagcctaggagttcgagaccagcctaggtagcacagtgagaccctgtctctacagaaaataaaaaataaaaaattagttggccatggtggtgcacacctgtgttcccagctactcaggagaacgaggtgggaggaccctttgagcccaggagtttgaggttgcagtgagctagggtcatgccactgcactccagcctgggtgatagagtgagattctgtctcagaaaaataaagtctcccctttctttgcaagttagtcatagtttctgttgtgcactctctagaaaaccacatctgttcaccaactctcttctgtgttaaggactggtgtcactttagcctgccccagaaaaacttctctttaaagagaaactattcctttttttttttttttttttttcagacggagtcttgctctgttacccaggctggagtgcagtggcgccatctcagctcgctgcaacctccacctcctgggttcaagcaattctcctgcctcagcctccccagtagctgggattataggcgtgcaccatcacgcctggctaatttttgtgtttttagtagagatggggtttcaccatgttggccaggctggtgttgaactcctgaccttgtgatctgcccttctctgcctcccaaagtgctgggattacaggcgtgagccaccatacccagccaagagaaaccattcttataccctgaggaatgatggtgaaatttcgaaattgtgacaggtatatggggttcagggatgcccagaacccccagcaatgttgcttatgcaggggatacccacccaggcatattgacatcaggaaatttcagacaactcaactcagaaggaaacaaagtgaccctccagctccttgaaaacccaagaggtgacagaaaaggggaaaggagagaggaggaaaaggcctgggaaggaacattcatcccataaggtggccaagggataccttggctggaaatgagtctgggccacgttccctggtgaggaacttttaggaatcatggaattgcacagcaggccttcagatcctgggcccccatccctcatctttcgaatggggaggtcgaggcctggggagggaaggcatggcccggagcccacacaggccccagagagcagctgaggaaggcaggtccgttcccaggaggagtctcccgcctggatggcactctgatcagcacgtcactggcctgtctgtgtgttgaactgacttcaggaagccttggggtcacaatattgcagaggccattacagggccagatgttggacgtggaagcaaggccaggccacgtcataccctgaggtgactagtctgtgggtggctaagggcagtctggtcacaggactccaattcccaaaatgccatgacacccttcacctttcctctgcagggacagtctattgtctctgcatacagggaacaggctctgaggggttaggagacaagttcaagaccccctagctggcacctgggagagctgaagcagacctcctggcccatcccatcattcccttcttcctcccatgggatgcagggagacagatgaggtgttcccgacctgccagtatagatggctcccaaactcctctgtggaacaagtcttcttcttcttcttcttcttcctcgtcttcttcttcttcttcttcttcttcttcttcttcttcttcttcttcttcttcttcttcttcttcttcctcttcttctcctcctccttctttttcctcttcttcctcttcttttcttcttcttcttcttcttcctcttcttcctcttcttcctcctcttcctcctcttcctcctcttcttcctcttcttcctcttctcttcttcttcttcttcttcttcttcttcttcttcttcttctccttctccttctccttcttcttttttttttaatagagtctcacgctgtcacccaggctggagtgcagtggcacaatctcagctcactgcaacttctgcctcccagattcaagtgattctcctgcctcagcttcctgagtagctggggctacaggtgagcaccaccatgccctgctaacttttgtatttttagtagagatggggttttgctatgttggccaggctggtctcaaactcctagcctcaagtgatctgcccacctcagcctcccaaagtgctggaattacaggcatgagccaccatgcccagcctgttctggttcctctcatggcaacagatggaaggttcaggactcaagactcagtcttgccaaacacaatgtgagacagtctcagcttcccactgtgccaccttcagcctccagcccaaagacgggcaggaaccttcacttgcaggaacggcctgaggaaagggagcccagagccagtggaggcgggggtctgcctgcgtcccagagccaagccccctcctctttcctgtatccttgttgcagcaaacagattggcacctgaacctctctattagcccttctggggcttaggctgtgggcgcatggggccatgcactaaaaatgtctttcaccttagttgggatgcaaagagacaagtttgccactaatctttcggtggagacacacatatcaaaaatcgcaagtgagcacacaaggcttcctgcagggaattgcagccttcctgctcctccctcgctgcagaggctgagcctgactttcaaaaaagggcacgcagcccttggcaaatctcggaggaaaactcactgcgagttggtgccaggggcctcaggccccctttggggatttcccccatggcctctcaaaacaagaaggaagtctgagttaaaaatggaaaatggagagaatgtcaaaggaatgcagcgttattgattcctagtggtgtctgcctgaatattagatgcaaataagtgctaataagtacagttgggaaagctaatggaaaaaccatccttcccaggaggatcgcggcacacagatgcacagtgttgctgagatggcttggctcgctccactcactggtcacggcaaagcctgtatagatgcatcccagggaaataaagcctgtgtagacttgtcgcatggaagtactcatggtccagagccccctttccagctttgaggctgggctctggaaatgggagctcctattatctccccattgcagttaagtctctctttctctctccgtgtgtgtgcatgtgtgtgtgtgtgtgcatgcatttgccctctggagtgttcatggtactgaagagattctcttgaccatcaggcctctgtggcaaaagttgtgtgctctgttccaggcctaactgcagacagggagctcatgggcagctgcccagccaagctatggtcaggaccttgggtggcaagaggggctgcaagtgtggggtaaggggaccacagggacagggatggggtcattgcactgtgagctagtccggcaagtgactttttgctcactccactctcccctctctttgttcctaccttctctcctgctctgctccaacagctttgggatgtaggatgaataagggttccactgccctgtttttcctgacacttgagtccctggcccttgcactcagctcctccaatctgcacctgactgaggcggaggagggtgatttcagacacacacacacacacacacacacacacacattcccctcatgcgtgcagccagtggagtgtgcctgggtcccagcgcagccccaggcctgggtcactccgagcctaaagtcctggaaagggaaccccagaacaaagcctatcccagtttggaatcatcacacctgggccattctccagatgcgtggagtccagcaaaatggtggcatttttgcatctcaattcgctcatctgtaatacgggagtgataatgtctactctgttgctgcaagaattaaaggaagaccatgatctctttgtcatgcttctatttatcttcttatctgtcctggtctatttttggatgctctgagcttacctggggcattaaggaggcctcatggccctggggctgaggggctccctggccgtccccaggagtggctctgctctccgcctggtgtcccccactctggtcagtcaagacccatgggcccagctcactccccaattccatcactcactctaggtcagctggtaggagtcaggccaaccagccagcaggtaccattagagaggagagagtaagggtctttcactttattaaaggcttctctgctgttgtttgaaaatactgagtgtcccttcaagactaacaggtgactgtgtgcacagtttcctccagctcctgtgagaaagcagttgccccccttcccaaggcctgcttgtcccctgcaggctggggctgcctcttcttaggaagaacaaggacccgaatccagggccccgtgttcctgtccctactctgtcccggtgctgtgtggccgtgggccggttccaccctccacgctgttttcccgagtgtgtatgaagagggtcggttggccccgctctcaggctggtgacccgacacaaacttccaggatgaagtcctgaagggagcacctgttcgcagggcactttcagcagaatctagagccccagggatttgaggatggatgcggacacccgggcctgaggcagctcgcggccttgaccgaattccacgcgagctgaagcccagggatatcccagaatcttcctcaggatcaatcttccgcctttcaccggccctgcgcccccgcagcatcgggtcctgggcgcgcgcccctgccccgctgtggtcaaggcccgccccggtgacgcctggtccttttcccgggttggcgccgcgtgcgacccaccgaggcagtggcagcactggccgcggtctggagcctagcgtcaggccggagtccggctctcctgaaccgggagaccggcgcagccccagccacgaccgctcccacccccgcggccgccggaccgcgcccagcagcgactctttctgagagcgctgccagaggggccgcgggagccgcagagcgcgcgtgggcgcggcgcccgcgagcccccgggagggccgagtgcatcgctggagcgatccccgcccggcccggccaccgccgtagccgccaccacggcggggcggggcacgggccgggggcggggcgccgggcgggcgcggcgctatttccagcctcgccggaggcttcgctctcacttcgctgggagccttcccggcgcgcaagccggatccggcagtgctgcggggaggagagaggacgaggcggcggcggcagcaggaggtgggggaccgatcgcgccgggggccgaagaggaacgccgccccgcgccctctcgctccccgcacgctccggctgccggccccacgctgctcgcccacagatcgcactgggttccgcttggagcgggcggaggcaccgggcccgagctgggtcggaggtcctctccgccgcctgcgcgccccaagcagaggatccgccgcggagaaccgctcccggactggaggcgcccgcggcctcgggtgcgtccgctgcgccaggtaagtggctgcgcccctgccccacccctgttcccgccctgcgcaggctcctggcctgcagagacgccaggaaggggtcccgagcgggccccggactgcaccgctcgccatccccgccaccgcacgcgaatgggagtccgaagctgcgggcggaggtgggcgcgcggggctcgggtctggttgcactttggggaccggccccggtagcgggaactttaattagactttctctccttggatctcactcgctgccgcgcttctgggaactgccgtccctcgggccctcttggtccctgcggactcccgctccgcctcctggccctcggtgctgcccgcggggaggcggcgtcgggcgctgagcagcgagcgccgagggccaggcaggagcgctcggggcgctggggcttcctggcgcgctcggagccggggctccggacgggttgcggcgggcagagactatgggggaagtttaagtggccttggcttcctacccagcggctccgtcgcgcgcgtccccgacccgcaactctccagggcaccggcctgtgagtgctggaggcgagtgtgcgtgcgtcagcgatggtgtgaaggtgtgtgcgtgcgtgtgtcgggagtgcgggagtcggagcctggggcggctccagggggcggggaaatgatccgtttggccgcgggaccgagccgagctctgacggcggctgcaactccggctaccgactctgcagacccgctctggcctcgctggaggccagccgggccaggagggcgatcacgggttttggcagtgcccgatgctggggcttgggtctgatgtgaccccgattccttctccagtgcgggactcccgccgccctaactttcgcgtacatcttgtctccaggcccgcgaccccgacccggagttgaagcggctgcggcgccctcggctgtgggcgctgctgcccggctgtctgttttaacccagaagtaggcgccgatcctggggctctctgtcctgcagtcgtctccggcgtcccagaggactctgcgtccctgggccactcccgctggctcaggagccgtgatcagctccgttaaggggaacgcgcgtcccggcccctctccatctgcttggcgcgatctggcgcagcagcagagcacgtgggagaggcgttgggtgcagggaggtagtagctgctttggagtggatggtggagaggggcgggggacagaggggtaagaggcagatcaacccccttttatttcccaccgccgcccaaggcccccaggagctacaataccaagcccactttcctgggtaacctttctcttctgagttcaccttgacccttgcctacctgtggggaagtctttccctaagtcctgccctaggacagggcacccgtggagcaggtgtggcagagcccttaacattttccagctgtcatgacctttcctgcccaccctgtgccctgtcccaaaggcaaggcagacaggccacaggaaggacactcatcccagcaggagatcctcttttaattttaatcaggacaccccaagcacagaaggcggcgtgggagttcattcaggagcgttcagcagactggcctctgtgaagtgacccacgggaggaataacattggaaccctgaagagagggacctcttgagggtctgaatgttggttccagtgggactggctgatcaattatccaatagcatttgaacacagaaaaacctcaaagccggaacctgacccattgcctggcccagtcgccctgggacacacaaacagtgcagctcatttatttacttatttatttattaacctggaatcagactcggcaagagtgaattatgtttcccgggtattgatttttaaaaagaccccaaattaaaaagtcaaggctttcttaaagcaaggtcaaggattaattatttatcgagaggcatccatcaggcagcgtgggggctcatttataaattgcctgagcaggcaaaatgagcatcttttgattttccttggctccagttgggagaggagagcaggctcgtctgacctcctgggcttggtagaacatccccctcggactgtaaccgacgacagaggatgctttgtaactcagcctgctgttagagatgcctttataatcttgtagccagaatatcacttgggaaatttcatgcatatttgctgtgtttccataatgaacatttactgattacagggtatccagggaatttcattttttaaacatttattcaaatctctgtttatgtaagctaataagtctgggaaagttcaaaaacgacttttttgccgtatggttgttgagaaagtgtgtctggtgggctactctcagaatttgycttcagttctcttaaaaaggggagagtcagatttgcctgattggaaacctcgcgcaggctgctcccctgctctgagctctgagttcctgccagaggcagcctgataggctttttgtggttttgctgatggaagagaggaaggggagctttgatcattgctgatgcgtctggctggagaaatttttagtgagtgcggctgtgcttgtaggggctgatggggaaggtgtggcccaagctgaggtccctggctgatgtccccatctcctgcctgctgcctggcctggaatctgagatccctgtcttagctacatctgctgctttgcagcttggaaaaacctccctccctgatttactggtgcgtggcagccacactggagaaacgtggggcagcggggaacctgtgagcaggaaagaggacacaggattatggcagctttctttctttcttttttttttttttgagataaagtttcactcttgttgcccaggctagagtgcaatgttgcgatctctgtttgccacaagctctgcctcctgggttcaagcaattctcctgcctcagcctcccgagtagctgggattacaggcatgcgccaccactcccggctaattttgtatttagtagagacagggtttcaccatattggccaggatggtctcgatctcctgacctcgtgatccgcccaccttggcctcccagagtgttgggattacaggcgtgagctaccgcgccccgcatggctgctctttagtgagcaaccgtggcaattagagccgataaacaccatgtggaatgagtggccagcctttcagctaaccagaaggtgacgagttataaactggagatttatatagtgctggcccaaggagatcaatgtgacccggcagtggcacagcaaaaaatgaaataaataagtaaatatgtttttaaaagatcggccaggcacggtggctcacgcctgtaatcccagcactttgggaggccgaggtgggtggatcacttgaggtcaggagtttgagaccagcctgacctacgtggtgaaacccagtctctactaaaaagacaaaaattagccgggcatggtggtgctcacctgtagtcccagctactcaggaggctgaggcaggagaatcacttgaacctgggagacagaagttgcagtgagccgagatcatgcccctgcactccagcctaggcgacaaagcgagactgtctcaaaataaatttttttttttaaattgaggttggtgcctggatgtagatatggcatcagtgtcctgcaacctcagaaagttggctgggcatgagcaatctgcatggtgacagcgtggtgacagtaggctgtttggtgctgtctttggcgccatattcagggctcatctgactccagagcggctgtgttccctccagaggaaacccacggacccagacaacccggggacagagctgcattagctcaggtgccagaggatgcggcagacgccatctcatttcttatcagctggaggatgtgtgaccctgtggtcagtaaatcagcatggcagatcgtgaggcttacaaattggtcatggaaaaaagttgtgacttttaccctgtacaaaactacctgtcatttgtgatgtggtgttctagcctgcactggctggattcattcccggacccttagaaactcagcaatgcagcctgggccaccgagagactggggaagcctccgtgcaggtgggttgacaccaagaagcagccctggccccattgccaaagccaccttttaggaagtcagagagtatctgtgcaataatttggatgtttgtcccctgtgaatcttaccttgaaatgtgatccccagtgttagaggtggggcctggtgggaggtaggtcatgggggtggcccctttatgaatagattaatgctattgtgaggcagggagtgagttcttgctctattagttcccacaagagctggttgttaaaaagagcctagcacctaccccctacctctgtgatctcggcacacaccggctcctcttctccttccattttaagtggaagggcacgaggccctcaccagatgcaaatgcaggtgccatgcttcttgtacaggctgcagaattgtgagccaaataagccgctttttttttccttttttttttttttttctttttagagacagagtctcgctctattgcccaggctggagtacagtggtgctatcataactcactgcagccttgaacttccaggctcaaacaatcctcctgcttcagcctcttgagtagctgggactacagatgcacaccaccatgtccattaatttttaatttttttttatagagatggggtctccctatgttgtccaagctcatcttgaacttcttgcctcaagcaatccttctgcctcagtctcctaaagtgctgggattgcagatgtgagccagcatgcctgtcctctttttttggggggggsgcgggtggggtgacggagtctcgctctgttacccagcctggagtgtacagtggtgtgatctcggctcactgcaacctctgtctcccaggttcaagcagtcctcccacctcagcctcccaagtagctaggattacaggcatgcaccaccatgcccagctaatttttttttttttttaatatttttagtagagatggggtttcaccatgttggcctggctggtctcgaactcctgacctcaagtgatctgcccatctcgggctcccaaagtgctgggtttataggcgtgagccagcacgcccgaccctttttctttatatattacctagccttagggattcctttacagcaacagaaatggactaagacagtccgtatgcaggcctggggctgggggcagcagacacagctgtcctcccaggttggtggcctgggtcttacatccgcactccgcaygtagaacaccatacatttctgggaaatagtatttcttggtgctggtgactgagggcaagatgccctttccctgccaagccatgaccagtgttggccctgatgagtgacatttatttgaactaaattagaatcatcaacgttgaaacctggagccaaatgattctcagtcccacactcctggtgccaggcctgttgtcactgtccctcgccctgcccctgcatgtttatggagcaggtattaggtgtcttgcactgtaccaggccctgkggacatgaggtgagcaaagctaagggtggtccctgcccttgtgagttagatggagaccctcctcatttattcctcattcactaattcattttctgccagacaaagacattaataaaaagaatgactaatgtgtgattctaggctgtgataaggatataaagaatataaggaaataaacactcaggtactatgagacctaccaaagagcaatctgacctgcactgagaggttaggaggacttctcggaggaggtggcccttcagctgcggtctgaaggaggagtgggaactaagcagggttggtggggagtgtgggaggaaaggatggggagagagaatccagcatgccaggcaggcacaggcaagagcatgcaaagggcttcctgtggagggaatgtgtgagagggcatgaggagcaccatctgggagctgtgggaaggcccatgtcgccagcagagtgaagaagcaggtgacatgtggctggagacccatctgtgyagggtcttcacaaccagggagggacttgggactttatcctatgaactgctgcagagtaggaagaccagcgaggctggagctgcaggaatcttgcagaaagaccactgtggccttaaataggagtgaatgggcttcccctcagacattggtctggtccatcaggctctgtctcctggagccggggtggttgagcctaatgtgcaatggagtctgtctacactggttgaaaccagtgtgtgatgtaggcagtgcatctacgctggttgaaactagtgggcggtgtaggcggtgcgtctacgctggttgagctagtgcacaaagcaggcactgtaacactggttgagcccctagttcatgatgcaggccatctgtttatactggtggatctcagcacaccattcacgccatctgtctacactggtcgaaccagtgcattctgcaagtcattctgtctaaactggtacctggctggattaggtgtgggaggggatgtggtaaggagtggtcaggatggttacccatgggacgctattgggagttgtctactccctgagacagggctgccccctggagtgctaagcacctgtccactctggctgagtcacatcctcctaggactgggtggccaggctgctggttgtgtggccccactgtgctctgagcccttggttcttccactgccttcctctcttgtctgctcaccattcagccctagcacgtccagggcactcggcaagtgacagcccagtgcccatagctccatggtggggacaagctgctcgacggccagacccatggtcctggcccaacttttgcctcctgactcattgaggatgggcctccactgggggaatggagctgaccacccactgtggctcggatgcccacttccctccggagctgagtgctgcccagtggtggtctccatgtgtgtttcatccacttagcttcctggacccctagagttccttcacctgccacctgcctgatgtaacctggcagctggctggcacctgccccagaaagaatcctctcttatacccttttcttgctctcagccctctctccttttcctcctccccaagggagccagtctctacctgttgcaccctctgggaggggctctgcccaaggctgggagctccgcagtgccctctgatgttggtgaatttcctgtggctgtctgcagcacaggtcgggccctgggttccctgcagacatcggccctatctaccaggctctgtcctccagagctggggagcagggaagcaggtctgtgagtcaccccatttcccgttgtgcccatgctgctggctgcaggccctgagctgagtggccaccgagctgcaggcaacagcccaggtcgctgtcaccttgtcctcactgtctgggcctgagccagctcctccctgactgggccagactcggggacaggagggaagagagctaagcagaggatgctaggagctgcacattactccttggtcccctaggccccctcccagggctgattccttgcccagagggcggcctctccagatgagccttcctgggctggcctggccactccattctgtctgttgccttcaccactgtggacccctggacatgcccagatgcttatcagtgggaagctgacacaggagagcccctctgccagcagcccctagcccgggcacagactgactcgcacttggcagacaagtcgtccccaccttcgaggctgcctttttgggggctgactcatctcttgggacaagactcatcagcctaggcttgcagcactgagaccctcctccagccttgagctgcaggagctttgcttcctgtgccgcatccaggcacccagcaaacactgaccctgacctgccatatgcagagcctcgtacacctggccctggagaagttgagcaaacacaagcaggttacagtgttggtgcagatgctgctctttctggttgtgttggccaggaggagctcggcatggagaaggtactgagcgattgcttgtgggcaggcagagtgcattaaactgtgcagtctgtctacttcagcatagccggtgcgtggggaaggcagtctgtctacactggctgggccagtgtgtggtgcaggcagtctgtctacactggtggggccagtgcatggggcaggcagtccgcctacactgacggagccagcacgtgggtcaggcagtctgtccacactggtggggccagtgcgtggggaaggcagtctgtctacactggctgggccagtgtgtggtgcaggcagtctgtctacactggtggggccagtgcatggggcaagcagtccgtctacgatgacggagccagcacgtgggtcaggcagtctgtctacactggtggggccagtgcgtggtacaggcagtctgtctaactgacggagccagtgcatgggtcaggcagtctatctacactggctaagacagagtgtggggcaggcagtctgtctacacttggttgagtctagggcatgagcactagaacattccatgtagtctgtgcttgccccactctctgtggggtctttgcacaaggttcagagctctcaaactctgtagattcagtggcttttcctgtggctgagctcagcctgggtccgggcttcccctcagatgttggccacgtccatcaggctctgtctcccagagctggggtggtcaagcccagtgtgcaatgcagtctgtctacactagttggaatcagtatgtgatataggcaggctgtctacactgattgagccagtgcaaaaagccggcgctgtctatgctggttgggctcagcatgtgattcagcaatctgcccacacaggttgagctggggcagccagcctctctctggcttgctgaggccagagctcttggttctttctgacaccttccctttttcctatgtgattctttctcccgggaatattcctccttacacctcctatagacatctgggtctgatttgattctgacttccaaagactcagctttcgtgtgtctgtttgaatctccttggcagaggctgacatgggctgggagtggcactgggatcgcacgtggatttcccctccctgttgctgtgcctggggctgggcctgtgctggtgcagaggctacctgctgtcagtggtcatcactaccttgccatccctcgcgacagccactcacacgcctctttctcacaaaagtcatttagcgaggattaccaccttggtgtgcgtggtaaattgcatttctcctggttggggccatcttgctgtttcctgcttagatttggggcctcatgaggtttggcctcatctgcaaatttaatttcatgaccattcatccctgtgaaagcacaatctatgcctattatttcactcttcttgattccctcttccacgagttaatgtgtcagcgcacagccatggcaaccactccccgccctccctccaccccaggcagccacctctaggttgyggctgaagctgggacctggagtcagaccacctgggttcaatcctagccttaccactcggtcactgtgtgggctagggacccagtttcctcatccacaaaacggggttaacaagagaatccacctcctagagctgttgtgcctaagagtccacaatcagtggcagctgctactgctattattactattattattactactcccgttttatcttgggtgtcaggaagcatattggtcaagggccttgcctggtgatgtgacagaggcttagggggcaggcagccccactggccagtgtcccctcaagttctgctttttcttttcttgtctctctctctctctttttttttttttttttccagacagggtctccctctgtcacccaggctggagtgcagtggtgcgatctcagctcacagcaacctccatcccccgggctcaagtaatcctcccagctcagcctcccgagtagctggaactacaagctcccatcgccatgcctggctattgttgtttgtttgttttttggtatttttagtagagaaaaggttttgtcatgttgcctagtctagtcttgaactcctgagctcaagccatccacctgcctcggcctcccaaagtgctgggattacaggtgtgagctgccacacccagccaaatcatttttttctaagcagtttgctaatgatgtcttcttcttgtcctgcatgcaccattgtacatatttaagccttttattccaagtgtagtacacatacagaaaagcgaacagatcctacgtatacaatgcagtgaatgtctgcaaactgagtgtgctgtgtacccagcactggagcagggatcagaacatgaccaggaccccagaacccccccatgacctcttccagtcattcccctccaccacagaaaaccgctccccttacttctaacgatatggattggttttccttgtgtgtgtgtgtgtgtgtgtgtgtatgtgtgtgtgtttgagatacagtctcactctatcgcccaggctgaagtgtagtggtgcaatctcggctcactgcaacctccgcctcctgggttaaagtgatcctcctgcctcagcctcccgagtagctgggactacaggtgcatgccaccacacctggctaatttttgtgcctcagcctccctagtagctgggattacagacacgcaccaccacacccagctaatttttgtatttttagtagagacggggtttcaccatgttggccaggctggtcttgaactcctgacctcaggtgatccacccgcctcggtctcccaaagtgctgggattacaggcattagccaccacacctggccccttgtttttaaacttaatagaaatggaatcatgcagtatgtatgctcccatgtctgggtcagcatctggtttctgagattcatccatgttgttttgagttgtgttatttgttccttcctctttgtacaggattccatcatgtgggtagaccctaatttattttccagtttcttgttgattggcatttgggttagagtttttggcttttatggacagtattgctatggatattcttgtgtgtgtctcttagtgatatgtacacattttttccttttttagagacaggatcttgctctgtcatctaggccagagtgcagtggcgcaatcacagctcactgcagccttgaactcctgggctcatgccagcctcccgcctcagcctcccaagtagctgggaccacaggtgtgcaccaccatgctggctaattttttatttttatttttgtagagatgggggggtctcactttgttgcccaggctggtcctgaactcctgagctcaagtgatcctcctgccttggcctcccaaagtgttgggattacaggtgtgtgtcatcatgtccagttcctgcacattcctgatgtacttagaagagaattgttgggccccagggtgcaggtactgttgaacagttttctttttcgtgtgtgtgtgtgtgtgtgtgtgtgtgtgtgtgtgtgtgtttaagacaagatctcactctgttgcccaggttgtagggtagtgacgtgatcatggctcacggcagccttgacctcccacgttcaggtggtcctcctgcttcagcctcccaagtaactgggaccacaggtgtgcaccaccaccactcccagctttttgttttgttttgttttgttttggtattttttgtagagacagggtttccccatgttgtccaggctggtctcgaactcctgggcttaagcgatcctcccgccttggmctcccaaagtcctgggattacaggcatgagccaccactcccgactccattgctggactgttttctaaaggggtcgtactgatgtttccacctcctcaccagtatatgcatgagtgttccgtacgtaactytcccactccacgtcctgtccaatacttggcattgtgagtttttcccattttagccattctatgagtatgccgaggtatcacaccgtggttttaattttatttctcagatgacgaatgcagttcatttttttaccaaggatattttggacctggaaacattattcaacaaatttgaaaatttcctttcgtccccaaattgtagaactcacttccatccccacattgtggaaacgtctggcrgtgcttctgatttcttctgggcgggtttgaatctcccaggctggaagccaagggatggagtagacaagagtttctctggatgagtctggggaactggccacctgccccagaatcacgtgggttgctggtcagagatgcaggtgctgagccctggcccagccccggactcatcagacagcccttgacccattggtccttctagggctgttttttttttttcttgtcacgaaaccaaaaaaaaaaaaaaaaaaagcatggatgctgccctttctgtcatgtccacggctgtgtcacaatgcccagaatagtcctgcacagggcagacctgctgggttgaagggtttcccattgttgtctccatcctctcccaccccagctgacttggcggggactcgttagtcaactgggctgccgtggtgagggctctggaagttggtttctcgctcgctggggggtgtcccatgtctgaatgacctcctccttctccaaagccaacttccaacagagctgcagccgtgcccccagcagccttgctcacccccagtcctctaggcactggccatttgagagcctccttgggcgacctcctccctgatgatgcatgtgttattgggtccctctggagaagcttaggagccccctgatcccccgaaaagaacagcaatccatccctgcaccatgcggccccctgagcttttccaacaccgtcttttcatagatgatgtgcccttggtcaaactaaggcagaaggrccattcctgtcatcagctgctccactcctgcccctcagcgttttcatgaagaccgtggtgaagcctcctttctttgggtgtggcttgcccctccctcctcaagtttagcagaactactgggaaagcaggatggcctgggggaggagagctctgggtcagaccctttgggtggttttgagacccagtcactgccacaagaggagggaggcagtttcgtatacacaaccctgacttagctagcagggagggagggcaagggatyctagctgggattcctcctgtaatgccagctctttgggaggcccaggcaggaggatctcttgagcccagaagttggaggctgcagtgagttatgatggcacctcctccacagaggagggaggcccaggctaggcctcaaagatgggtgggggggtgacaacacctcatggaccactcagcatgagctccgtccctgagggccagcagtggaaaaaatgcgggcttagttccccggagatactgcggtccagttgacccaccacacaagggcataaggcgatggtcagggttcactggagagctatggaaggcttcttggaggaggcgagctggggattgcttacctcaaaggccaggggtgagaactttatcttggtacagtggaaattctctccaagctttgggactacagtgcatggacagtgtgagccaactaccgtttgctttaaaatagggcaaaaatgaatccatggcgcacacattgtttatgcgatgtggaggcgggcgcgcaaagacggaagagctaaaagcagtttgggaaaaacaacacttttttttttttggtgggaagacagattagagaggtttatgcttttctgtgataactaatatgaaaggtttatcaaagttaaaaaaaaaaaaaaaacctcttgacgctttctccaaaattgatctgaagacttggcagatttgaggaatcattcagtaacgttttacgagtcgatgctaatttgatgcggcagacctgtgcatcgcgccaatttactgccaaaccaacattaagcacggacctctcgcgcaaggtttataggcagacagctcataaagatgcatgcttgacaagtattctgcttctcttaggatgtggaatatgaagtgtttatcaaaaaccacctaaatcgcccttgccttgactcgtaaacaacctggcggcttcaggcttgggccctatgcagtatttcacgtctcaccactacgggtcctggtatgtgcgtgagtgcctgagtctttgtctccagaagccacagttagaggtagaagtgttacaggaaaggggtcccgatccagaccccaagagagggttcttgggtctcgcacaagaaaaaattcgggcaagtacataccgtaaagtgaaagcaagtttattaagaaagtagtccgggcgcagtggctcacgcctgtaatcccagcactttcagaggccaaggcgggcggatcacctgagctcaggagttcgagacgagcccggctaacatggtgaaaccccatctctactaaaaatacaaaaattagccgggcatgggggctggcgcctataatcccagctactgaggagactgaggcaggagaatcgcttgaacccgggaggcgaaggttgcagtgagccgagatcgcgccattgcactccagcctgggcaacaagagcgaaactcagtctcaaaaaagaaagaaagtaaaggaataaaagaatggctactccatagacacagcagcccccaaccactgctggttgcccatttttatggttatttcttgatgatacgcaaaacaagggatggattgttcatgcctcccctttttagaccatagagggtaacttcctgatgttgccatggcatttgtaaactgtcatggtgcttgcgggattgtagctgtgaggtcgaccagaggtcactctcatcaccatcttggttttggtagcttttggctggcttctttactgcaacctgtttcatcagcaatgtctttatgacctgtatcttgtgctgacctcctatctcatcctgtgacttggaatgccttgaccatctgggaatgcagcccagtaggtctcagcctcattttacccagccmctattcaagatggagttgctctggctcacacgcctctgacagaaggatccctgtggggtgtgagatacctaaagaaaggttcgctttcttttttttttttttttgagacggagtctcgctctgtcacccaggctggagtgcagtggcgggatctcagctcactgcaagccccgccttctgggttcacgccattctcctgcctcagccttcccagcagctgggactacaggcgcacgctgccacacccggctaatttttggtatttttagtagagacgatgtttcaccctgttagccaggatggtctcgatctcatgaccttgtgatctgcctgcctcggcctcccaaagtgctgggattacaggcrtgagccaccgtgcccagtcgaaagtgaacctttcactgggtgtggtggctcacgcctgtaatcccagctctttgggaggcccaggcaggaggatcgcttgagtccagaagttcgaggctgcaatgagctatgatggcaccactggactccagcctgagcaagaccttatctcttaagaaaaaaaaaaaaaaaaagaaaggtcccaaagtgtaggatctgaagcagcatgccccctcttccaggaaggctcaaacatccccttcctaacagattctccaaggctgccctaaaaggaaataaaggctgcgcccaaatgagatctttggccccaaggagatagatttcttgctctcatgtttgtttcctgggcgactgtgtgatggatcttccctgcatagctctctccatccaaatatgctgtcagagcctcaccaatttcaggatatcactcgagctttgttttgctggtcggaaagtgtttaacaataaaaattatcaaaactcctgtctttcaccaccgaacaccaccgctgacgttttcctcaaaggaaaagtggacttgtgtggcattattctactgtatctgtgcctccagcccctccagcctcctcccatggcagtgttaattacccaagcttaaacgaagaaggttgcaggtgggggcaaagcatgcagaccgctgtcagcacaaagcctcgtgggttttcgcaaggggaaatttgatctcgggcaaatgtcaaggcgtttttgaaatctgtgttatgatatcagctcattgccagtgtaggacttcatctgaatttcataaatattgtatgggactccctcattgccaccttggccggccacagtgcacaacagccacccctcagcacacacacgctctccatagcaattgcaatctatcgctgagttgtcatgaaaagccaattggtgatatttcaatcacaatgttcttgtaaccaattccattcaaattctgtcggaaagggagttaaggcttcatcctgctgctgggagaatgatatgctaaatgtagcttcctggggccctggcagccagccagggctttgtaatttatagttcaccttcgtggttctccaagtgaccttggaacctgcatgctggtggattttttaggttcacacgttgtcctccatcccctggtgagattgctccccaagtgagtgctccctggtccatcaggcaagagcttgagggagaggatgtggatggggggcacccagagaatgcatggctggggatcagaagatttcttgttgctgctgacctttcttctaaaattgctgtcagccaggaaacagtcaaatattgtgcttaaaggtggcttgcaggtgacaggagcctctctccagtcctagcacacagcaggtgatcctgaccaaaaaaaaaaaaaaaaaaaaaaagaggaggtacaatatgcgattacgttcatcagctatttttggctgaggaataaacaaaatggcccaaactgctgccattcgagattctagcaggggagtggcatgtagaaaagattaatgtacagttaaaacccgtgtacgggtaaattacagggtgacagctatctaatgcaaacactgcagacgtgtaattaagaggagttacagcgctcgaggatgaatttgctgagggaagtgctagggtgctgtctggagcccaggggcaggggcatggcactgggatggtgtgggggctgcagaggtggccaggaggagcctctyagcatcggggcagccttgtaaccataacaggtccattgcctgatgcacgcagcaagtcaatgtgctaagatgccaggttgcggcagaaaaagaggattaatggtaaggtcatggaacgaggagatggcagacaacctcaaatccatctccctggggaatgtggggttaggatttgtaagttttggagtgggtgaagtgtggagatcgttgatgggtggaagagtgcagggtaaagtcttgggaccgggagaggaagaagctgtgttctcaggctgatccccctcctctgtagggggtcctcaaactgttgggggcaatttggggtcttttcaacatcttaagtgaacaaaaaccttatgattctaaaatcaggggtcctgtctatagggacaatggagaagcaaatcaaattttttttttttttttgagacagagtctcactctgtctcccaggctggagtgcagtggcgcgatctcggcttactgcaacctccacctcccaggttcaagtgattctctggcctcagcctcccaagtagctgggactacaggcatgcgccaccatgcctggctaatttttttttgtagttttagtagagacagggtttcaccatgctggccaggctagtctcgaaatcctgacctcgtgatccgcccacctcggcttcccaaagtgctggaattacaggcgtaagccactgcgcccagcaaagcaaatcaattcttacaccattttatgaccctaatgtcagaaatcttacctataggagcaatgggggtgaccacggccaggatctagcaccacgtgactccttgccacaaggaactgggccagagtgcagcctgattaatgcttaattataactatatttctgtccagaacctagcgtgcaattcttgccaaccctgtggggacagtttcaatctgggatgtggtggaagccatggctcctttgggtggctcagcccacctctccaggtctgtccgttcctgttccaagcttccagccctttctggagctgccctggtctccccgacctctcactcacctttggctctgtggccttgagagcccatggatgtcttttatgtttttaatttctcctgctttgtcagctttctgaggaatatattacattatgtggaagttggatgctaacaagwtttgtatgaataaattagactcttaacttttttatgttattacaaaattgaaatggactctaatgacagtcggaattaatgttctgttgccaataaatgccggggatgtgactgaatcttcagcgcactctcctcttgcatctctggcccttcctgggtggtcttgcccaagaaggaacctccctcctccttccagcgaagtggggtgctccacgacgcctccctgctggcccctgggtgatggccaaggtgctgctctgcccaggtgtgggggctgctgggaatatctgctgctgatgctcccaggggcgccccgggatgggaactgccctgggccccagggagctccttgcccaaagtcacaccccatcccaccgccagggactgctactgctgtgggatcacaaaggcccagccccttgtctccatttgggactgccctgaaggtccctcccagcaccagagcacctatgggatgggctgagtcctcagctgagaggcactgctgtcggcttctctctctgcctgctcctgccctcctcagctcctcgcaggtggctgtcccgagagcccttccctacaaacctgtctgcaccgtccatcccagagcatccaggcaactcagcccaagatcctggctcttagggacttacctgttcctaaacccatggtaggctgggtgagtcctcttctgccaggatcagagtcctcggggaacaggattgctgtttctgscccgagaccccttcttgaggtcaggactgggggtgaggcactgaccagcttctcagtctcagcctagatctccgccccaccaccccctgggcagggtttgaggagcagcagggttaagggctcccccagatctgagctgccacacctcagcttgcggtgaggagttttctgcaaggaaacttctrtctccccaggggggcaaggtggcacaccggctggggattggtggtgtattggaactggttcccatagctgaagatggaagggaagaagggggctggtaaagtagggagaaggagcctcagatagcccagaaatgagggggttctggacagcccagggtggaaaatttagctacccttggagtcaggcctcagggcaaaggaggggtatggtctgggatgtcgggggcggtgtgtggggaggggggacctgctgctttggaagggggcagtgggactcccgctgtcatcgcagaaagggatgagggtttccagggtggccaggtattcacatattcaagaacacaggtccatttttatatgaaatcgcttcccctctgaagtctggagactaattcagaatttaaaaccaaagtcctacgctgaccaaaccatatgtctgtatattactttggcctctgggcctgaagaatttggagtccagaacttcactgacaaggtggatgatttccgcctggaggatgagggcctggggcctagtgtctcaccagagccctggaaagggacaggaaccaccaagaccacaggccatggctgcagggctgtggggctcagcacccactgactgtggcctttgttctgggacatccctgtctgctgggaaggggtcaaagccctcacctctgggactgcagatgggtgggcgactggctgggctctgtgtgcctctggagtctggcccactcccccaggaccccgtggatgagtgggcagcagagggcccccccccactccacctcccacttccaaggaatctgacctcagcattctagcttccaccttcataagtctttttttttctttttttctgagatagggtctctgtcgcccaggctggagcgcagtggcacgatctcggctctttgcaacctctgcctcctgggttcaagcaattcttgtgcctcagcctccctagtagctgggattacagacacgcaccaccacactcggctgagttttgtatttttagtggagatggggtttcaccatgttggccaggctggtcttgaactcctgacctcaagtgatctgcctgcctcagcctcccaaagtgctgggattacaggcgtgagccactgcgcccagccaggagtcttaaagattccctgcggaaatgcctttgcaagagcaaaaagaagattaaagtcttaccgtcctttgaatccttctggctctggtgttggcatacattgtcccagagaaggggctaccttacgtctctatcgctytatatacgtaaactcgtaaatcattttcattttatcaaaatgcaataatctttatgcctaccgcacataacctgtttaatcactttgcatatcatgaattcttttccatggtgatgaatctgtttctgtcttgcttttgacacctacacggcatccctttccatgaatttatcataatttatagaaccggttccttgttggacattttgggggttttcgtttttgtttttcaattttaaagcatgttgacatgaaccttcttgcagtatacctttgtgccatcccagcataaattcctagaagtggaatagttgtctcaaagggtatgcccgtctttaaaacttttagtacttcccaacaaatcaccttccagaaagaccaagcggtgcgtgagcgggcctattttttctcataatcacaaccgcactgggaatctttgttttttattttttaaatctgtgtcaattagataggttaaagaggggcgtgattattgcctttttaacatacattttatttttaccaaagtcatgcatgtgcatagcttaagaaggcataaataataaaaaaaaggcttttaacaaatctaccagttctctgctccctccctccccagctctcctgagcccgtgttctggaggcagccacctatgactcttctagccatttccccagcaggcactgcagttctgcctccatatttctaaataacacacatatgccgcaggtgcgaaatggccagccagttgtaccagcatcatttatggaacattcactctttgcttgctgatttttaaatgccaccttgaccatttgcttaattcctgtgttaactagggcctcttctatactcttctgttctagcctgactcttctagtcccagcacccacgattttaattatcgtagcttaggagcgcatttctagtatcttaggaggcagatcccctctattatgattcttgtgtgatatcacatttttattattttggatgtagggcgtcacatttcaaataatatctagcgaagattagtgttaggatagtgtttcacttacacataaatttaggataagtttactatttatccttacaaataaggatacattgactcctttactttatttatttattaattttttattttttgaaacggagtctcgctctgtcacccaggctggagtgcagtggctcgatctcagcccactgcaacctccacctcctgggttcaagccattctcctgtctcagcttcccgagtagctgggactacaggcacctgccaccacacctggctaatttttgcatttttggtagagatgtggtttcaccatgttggccaggctagtctcgaactcctgacttcaggtgatccacccacctcagcctcccaaagtgctgggattacaggcatgagccagtgttcccagatttactgtatttattattattatactgggtcttctgagctgatccatgtactcaacaaatatttatggagaacaaagtgtgtgctgggtgcatgtcaggtactgttctaggcactgggggatacagcaggacgtgaagcagaggtgaatcccagcccccatggagtcagtgttctggtaagggcagcagacagtgaacactaatatacttaagtatatgatggccgggtgtggtggctcatgcctgtaattccagcactttgggaagccgaagcgggaggatccctcgaggccaggagtttgagacaagcctgggcaacatagcaagactccgtctctaaaaaaaaaaatttttttttaattagccaggcatggtggtgtgcacttgtagtcccagcaacttgagagtctgaggcgggaggatcagtcgattccaggaggtggaggctgcagtgagccatgactgtgccactgcactctagcctgggcaacggagcaagaccctgtctctaaaaaaataaaaaataaatgaattatgtagtgttagaatgtggcacttgctttaaaaagccaagtaggctaagagggattggaagtgtggggttagggaggaagggaagggtcaaggtgggcctccctgagaaggtgagatgagattagaggttgggaagatgtggaccatacagatggtctaggccagtggttctcagcctgggcgattgtattcccaggggaatttggcaacagctggagacatttttgatggtcatgactcaaggatgctcctggcatctggtggctacagcccagggacactgctaaacactctacagtctataggacagcccccatgacagaggaccatctgaccccaaatgtccgtagtgtggaggytgagaaattctgacctgggtgaagatgagtgtgggcagagagggcacccagtgaaaggaacggcgaggaagtcaggagttgggggacagggcccgctggagatgaggccgtatgggggcgggggacagagatgtgggccctgcagaacagagtacagagtaggaaattcgactttactctgtgtgcgtggggagcaatggcagggttttgaacagagaagtgcaatgattgaaattatattttaaaacaggttccctgttgctgccatggtaaggggcaaagaggcctggcagtgggagaggatgatccagccaagatgctggcagtggacgtgagcagatgggttgattctagatatatttgaaggcagagccaacaagatttcctgatgggttagatggggtgtgaggaagagatagcttttggtctgagcggctagaaggatggagtgacccacagctgaggtgggaaagagtgggtggaacagctgttggaggggcttaggctaaacattcggtgaaggacatacaggatttaggatgtccagtacacatgcaatggcagatgttgaatatttggttggatatacaagtttggagttatggagagaggttagagctggagatattataccccaatgggttcttcttattggctgcccagaaaagccaatacacagagaagagcaggagtattacagcagaaaaagagtttagtgagggccaggtgtggtggctcatgcctctaatctcagcactttgggaggccatggtgggtgaattgcttgaggccaggagttcaagactagcctgggcaacatggcgataccccatctctacagaaaatacaaaaaattagctgggcatgctggtacatgcctgtggtctcagctactcaggaggctgaggtgggaggattgctggagcccaggagtttgaggctgcagtgaactgagatggcatcatggcactccagcctgggagacagagtaagactctgtctcaaaaaaaacaaaagtttaataattgcaaggcaatcctggcagtagttgggagataaattcttaacctgccttcctaaaaatttggaggctagagtctttcaaggatagtttggtggacagggtactagggaatggggaatgctggccggctgtgttagggatgraattatagggggtagaagttatagcttcttcatttattgtgctatgacagtttccgggtgggggtcacaagatcatttgagccagtttcttggtatgggttactggttcaggtggcaccagctggtccatgggaaagcaaggtctgaaagatacctcaaacactagtcgtaggttttacaatagtgatgttatctacaggagcagttggggatggtgtaaaatcttttgaccttgtggctaatttgttagtttcacaaaggtggctttagtccctgagcaaggagggggttagtttcaggaagggactattgtcatctttgttttcaagttgaactatgggccaggcacagtggctcacgcctgttatcccagcactttgtgaggctgaggccggcagatcagttgaggccaggagtttgaggccagcctggccaacatggtgaactcctgtctctactcaaaatacaaaaattagccagacatggtggcgtacacctgtttgtcccaggtacttgggaggctgaggcaggagaattgcttgaacctgggaggcgggggttgcattgagccaagatcgctcccttgcactccagcctgggtgacagagtgagactctgtctcaaaataactaaataaaaataaataaaataaagttaagctatgagctaaattcctcccacagttagcttggcctatgcccaggaatgaacaaagacagcttgtgaggttaggagcaaaatggagtcagctatcagatttctctcgcagtcgtattacaaaggtgcaaaggtggtttcagagataatacatttgggagtcatcaacatatagatagtttctaaagcctgaagactgatcgaggtcagcgagggagtgcaaatagagacacaaagaggaccaataactgagagcgggaatattccaacgcgaagactccagggagatgaggaagasccaaagcaaggcaagaagggaccagtgagacaggaagaaagcaggagactatcacgtcctgggagccaagtgaggaaagtgcaccacagaggaatgcatggtcccttttgcccaatgctggtggcaggccaggtgggtgaggaccaagggctgatcagtgggttctgcaatgtgctccaggcaagaatggctttggtggaacaaaggtctgattttggtgagtatatgatagaatgggaagagagacactggagattgtgaatagggataactcaaggtgttttgctgcaaatgagggcaaagaaatggggagataggcttggtgcggtgactcacgcttataatcctagcactttgggaggcggaggcgggtggatcgcttgaggacaggagttcgagaccagcctggccaacatgatgaaaccctgtctctactaaaaatacaaaaattagccaggcatggtggcgtgcacctgtaatcccagctactagggaggctgaggcaggagaatcacttgaacccgggaggcggaggttgcagtgagccgagatcatgccactgcattccagcctgggcaacagagtgatggtccgtttcaaaataaataaataaataaaataaaataaaaaagaaatgagaagatagctgctgagggaagaggggttgaaaggtttttgttttgggggtttttatttttttttttaggattggagaaatcacagtatatctgtatgctgatgagactgatagaatagaatgtgaaaaacaggtagttcagaggggagaactgyttgagcccagtccttgagaagcttagagtattggagctggtggatgtgggggattggccataggtagaagcacagacaattctcgtagggtcaaagccgggagggcagaacagtggatgcaaatatggtcactagggtctggaagtcctctctctctctctcctctgtgtttctctctctgttaacagctttattgagacataatcacatacctcaccattcacccacctgaagtgtgcaattccatggttttcagtatgttcccagtgttgtgcgcccatcgccacagtcaattccacaacattttcatcactccagaaagaaaccctgtgctattcacagtcactccccttccttcctgcccagtcctaggcaaacactaatctgttttctgtctctatacatttgcctattctggacatttcatgtcaattgaatcctacaatgcgtggtctttttttccgcttagcataataatggtttcagggttcagccatgttgtattaaaagtactcccatctctaaaaaataaaaaattaaaaaaattaaagttgactgggcgtggtggctcatgcctataatcccagcactcttggaaaacggtctagcaattcctcaagaggttaagcatagatttaccaaatggcccagcaattccactcctgggtgtatacccaagagaaatgaaaatatatgtccccaaagactttgtacacgaatgtgtacacagcagctttattaataatcgccaaaaggtagaaacaacccaaatatccatcaatagatgaatggataaaatataataataaatgtgtatatctgtacaatgcaatattattcaggcgtaaaaaggaatgaagcactttttttttttttttttttgagttggagtctcgctttgtcatccaggctggagtgcagtggggcgatctcggctcactgcaagctccaccccccaggttcacaccattctcctgcctcagccacccgagtagctgggactacaggcgcccgcaactaagyccggctaatttttgtatttttattagagacagggtttcactatgttggccaggctggtctcaaacttctgagctcaattgatctgcccacctcagcctcccaaagtgctgggattacagacaggagccactgtgcccggcctgtctatccttctgatcacagccatcctagtgtttgtgtgctagtatttcactgtggtttgggtttgcatttccccaatgagtaatgatgtatctcattggggatgcatcttttcacatgcttatttgctacttggatgtctttggagatgtcagctgaaaaaacacatgatttatagacttagaaaggagaactttatttcttaagaaggggttcacaacctacaggccggaagcgcagcctccacctgaaaaccgaaagcaagcacttcgagggagggcagggtggaacaggaatttatgctgaacgggctggccaaatacgcatattcagcaagttacaggaagaactatgaacattcatgaggggggtctggacgcatacatactgaacaaacatgcacgttacatgcgtcccatgtttaccttgtttaccttaggtagcagactttgcatataaatgcattacagttaaaccctacatgtcaaaaggacatgaaggtattcagtgcacagcagcctctgtaaaccggccagaaccaggccatggtgggtagtctcttattaggagaaagttactgaaatcagtctcttgtccaatcaaagctgcagttatggctggtaaatcagaggggtagggggtcagttagtgcctggcggtgggtaagctgcaattgtttcagtattgtttatctccaaaccagtgcttgtttagctgctagagaaaaagaaactcctgtggcagttagagcatagtttacttttataaatagtagtataaaaagtgtaggggtgtgtgactttatccttgcctggcatggccttaggtaatgtttataacttggtgtcttactgccacaaagagtctgttctgtgagtcttatgatctctgtgttaatgttcatgctggtcagttgttgtgtctaaaccacaaaagggatgggagtcctgctgtagtcactcttaggagaggaagtctaacggtggttagcaagggagaggtgtgtgtccaacctcccgtcccagcatggccaggaacccagtttttaagatttctctgggttcctcttggccaagagggggactgtttattcagttgggggacttaggattttctttttagttctcagagactatctattcagatcctttgcccataaattaattgagttgtgagactatctattcagatcctttgcccataaattaattgagttgttaaattttttaaattatcargttggaaggatttttttaatctattctggatacaagtttcttttttttcttttctttttctttttctttttcttttcttttttttttttttttttttttttttttgagacatagtctctcactctgtygtccaggctggagtatagtggtgtgaccttggctcactggtactttctcctcccaggttcaaaccattctcgtgcctcagcctcccaagtagctgggattacaggcacccgccaccacacctggttaatttttttgcttttgtttttgttttatcttgagacagtcttgctctgtcacccaggctggagttcagtagtgtgattttggctcactgcaaaccttcgcctcccgggttcaagcgattctcctgcctcagcctcccaagtagctgggactacaggcatgtgccaccatgcatggctaatttttgtatttttagtagagatgggggtttcaccaggctggtcttgaactcctgacctgaggtaatctgcccacctcaacctcccaaagtgctgggattacagacatgagctgccacacctggccacaagtttcatattaaatatatgatttgcaaattttatcttgttctgtgggttgccatattttcttgatggtatcatttgcagtacaaaagttttcaattttgataaaatccaatttctcttatttttatttgtattgcttatgcttttggtattgtgtctaagaaagtctaaacccacctaaggtcatgaagattttctcctttctgttttctactgatttatgctttctatttaattttcatttctaggtgaattggcaagtattttccggacaatgttaaataacagtgggcttctcttgttctattcctgactttaatatttcaccattaatcatgattgtatctatgggatgagatcttttaaacttaaaaaaaaagcgtcctatattactagtgtttataaataattaaggactcttttacccccaaatgtatttaatctatagacataaatgtgtttttttctcttttgatctatttatgcagcaaaccatgttaatatttataatatggctaatattgagccattctgtaatgcatttctgaattaaatcttaatttgttggtgtacataattatttcatcatattgcttgttcaatagccaataggttttatcatttccttgtgattctttgactcatgaattatttggatgcaaacacttcaagagcatttttttctcttctgtttttgaaaaaacaagtttctaattttattgcattgtggtgcaatgtgataaaattgcagagattgtggtgtgcatgctattgattatttaattttagtggagaattcctttgtgtcctggttagtatatgatcatttttctgtcccattatgttggaaataatatgtctcctctaatagttgcgttcagaagtctatatagatcggtacctatatacattctttaactcagtcttgtatattgtttgtatcttctatattcttaattttttttggctgcttaatttatcaacatcagagtgagatgtgttaagatctctcaatatggttatgaatttgttcattttctttgtaatcttaccaactttgactatatttttttgtaaagcaatgttattaggtgcatataggttcaagatgattatgccttcctagtgaattatttcctttttctttgtgtaataactcttttaaatcccatcaatgcttttttttggccttacattctattttaccatatattaatattacaaaacaactctgtctttgttattttgtctttggtatgttgcttcactttcaacatttctgtgtcatcatgttttgaaagtgtccctctagtaagtttagttggttttctttttttttgtggttactggtttatttatattttctctctctttttttttttttttttttttgagacagcttcttgctctgtcatccaggctggagtgtagtggcgcaatctcagctctctgcaacctctgcctcctgggttcaagcaattatcctgcttcagcttcctgagtagctgggactacaggcgcccagcaacacgcccggctaattcttgtatctttattagagatgagttttcaccatgttggccaggctggtctcgaacttctgacctcaggggatccgcccacctcagcttcccaaagtgctgggattacaggcatgagccactgagcccggactatattttttcttttttctgttttattttgtgtttcctacttaacttgctttttcattgtttctttttaaaatctatcctgctttctaaaggattgattgtatgtactttactcttgttttagtccgtctgctggtttggaagttacacattctattttttattctcccagtgtttacctttatgttgctaatatacrcacttggtttaacccaatatgatttaaataaaaatgtctactttcctccaaaacaacataatgatcttggaacactttaattctgatcatactcccatcctatatcttttgttgtctaattatagtaccatattatttataaactccccaattttaaaaaatcattattactgttgattatttcaacttacagctgtttaccagtttcttttctcactcttgcttattgcattctactcttttttgtgtgtgtgagagttcygttttcaactgcctcacataaccccttagtagttctttcagggaaggcctatgtaaactctcttggacattgttcatttaaatattatttttccctgcatagttgagctgggtgtagaattctgggatgatagttattttcctttagctctctgaagccttattcattgtttttgggtcccctctgctcctcaaagaagatgagagttagtgtgtcagtgctttgtgtataatgtctttctctctggttatttttgtgacttttctctgtttcatatttttcagcttcactgagttaactgtaggtgtatagttttatttttcctacttggaagttgaggcacttattcactcttaggactcatggctttcttaagttctgcaaattttttcagtcatcatctcttcaaatagttccttgaccctgttctcaatattagcctttgaaatgcaagtcacatgtatgaaggacagtaaagcacggtggttaagaacacggactctggagatagtttcttggatctgacttctactccaacacttaatagctggggaaaattacttaaactcagttcctcagtttactcatctatataatggaggtaataatattaccaaactcttaggttgttgtgagaatcaaataagttgatgtatataaggtgtttaaaatggatactggcacatggtcagctctacgtaagccttggtgattaatgttctcttgagtgccctagagactctgtactgrcactgacrcagttgcccagaagtcattagtgtaagtgatccggaaggaccctgcctttgttttagtccctggggatgcattttggccagagtctatgattatcagttttattttggaccctctcattctattctcttccttggaattcagattcatgtttttccatgtttgcattctgggtgattatgttagattcacccctggatcaccttgtctcctagtttactaatctgttctgaaatcctagcaatgagtttttaattttaatcactatatttttcatctcttggaattctacggagagtgttgaaatctacatgcttgtttcctgtagtttcctgttctttcatgcctgttttattattttactcattttataatttaaaatataaatgttagcataaacaatagatagattagcataaatcaggtttctccctcatcttggattctagtctttctgcttgtttatcagcttgtttttcctcatggcgaatcatttcctttggtagattataatttctgtgcaatattctagggaagcaaaaattatccaaactaatttaagaytgttgacttttaaacattggtagccctgtgcttcctaggttgtggagatgttgcttcagaacatttcaaaaattgtttctgctgggagcctccatgggttcatcagtttgggacttatttttcctactatttctagctccatattggtcatgtaaatttgaactccacagccatggttcaggcttgggattcttttcattctgggaggcttccccctgcctcccagaatgaaaatataaaaatattttcttttagacagggtttgagttttctaggcttccatttcactgagcccttctagagccctagctttgtgcagtaactcagttctagttcctcatcttatgagggccctgactgaatctcctgtgggcaccaatgccccaggccctgacctgtagggtctgccatctgtgttcaggacttctggggcacctgctgacagttcattgttccagctcatgcctgaggatttccttttctttcctgaagtttagctttgtatctaatgatttttatctggtcagacatggtaggtcaagcctgtaatcccagtgcttcttgaggctgaggtgggaggatcacttgagcccaggagtctgacagggtctggctctgttgcccaggctagaatgcagtggtgtgatctcagctcactgcagcctccgcctcccgggtacaagcaattctcatgcctcagcctcctgagtagctaagactacaggtgcttgtcaccatgcctggctaatttttgcattttttgtagagacagggttttgccatgttgaccaggctggtctcgaactcctaatctcaagagatctgcccgcctcagcctcccaaagtgctaggattacaggcatgagccaccgcgcccagccttccatgtccttttatttaggatttttgcatctatagtgacaagcaagatttagtctgtgattttatttttgtttcatctttggcagattttggtaccagggttatgtgttattcataaaattaattaggaagtttttctcttttcttcatcctctggaacattttaaatagcatagaaaatgtctgttccttgaaggtttgaaactgcctgaggacagtgcctttgggggtggggaggactgttttccacatatattttccattcagcttctctacttcttaaatcagtttgtatcactttgcttccctagactatcatacatttaatcaagattttaaaatttactagcagagaattctatgtggtattcttatatttttataaattttttttgcatctctacttatctctctttcttattaatgttgttttttttctcttttcttggttagactttaccagagatttgttgatttcattggccttttctaagaagcagctgtcaaatttatttattcatcctgctgttcaactcttttaaaaatcaggacttcctcctatttaatgacttgttaaggcttattttcttgttctttttctaattttttaagttgaacatctgtccaggtcatgtattatctttcttctttacgaataaaacatttaaactgatgacgcttcctctgagtacagttctggccacattccgtaagttttggtatgcataaattgtcattagcataattttttgtagtctaaaattgctcattttatttcctccttgatgcaagagaggtattcaggagggtactttaaagctttttattttttcttttgttattaatttctagttagatagtaatgtatcccatacattttttaaaaattaccatatttttataaaatctaaaatgctgttgattgtaatggactccaattattttttataccactaaagaagggaaaaagaaaaaacccattgcttattaaactgtaacatcccatcagttataagaagcattctggtttcagagatgatgtgaaaaaataaagtacatcttagaatgtgtgaaatagggagattatttgtccatcagtgtgagagcattgtggtcagagaatgtgatctgtattgtaatagttccctgaaatacattgtaacctggtatttgatatgtggtcagcttcatttttttggtttttgttttgttttttgagacagggctttgctctgtcacccaggctggaatgcagtggtgcaattatggctcactgcagccttgaaatccagggctcaggcgatcctcccacctcagcctcccaaaatagctgggaccacaggcgcacaccaccacacygggctaattttaaaaatatttctgtagtgacagcatctccctgtgttgctcaggctagtctcgaactcctgggctcaagtgaccctcctgccttgacctcccaaagtgctgggattacagacatgtgtggttagtttttataaatgttttataggtgtgtgaaacaacgtttatctatttataatgtatcattatttatcatttataatgtatcttctatatttgctagttacaggaatatgtatatttctatgcattctatatgttatatatgcatatcacacacaggcctatgtaaaatcagtgttgaaattgtgcttttcaggtctcattgcttggttttccattactgcgctgagacctgttaaaaccttccattttgatggtggatttgttaattttccttgtgattgccactttttgctttattacacacacacacacacacacacacacacacaaacacacatatacttatacacacatacacatacacacatacatatacatacacaaacacacacgcatatacacatacacacacayatatatatacacacatacacacacacacttttttttttttttttgagatggactcttgctctgttgcccaggctggagtgcagtagcacgatctcagctcactgcaacctccacctcccaggttcaagcaattctcctgccttagcctcccaagtagctgggattacaggcacacaccaccacgcctgcctaatttttgtgtttttagtagagatgggggggtttcgttatgttgaccaggctggtctcgaactcctgaccttaagcaattcgcccacctcagcctcccaaaatgttgggattacaggcataagccaccacacctggccacacacttatttttaagggacaaagtcttgctctgttgctcaggctggaatgtagtggtgcaatcayagctcactgcatcctcatcctcctagctcaagggatcctctcacagcagcctctcaaatagctgggaatacaggcacacaccaccatactcaactaatattttaattattttcgcagagacatggtctcactatattgcccaggctggtctcaaactcctgggctcaagcaatcctcccacctttgcctcccaaagcactgggattacaggcatgagccattgtgcccagccaacatacatacttaactataaattttttagcaagtctaaagttattatctctgttatcctccaaaacaagcaaggacctttgcayaccagaactgtacactgagcattctctcttgtcttccttattgttataactgagaatttttcccaccttaatacaaaaaagtatcattaatatttacagtagggctgggtgtggtggctcacgtctgtaatctcagcactttgggaggctaagatgggtggatcacctgaggtcaggagttcgagaccagcctggccaacatggtaaaagcctgtctctaccacaaatccaaaaagtagctaggtgtggtgctgtgcacctgtgatcccagctacttggaaagctgaggcaggagaattacttgaactcgggaggcrgagattgcagtgagccaagatcacaccactgcactccagcctgggtgacagagtgaaactccgtcccaaaaaaacccatatttacagtagatagttaattaaatttacttataaattataccaatgttcatgtattttaaatctcactccttctctgtgagttcatttttcttcttgccaaaatgtatcctttaaaattcaatttcagggcaagccctcttagttttggatgtctgaaaatgtctttattttgccctcattcctgaataattgagtaggatgacctttactttcccgtagcactttataaaaatattatattactacattgtttcctgggcatctcttgatgccagaatgtttacagctgttctaactgttggtaagtctcttttcttcctgtaaactttgaggtttttcyctttgttttgatattctggagttttaccaagattacgaatttatttttactgtttagcagtttgtgtacatttttctggaacattctcagccattatcctctcagtttattactttttctaccagaaccctgttctcttcttttaggactccatattagatgaatggggtgctttttaacaattgcgtcagattccagagtgtggatttattcatttaaacatttattatttttaatagtttgtttgactattcttcttctaatggaaatttatacttttctactaaaaacaatgctatagccaatgattttatttctctctttttgctagattctatttttattgtttcatggttaggtaatgwcttttttttttttttttttttttttgagatggcgtcttgctcctgttgcccaggctggagtgcagtggcacaatctcggctcactgtagcctccgcctcccgggttcaagcgattctcctgcctcagcctcccgagtagctgggattacaggcaagcgccaccacacccggctaattttgtatttttggtagagatggggtttcaccatgttggccaggctgatttcgaactcctaacctcaggtgatccaccttccttagcctcccaaagtgctgggattacaggtgtgagccaccccaaccagccaggtaatgacttctrttgagatttttttcctgtagtccaatataagcccattttgctaaataatctgtaagtaaactatattctgtttgctgagcacaaaaatgtgagagggagtgccagattttgtctgttgaatccttaataatctcaattttgtttgcacaatttgttcatttaaaaagtgttcaggccaggcacagtggctcacacctgtaatccctttgggaggccgaggtgggaggcctgcttgagcccaggagttggagagatcttgtctctacaaaaaaattaaaaaaataaccaggaaaggtggcttgtgcctgaaatcccagctactcaagaggctgaggtgggaggatcacctgagcccagggaggtggaggctgcagtgagctgtgatcgcacccctgcactccagcctgggtgacagagcaagaccctgtttaaaaaaaaaataaaaataaagagtgttaaaaactttatgtgtcgrgatttatcaagtccccttcttttgccctaatcatttgttttgtagacttggaagctatgttgtgagacgtacaggtttctgttcatggcagtcactccacggggctgatccctggaatcctcctgaagcttttggggacctcacaactgggccctgggctccaccaggcttcctggcccctgaggggctgcccagccttcctcacaggctgtctgtggtggcctgcagggctccttgctgtgtctgaccagccttcctctgtggatacgggccccacccctcaccccatttttatatctttttgctctttttggtggaaatttgggagggagagcgattcaatcaatgatgctagttgccatttgtaccatctcttagatcctctctacagctgctttttaaggcatggaagttcttttcctgactcctcagcttaacttccttccttagctccagcctcacgcttactggaggtgaatgttgtccattcctgcgccgctcttggaaggaaagaatgtttccagcccccttgatgccgttcgtggtgggggcagagagctggtggtgctcatgaggtaggagatgggcaggactcgtttctggtcacaaccttgctgaccaaaacaagatctggtccagacaagatgaagtgaagaaactggtggaaaccagcagatggtgatgaaagcagtcccgggctgccctcattgcccattagcataaaacacacttgccagcgccatgacagtttacaaatgccayggcaatgacccggaagttgccgcccctttcacatcagcaacccggagtttactgcccctttcctgcaaagctctaaataacccaccccttgatttgcattaacctgcctcctttcaatttcagtttgcatgcaattgaaagtgggtataaatgcatataaatacggttgtcaacagccagtgccttgggtgcactgcctgtgagttagccctgcttcacaaggagcagtactgttcaataagattgctgtctaacaccatctgtttacctttaaattcttttcaagggtgtgtgaagccaaagaccctcccaggctaggccccagttttggggcccacctgtcctgcatcactagtagcctggcctgtgtgtttggtggcctggggttggagattgggttctggagggagacttcttatgccccctcttgtctgcgaggcacggggacttggtgcactgaccggcttgttgacatgcccagcactgggttgggttgagcccaggagttcagaagaccctgtctctacaaaaataaaataaaataaatgagctgggtgtggtggtgtgcacctgtaatctcactttccaaagtgacctgtggacaagggatcccctttcctgggaagaaggagagcaggttacggatgctcagatgtttgtgtgcattgagattggacttggcaacacctgcaccttggaatattctgggcagttaaacatcactatgttatcattcagttctcacaacaaagccctgaactgaggttgagctcatgtatgcgacccagtgggattttcacccgagtcctctgtctctggtcccttgtggaggtcacctttatgggggtaacttctgtaagcaaagctccgcactcacggagcccctctgtctttccccatggagggtccatcgagccctttgcacggtggtggcctagccccccatggctgggccatcaggaaaggggtgatgcccactgcctcaccacattctgccctgcaggctgctcagttcctgcccccactgcacgggggacccttgctcctttggctccccctgaatgggcagaggagctgcctctcatctgttcttcaccagcagctcaagaggtctttttaaaaggacagtttcagccatgcacgatggctcatgcctttaatcccagcactttgggaggctggggtgggtggatcacttgaggccaggagttcgagaccaccctgggcaacacagggagatttcatctttacaaaaaaaaaaaaaaaaaaaataggcgggtatggtggtgtgtgcctgtagtcctagttactcaggagactgaggcaggaggatcacttgagcccaggagtttgaggctgcagtgagatgggatcgcaccactgcactccagcctggacaacagagtgagaccctgtctcaaaaatgaataaataaaaggatgatttcttttttttctctctttttaaaatttatttatttttgagacggagtctcactgtgtcacccaggctggagtgcagtggcatgacctcggctcactgcagcctcagcttcctgggctcaagcagttctctcgcatcagcccccagtagctgggactaagacgcgcgccaccatgcctggctactttttgtatttttagtagacatggtgtttcactctgttgcccaggctggtctcaaactcctggattcaaacgatctgccagtctcagcctcccaaagtgctgggactacaggtgtgagccactgcacccagcttgaaaggacaatttcgtacatcactccacacccagctacatccttgcctggaagtgccctcccctacctactgcctttccactctaggtctcaccttgattgtcctggcatgggggccttccatggcacagaccagggcaatgctgtggtccctggctcagggactgtctttgccccacggggaatgctgtgagggggtgcctggagtcccagcgttacgcattgaccagcgcatggtgagtgctcagtgagggttcctggaacaaacggatgaggtaaaggtggaggggcaggaggaaggaggtggtgaagggaggaggggaagaagaggagaggaaaaggtggtggagaggattgttcctgagcccagctctgggttctgcctgttcccgaacgccaacctttgctgcactgctcccagtgggtgccaactcagaatgcctgtttaagtcactccacaaaactcagcttctcaatctgttttatatttgcaagggccagatccacattccttttttaaaagtcaagcttctgagacagtcatttatattcacagtgattctcctttcaaagactgctttgcatggggcgtgtagagtcatggatcttagggactctgccaggaaaggctcagggtcacacaaagaccccgtgatggtgtctgtgttgtagaggaagaccgaggaactctccaatatrcctgggtggaggtatcttcaaatggacaggatgcgtggccggagcctgccgtccatccactgaaaagtcactttctgaagtgacccctggacaaaggatccttcttcctgggaagaacagctggttatggatgcttcagatgtttgtgtgcatggagattggactttgcaacacccacactttgaaatattctggacagttagttaaaaagcatcaggtggcccacacctataatcccagcactttggtaggccgaggcaggaggattgcttgagcccaggaattcgaaatgagcccgggcaacatagcaagaccctgtctctacaaaaaacttaaaaattatctgggcctggtgactcgtgcctgtggtcccagctactcagtgggccaaggcgggagaatcacctgagcccaggaagtcaaggctgcagtgagctgtgatggcaccactgcctccggcctgggggacctagtgagaccctgtcccccaaaaaggtttaaaaagcaggakgggccaggtgcagtggctcacgcctgtaatcctagcactttgggaggcagaggcaggcggatcacttgaggccaggagttcgagaccatcctggccaacatggtgaaactctgtcactataaaaatacaaaaattagcaggacatggtggcaggtgcctgtaatcccagctacttgggaggctgaggtaggagaatcgcttgaactcgggaggtggagtttgcagtgagccgagatcctgccaccgcactccagcctgggtgagagagtaagactccatctcaaaaaataaataaatacataaaataaaaagcatgaggtaggtccatatgcactgctgggaaagatgtctgaacagtgttgttaagtgaaaaaaagcaaaccgtagcacaatatgtacatatatacaccatttatggcaaaaacacacacaaagccacactgtatgtcctctatttacatatttgtaagttcatatctaaaagtctgaaaggaattatgccaatgatcgcagttcsgagtggactggattgrggcgactttcaaaggaatcttcacttccactgtattgtttgaagttttttcctgtgagaatgcattcctgtgtacttgtgtaatttaaagagatatatggatttagaactgggaatctatatggtttaccctgagcttctgggattttcttttttatttatttatttatttattattattatactttaagttttagagtacatgtgcacaatgtgcaggttagttacatatgtatacacgtgccatgctgatgcgctgcacccactaactcgtcatctagcattaggtatatctcccagtgctatccctcccccctcccccctcccccctccccacaacaggccccagagtgtgatgttccccttcctgtgtccatgtgttctcattgttcaattcccacctgtgagtgagaacatgcggtgtttggttttttgggattttcatttttatttctttgagtgattatgttaagtggcttacccaaaaaagttcactggacatctcaaaaggttatttgacagatgatttaaaaaaaattatactgccatttttatgcatgtgcttaaatatctcaaattgttttctaaaattggttgggaatatatttgcttttttcccccctttatcttgccccatccccttcccagcctctggttactgccaatcttgtctctgtcttcatgagatccaattttctggttcccacgtatgagtgagaacataatgatatttatctttctatgcttggcttatttcactggacataatggtctccagttccatccatgttgctgcaaataacaagatttcattctttttaatggctaaatactattccattgtgtgtatgtaccgtattttctttatccatttatccactgatgggcacttaggttgatttcacatcttgactattgtgactagtgccgcaataaacgtgggagtgtagatatctttgtaatacgctggtttcctttcttttggatatatacccaggagtggatcatatggtagttctatttttagtttttttgtggaatctccatactgttcttcatagtggctgtactaatttacatccccaccaacagtgtacaagagttcccctttctccatatccttactagcatctgttatgccagacagactatttataagtgaattatatttgtagtttaggccagaggtcagcagactttttcgtaaacgaccatggagtaaatattctaggcttcatggacaaaaaggtcactgtggaagtcactcaattgccatcataatgtgaaggcacccacagatgatacagaacaggcgtggctgtgttccaataaaactttatttccaggaacaggtggctggagggtgtggtccatgggccacagtttgccgaacactggtttaatggattgcaagacacagatgggtatggaaatggaggaagatggcaaatggaaatgtgttggacatttaatcagaactagcatgtcgaaaggattgtttgagtatcttcaaaactgaaaaaaaaaaaaagcttttctcaagtgcaatcctgtagcctcttcctgctggaccagggtgaggctggggccgcagaacccaggagcagtgtcccccaaggaacacttcctctgtgactcctgatgggtagagggtggaggggatgggcaggccttcctcaagcctgagtttgcacatggttcacactcagtgggcatccgggaaagtgatcagggccccagtggcccacccagctctgggcaggcagcagacaaggtcagactggggtggacaaatgacaaaatgacatcctcaggtttgggaggggacaagtggtgtctctgcagctggaggccgaaaggcaggcctctggctccgggacggggtgtcggaaacggctgtgccccacacagctttctcgtggatcatgtctgtgcaggtgccttggggcctgagaaagaagcaacgttggctgcacaacaggaaaggcccattagtgcctgtcgatgtaggccacgctaattagtcacgtggctggagatggagcagtcttatctggaactgagcccttcatgccccacaggactgtgaaagtcagggggtacacatagggaagatgggctttcttctcccctccatgcccgtggaagccctccaggctgagtgtgagcatgtgtgtgtgtgtgtggaccctgcaaatagatgtggcagagaaacagtcactagcagacaaggactccgctgtctcctcctcccagcctcacggggagaaatctgtctgcctcgcgtttctagagtcacagtgatgacaaaaaggaggcagagctcacggatccaggaatggggttacgcggagaccagcagagttacactgcagagaagagaaggaaccggaaggtgggagggtctggggcaggtggccgatggagcccagaggctgggcatcagggaagagggtgccgggagaggtgggagagtgggaggagaggggtattgatggcatgaccagtggaattcctcttgttagtaagatttgaagatagacttaattagagagtagttgttaagtggtatttttctttttctttctttctttcttttttgagatggagtcttgctctgtcacccaggctggagtgcagtggtgtgatcttggctcactgcaacatccgcctcccgggttcaagcaattcccctgtctcagcctcccgcgtagctgggactacaggtgcacatcaccatgcctggctaattttagtatttttagtagagaccagtttcattatgttgcccaggctggtcttgaactcctggcctcaagtgatctgcctgcctcggcctcccatagtgctaggattacagttaggtggtatttttctgaaagggaccccagggatgccaaagccagcctgggggccagcccctgtgtgatcacaggcgtgtgtatgcatcgagtgcccatgagaaggcacctaggtttgcacatagtgaggctgcagccagcatcaccccatcttgaagaatggggtttgcagatggagggtgaagggcacattcatcccctttgcctgtgtgctggccaacagtggtcagccacaagtggatgttgcccagagaccctttccttgggtctaggtttcgctgtgggaagggaagtgggagaaataacgtaggagaaagccttcctgcagccccaaacggaatttcctcccctgcttgaagtcagatccaattcacaccctcgcgcagcccgacggctggcgctggctctgtttggtaacatcgcagcaaacggccaccttgtctctattttggttcttgctttgccacttctctctgcacctttcaagaagtgttccttccttctggaaggctggggtggcaggctcccccagctccttcccattctggtaaattaaggaacaaacggtgccaaattgttcttgtctgttttgcgagatgattcgtaaccagcttgttttcttttcctccattgagcgaatgcattaaaactaaaattaaatcattacccgcagcacagacgacactccccctcataattacatcctcttaatgggcatttgagagcccagctcattttaatgcttgctggaaaacgtctcagacacatttatttatttttttttaggtttaaaggtcaacaagaatatcttaccttaatttgacaagtacgcaagaaataatgcaagactcgtttatgttcaggtaatgcacaaagaaatctataaatcaagctgagggaatattagatgatgccatatcggaaccatctgccttcattctcggaagaatcgataccacaaagaaagcgccgaagacgtagatttatgcccttgtgtcgggggaaaaatatcggctgtttttagagtcacttcatatcctaaaacaacagggcctgaggaaaagaatgagagtgggcctaaccccgagtgaatgcgtcagacagcacatctgacactcggttttcgattgtctctgctggagaaagaatggtcccaaggtcctttcatccccatgactctgccccgtctgctattgtatttatttgagaggctgccaggaatgttgagatggcgtggaagggaattaactaaattgcatctgtgtgattgttgccagggggtggaggcttgtagagctcggggaccctgggttttccatgccatgcacactgcctaacactctgccctccttgggagagccttcgctggccttcatcatggagctgggggaacatacaacctccaccatattggatgttgggcttgtccaaagatgtgtcaaatgggaagagctgtctgggctttgtgaggggkgaaagatagcctccgagcaattagggtttggaaaaatagggtaatcatcttaccacctaccccagaagtggtcatgaagagcagcagctctccagggaggtggaagggaggaagaacagatcaggtgaccctctggcaagtgtatgagaatctccaaggagggargggaagagttgtaagacttgaatattgaataattggagaggctttttttgtggggggcttcaaaatataaagttatatttttataatcaaatgatagaaataaaggcttttcatcttttcctgggggtagagcgctgcagaattttgaataaaagagatttggagattctgagattttgcttcgtgacactcgtattaggatatatggactctcgtgcgtgtgtgtcgccatttatactgtggttcccatcacgggtcaaaaacaagcattttctgtttgaacgtgaggatatgcttagaggaagaaagtttgatttttgtatttataacagagtagcacaaaaatgggtccgtgagcctcgggaaacgtatttgtgttgcatccttagttttatcctttcaggagttgaagttgcttctaatgttatgagagggaaatcaaagggcccccgctaagcagaatcgttcccatcagccacaggcaccagtgcactgtgctcatgaccttttgtgctaaacaaacccacagacacacatacgcattcctgcttcttggagcccgggtgtggatggatgcctgacctgccccatcaccctttggctactggccacagagttcacattgtcacagagttcacattgccatctacaaaccaaacatgaacattaggactctcgtttttgttttctttgtcccttttgggtgtagctgaaaatgatacttgcagctcatatcaaagatggatttatgtctattgcaaagatggcgacgtgcaccttcctggaggtgctggcaaattccaggcagtgaagccaaaccactctcgtgccttaaataatgttggatcaagatcatgtgaaatttattctaaaacctgtggtttttatttcttcctgcaaagctccattctctgcttcacatgagagaaattagcaatgaagcacctcgtcaggatccaaaacgcctgccacccatctgtgcaaaaccctggcagtcctggaggagacaaatcctcaccttcctggaaaacttccatgaaacctgcagtgagggcagccagaccttaacttggcaaagaaactgtgaaggcagcctggagtgccaaactattaacttagtgagggtggcaggcttcaagttttgcagaagcccaaatctattatttaactattagttgtgatgaatggatgatgaagggaaccaacgtagatatgcatgaggcatggccgaagatgatatcattgaggaaatgctgttttcttaagctttggtgactaactatagaattgattatgtctttgaactggagtcaaatttcttctaagtgagccgaattggaaaataatattaaacttccattaagggtgttccagaaatgccgaattcaagacaaggattgtgtgcgtttctgtgtgtgtgaatacaaggggaaaccttacagatatttgcagaatatactccatcatttcctgccaagcatcagcttctagtatttcgccaagttttttagaagacttcaaccttgttagcaaagtaattaagcagaaagaaagaaaagaaaaaaacaaaacccacaaaaatgaaaacaaaaccccaatgcattgagtgccttgctgtttttctgattctgtgaagttgaatatcagtgaattcaaattgcacactgggttcttctgatatgaactgaaattgtcaaagatgttgggtgagtctatgggctgaagtttaccgtatttttaatcatctgagaaaagaccaactgcaycaaactttcaaaattgatcattctgaatagygcttggcatactcagcagacatgattgaaatagttttgcagacacagcgtaaacataaaataccaaccccatcacctgtcctgacacacaccagcagtggtagcccagggccagcgctggctgcagaggcatggtgccaagatcggctgctcattttcccttcttgatgaatgcttacgggccagtttctggaagccctttccaggagcgtcacatttttctgtgggtctgcctgcagcccgrgctcctgagacatttcctaaagacctccattagaagcttccactgctccccttactggcaggcgttcagcctttgccaactgcaggttgatggaattgtcggagagagagcatgtcggggggctctgttcatctcccctaaagtagtcactgacatgagcaacactccctgtatgccaggcactgctcccttattgcccattttgtcctcgtaataatcttgcaaggtagccacaagagattattactcccattttgcagatgaggaaactgaggcatgaagaggttaagtagcctatgtagctggtaagtggaggagccagagtctggacccmggcatcctggcagttccagcctccttctcccagtcatcactgtatgttccattgttccgtttctatttcactcacatataacgagcagctaagtttccygagtttttggatatgacaacaagcagcrggggcccagcttactgagaagagtgaattacagttttttcaagatccagaatatccacatcagaaaagctcatggccggcaagtgtgatatcaacacacgttgatatcacagcatcaaagtaaaaactatgtaattttcaacatccaaataaagccttctttgaaaagcaccgattttcacatgagaatggtggacagatttccacatcctggcccgagatttctcaccgatcctgttgctgttgtctcttcccaggccamcctgtttctgcctggcctcttcctccaaggccaagaggggtcctgccaaagtccaggtcagagagtgtcctccctctgctcctgtctcattcagagtcaaagccaaaatcactggagtggcccacatcactgccccccattgcttctctgaccatatcttctttcgtgcttctttatgtctctccagacacactgggtgtcaagagtgctgtcaccccagggcccttgcacagctgattccctctrwwwcccttggttcacatgttgccttctcagtcagaactcctcccacatactcacctttggcctcaagctctcccagtcctcctccccctactgtgtttttcttctgtccttagtatttctcaccctctaaggttatatataatctgcctctctcctgcttggagtggaattctatgagggcaggatctttgttttgttcatgaatggatcccagttgcctagaatagtgccaggcatgtagtaggtgctcattaaatatttaccacatgtgtgatttacctccagaggggaggagggttgcaaagggaaccccaagtattggtaattgttttattctttaagcttgggtgatgaatgtgctggttcttctttatgttatttacctgtatgtatgtgtatgtatgtatatatatgtgtgtgcatatatatacacataaatatattctgcatatctgaaatgtttcatattaaattttaaaaaatcaaacaggatcaaaaagtaaaagaggtgtatggtttatataagtggtggaatcctcttctccattgaaagtatttcttttctttttttgtgtgtgtgtgtggtggggtatagagtctcactctkttgcccaggctggagtgcagtagtgcaatctcagctcacagcaacctctgccttccaagttcaagcaatcctcctgcctcagcctccccaggagctaggattacaggcgcacaccaccacacccagctgatttttgtattttttgtagagatggggtmtcaccatgttggccaggctggtctcaaactcctgacctcaaagtgatccaactgcctcggcctcccaaagtgctgggattacaggtgtgagcccctgtgcctggcccccatcaaaagtattttttcatctttgtgtaccatctcatgtcagygacggaaagtgcaagttcttaggcagatgtgtttgcgatgggggaagatgcggagaaacaggaagaraagctgggcagggactctgactggccgggcagtcggggcccacacaaccagaggagctgactgtcaaagcaagagtgttggggaacgatgagaaatgaggtggagagttagccaggatgagacggccctgggccagcttccgagagcaggacgcttggcgtggatgtctgaccacccttggcaggggagcctgcatctctctgacagaggagaggaagaaagagaaatgacattttctgagccgccaagaaagaagaggcctgaatggggaagggctgagttcagggacctggatgaagacatcacgtggggtgacrctgtggttgaggatggacccaggcaggaygcgcccaggtccaccactccctgtgaccccatgagattccccaaatcctcagaaggggagacacttcctgggtttgcaatcacctccagtttatgtatatagccagaaggagtaggagtccagatgtggaacctctgacccagcccagggctgtgtggtccgtgggcgaggtgagctggccaatgtccgggtgtcgtggctgggaggacacagctggtccccgtgcccgccaagcagcttcccagatatcgatcagtgcctctggtgagcatgactccttctgaggagtcccattgatcaggccagatggaaaactagtagctgtgattgggacgagtgaatattcatttggaaatgtcaatgagtaactggagatgatgcctgcagtgacttgcctggcaggatcaattccagacatgaggtgaaccagaygttggcggggacctaaggtgggagccagggaccctgggtggggcagggggagtggtggaggccagagaatgtgtaggacagtgaggtcagacacatttccctgcctccccacccccagttctgaggctctcttgtctgtctggggcttttgtcttcaagtgtggcactccttgcacagtggccaccaggccggaggacgtctgtgtgtgtgtggaaggggttgaagggtcccaggacgtgcacttgctggaagaatgcatgggtctgctgaacctgccttcctcctgggcatgctgggaggaggggctgcaagaaggtcaagctggaggggtcyctaggctctagctgagacccttctcccactttttttttattttttattttgagacagtctccctctgccgcccaggctgaagtgcagtggcatgatcttggctcactgctacctccacctcccgggttccagcgattcttctgcctcagcttcccgggtagatgggaatacaggctcgcgccatcacgtctggctaatttttgtatttttagtagatacggggtttcgccatgttggccaggctggtcctggactcctgacctcacgtgatctgcccatcttggcctcccaaagtgctgggattacatgcataagccaccgcacccagccttttctcctcacttctgtcagtaggtcccagctgtgcacaagtcagggctggggccaggggaggctaggagattttggttagggtctycttgcactgggatggagggatggagggattcagccacttcaccccaggagctctggccctggctagaggcctcctggacagaggagggaagtcatcgctgctggcctgtgaaggggccctgtcagmttattgccaggtgcactgtcacctaggtgtggcctgctacttcccccagtcccaattaaccatctgcaggagctgccatcggcatgggggaggggctgggtcccactcgtctgtacagactgctcagctaatgagggggtctgtgaaatttttaattacggctcccatgcctggcttaattatttgcatatggcttttacaagtgggaaaaggacgattgcatgcagcgcagcacttctcctcagccccacgtttgactttaattaaaggcagaacctgaggtctttccatcactaatgatcgtggaaaattagcttccaattcccaggggtctccagagtgatgcaccctgaggcggagagcgggcrgagaggggatggagcagggagaggagcgggaggcacagatggcagatggtcctgctgggccgccactctggagtccccccaaccacaggccaccctcccactaccttccctccaggctgcgtagagaagggagcctcactttcctctgccaggaagcagacctgaccttgggcagcaactaggaggaagacctgctgagctggggtgaaggttgccagggtcattctcccgttggccaggagctrggtgtgttctggctgtagctggactgctcccagctggtggccacaggcagaggagtgggagtttctgaaatgagtatacgtgtgtgcacacatgtctacagcatgtgctcacccaggcacacagatacacaggatggagccgtagagacacacctgcatgctcacacatgtatgtgtacatatgtccactcaggagcaaaggagtgaatgtgtagtgggccctgtggccatccctgtgtccccatccctcttgtctcctactcactgagctgggaggagctgaccccagggcagtttcatcccgctgtttccagtagccaggcctgcaccacccccagcacagagcatcccctcagccccaggcacactaggtcaagaagttctattggctcargatccaggggcttgttcccttgttgcggatggggctccctcccttctactggacataatgaggatgcctgtagcttggactatgtctgtagccattgaaccatgaagggagctctcaggataaaacctgccccaaggacaggagcagagccactagcagagcctgggtccccagtgacactgtagagcctcgatttccctgatgagctgggttttctgtttctcgcttccaaaaacatcctggtctaggcagagtttgtgtccaatgcgtggtctcacactgcacgtggttgatggcaaccactgaaccacgcaagagctggtttcctggcaacaccccagcctccttcctgccccactgaggaggctgccctgtaggtcagggctgagccttcctggcacaggggctgaagtcatcagccagggctgccgtaacaaagtccacagactggggagcttgaacaaccatgtttargtgccatctggtcacagagctgtaggaaccagcttctgaccagtgaggctgtagcagcctctcttcccagaggatttttctccctcagctgattttgcacaaaagtccttgaaccgggaagcattgttctcatccaggggtcacgtgcctttccctaatccaggctcccgggttgggggagctccagagtggcagcccagcaggaccatctgcctttccccaatccaggctcctccttaagcctcatgtccattctggatttggcctgaggtccacccattgcctcctctttcattgtaggaggctgaggcaggaggatcacttgagtcctctttcattatagagggagcaatgggtggtggacctcaggccaaatccagcatggacataaggctcaagtaagtttttttaaatgtgcattgcttgccaatttcagaatcaggaaatttcaagttaaaaatccagtttccaaattggaaggtctaaaggtctgcattgctacaagggtcatcagatgtgtcatttaaaaaataattttgrgtccagtgcagtggcttatgtctgtaatcctagccctttgagaagctgaggcaggcggatcgcttgaggccagcagtttgaggccagcctggccaacacagtgaaaccccatctctactaaaaataccaaaattagccagacgtggtggcacacgcctgtagtcccagctactcaggaggctgaggcaggagaatcacttgaacccgggaggcagaggttgcagtgagccaaggtcgtgccactgcactccagcctgggcaacagagagagactccatctcaatataataataataataatttttgccccggtgtgatggcttacgcctgtcattccagcactttaggaggctgaggcggaaggattgcatgaggccaggagtttaagaccagcctgagcaacatagtgagaccccatctctataaaaatttttgaaaattagctgggtgttatagcatgtacctgtggtcccagctactcaggaggctgaggcaggaggaccacttgagcccaggagtttgaggctgcagcgagccatgatcataccactgcactccagcccaggtgacagagcgagacccagactcttaaaaaagaaaaaaaaaaaaagaaatccaggtttccaaataggaagatctgaaggtcttgatctgctaccaagggtcattggatgtgtcatttgaaacataatttttattatgaaagtgtcwtgtggttattataggaaatgagctgcttcaaacagctgctcactagagaccaatgactgacattttgagtcccactataaaaacgcctgtcttcattcctctttagagcaatcacataagaagtcagggctccagcaaccccttgtgtgatcagccggcaggggggggcactggggcatgagtgtggggtctgtgtggatgctcttttgctttaagatgctcccagttagcygagtgctgcccacatccctgccccacctgcccctgcctggcagacagatgccacagagccccacgtacagggatcataatggtttacacctcttctgcctgtgtccttgaggttgagcgatgagggcatgtgaaayccaggatggtagaaaagaggctgcaggcttagggaaagaaaccagagaaaccagactcccttggatgttgttcaagataagcaaataattcagcagagccatatggaaagatggtgagaccggccgtggaggagcaggcaccctgcagagaggactgggacccagcagcccattccaccagacccaagcctgttcctccaccccagggcagcatcccaccactgcaggaatcttctcaaatagctccatggtaccagtccaccaggggcctacttactggctgggaaaacaggagcccagatacatagcatgaggatgccccaaatctcccagtgacaacattgaatgctgagtgctgtctcctctgtgttactctcccacagtcccctctgtcagataaaagccgttagtctctggaacacacaggagggtgcctcacttggcctgggggccatcaaggaatggtgagagatgagactgggcacgggaggttggcagaggcaggatattcacagatctggtggaccatgctgagacattttaacttgggtcactgggcacctggggggcttgggagtgaccacagatgtattgcaggacaggtgttgagatggggagctgtccaggctacaggtgctgaatcagagccgcaccgagggactgggaaagaaagacaggacacatgttcagaaggccagatctgcactcaggtgtcaggagagggaggaagtgttagtctggacccacatttctggctttccaacactctgtggggaaaaagaagggcaccaaggggtcactggggtggaggagacttggaacacaggacgttagctggaaggagatctgaggcagagactaatggagaagggatgttcctgtcccatgcacagtcactcattagtgcttccaggtcatttgaagccccagtcacttcctggtggcctaaatgagacctgtttttccacagagcatccaggatagggccaagagacttttgttctgccatattcttagtcttgagccttcacattgggagagaccagcctgttttgagatgagctccagggaaaatcatgctggactggtagaggtcaagactgtgagggtttacctgtaaacccagtgctttgggaggccaaggtaagaggattactggaggccaggagtttcagaccagcctgggcaacatagtgagaccccacttctacaaaaaattaaacatttaaccaggcactgttaaattgagtagtcccagctactcaagagtctgaggtgggaggactgcttgagcccagaagtttgaggctgcagtgagccatgattgcatctctgcactccagcctgggtaatagagtgacaccctgtctctaagaaaataaaaataaaaaaagatattggaggttaccctttggaagccagcctccttccaaagggtatggccatgcttgtgtgctgagtggacccacagagcacaaccactggactccacatgaccccagcccgaaggacccagctggctccagtgcaggagcttcctttcaccttcgttgtccttttactagcttctcttcattcgccacacattgcccaagcacctgctctgtgccaggcactgttggcagctggaaacacaaagacaagtcctctggggcctccttgtgccagccacagggagagagattccctggaaggcagccaaggcttcttgccattctctcctcagaagtctatggactgccttgtgtgtctgcaccctgccaggggccagggcatttcaggtttactcacagactcctctctgtccatattataccccaactttcaattttgagaagtaaatatgcaattttttcctccctgtaattttccctgctgtggctgcggatgtcagagccgctggaaaatgtgaatagctcagtgctttctagaactgaaaggaagctggccatgccgcatcctacatccccaggtgctcttggcaggatccagcagctcaggtggggagagatgctctccaggctgtactgtcgagggaacttttaacccaaataattcatgttcccaccttcttccattagcaacgagataattgccaagaagtaagtgtgtatctgtgtgagtgtgcacacgcatgcgtgtctgttgcagggacattagcagaggaggcgaagtgagtgtatttgcttatgcagccaaactttctgcgtgttcctctggagactgtcagaccttcgtgtctcagtaactgaaggtcaggacagtctgatctaagcttttgttttggaaaagcatggctggggtggagagagagaggatttgagtcagatctggggtggcgcttatttcttgtgtgtaaccttggccatatttagtctctctgggtcttcatttcatcatctgcaaaacagagtggtgggcttggagatctgctgcccagatcttccttccaagaaggatttgctgaccacctggggactgtgtgatcagcagccagcctctagtcctcaactccacgaggggctgcctcatctgagatcacgcccttctctgggcaacccacatccagctactgagtaagggggaggtgtaagggtccagccctatcttccttctgcaggacactccgacaggctgaatccactccggagcccaccatcaaggcctacatccctattccacttcttcccactccagcttcctcccttttccctttgcaggtattgatccttaataaacattgtgcaccccaaactccatctcggtatctccttacagagaaccaaacctgtggcaaatagggataatgatttttacttcaaaaggttattgtgtgaaagctaaatgggatgtttatgtagtatccaacattgtgcctggaacgttaacaaataatgataaatacctgttcctttttcttttctttccctcacaactgtgactcaaaatcccattctgggcctcgagcaggtgttcctaacctgtgctctgtaatattggtttggaaaaagcccagcaaggcaagtggccctgaaaatctgtgctgcggctaaatctgagatcctggctgatggcttcagagccaattcttgtccctgtcaagttcattatccatggatcacgtcagccctcttcaaggttcctcactgaaaagaaattgagcatgcaaatactcttttatcataatcaccacgtatccacagggtaattcataaaagagctggaaatatgttgaaattcaatattgttttagtccaaatcgatattaataattgtttgcatttttaaagtgcaatttgcaattgaaaagtgcacaaagatcaaccagtagttgctaacacatcaaattttcctattaaaggcacagtcccttaactttaaaatgtttcttatacaacaggggctggagctgatccatggaaatgactatctcttatttacgtgcacaacattagaattggcttccattctgcatgagctgaaaggccagtcacttttatttgtaagttttgatttctttaattaaatttttaattttgagataataatatattcatatacagttgtaagaaataatgcagagaaatcccatatatcccttacacactttccccaattgtaacggtttgcaaaaccgtagaacagtattaaaaccaggatattgacattgatacggtcgagatagagaacatttccttccccacaaggatcctcgtgttgctttcttcagatctttaaaaattaaagatttttgaaggaaaaaggaccctgttagatttctgccttgaaacgatagctatcactaaatgaggcactgtcccagctgggctcagtggagttcacacagaggaatggtcccctaggtcaggagtagcccaggtggaactcacctcagccagggaggcctcaggggagcacagctttgcacatcagaaagaacctgagaacagttttcagtttgacacttgcagtgtggcctttgatccctcaaacaaggacagggttgtcaagaagggaaacagcttggctgggctcatgtgggccacaggggcccagttatcccaggaacagggataactgttccttcctagagtgtagaactctggggcacagccctggcagcctccctgaggacatgtcatgggaccracccagttccctggtgagggacaggcggcaggtgtgggtgaggggtgcccttgactgaagcctacctggcatgcttgaaagtaaccctatgcaaatgaaattcacaaggtgcctccctgtttcaagacatttgtctcacaccagagctgcagggaacttgggaactcatctacagcaggtattttggatgaggactgattctgagatagggaaactcaagtcctgaagatcagacttaagtggaggggaagtcaggccagagaacctggggtgccctgctctgagcctgatggctaccctgtgacatccagatgccttgttcaagctgcttccactgagggttttgggttttgctttttttttttttttaacggagtttcgctcttgtcacccaggctggagtgcaatgtcatgacctcgcctcactgcaatctccacctcccattctcctgcctcagcctcccgagtagctgggattacaggtggctgccaccatgcctggctaatttttgtatttttagtagagacgggtttcactgtgttggccaggcttgtcttgaactcctgacctcaggtgatccacccgccttggcctcccaaaagtgctgggattataggcgtgagccaccgtgcctggtgtgtgtgtgtgtgtgttgtggtttttgttgttgtttttttttttttttttttttttgagacagagtctcgctctgttgccctgactggagtgcagtggcgtgatctcggctcactgcaacctctgcctcccaggttcaagcgattctcctgcctggaaaacaggcatgcactaccacatgcagctaatttttgtaattttagtagaaatggggtttcaccacgttggtcagactagtctcaaactcctgacctctagtgatgcacccagttcataatcatttttaagtgtacagtccagtggcattaattacattcacattgttgggcaaccatcaccactatccatctccagaaccttttcatcatcccaaacagagactctgtacccattaaacaactccctgttcctccttccagtccctggtaacctgcattctactttctgtctctatgaattggactactcctggtacttcacacaagtggaattatacagtatttgtccgtttgtgtctggcttgcttcacttaacatgatgkcttcaagagtcacccatgttgtagcatgtgttgctatcattgactttttgattgacacatgcaagctgtaattttttgggggggttcctagcatcacaatatattttaaaggtttggggatgcattagtccacttttgtgttgctgtaaagaaatacttgaggttgagtaatttataaggaaaagaggtttaattckcttgtggttctgcaggctgtacaggaagcatggtgttggcatctgctcggcttctggggagggcttcaggaagctcacaatcatggcagaaggcaaagtgggaggaggccggtcacatggcaagagaaacagtgagagagagatgagtggggaggtcctagactcttttaaacagtcagatttcacatgaactgaatgagaaccaactcatcaccaaggggatggcaccatgccattcatgagggatccaccctgtgattcagtcccctccaaccagaccccacctccaacactggaaatcacatttcaccatgagatttggaggggacacatatccaaaccatgtcaggggacaatcagtcaattttgtggcatctcaatggtgtgtgtcttttgtgtaaacattgcacctgttaatgtgtatgtatatgtagagggagaatcaacatttgtctttaaaagkgtatttgtcttcaagctctgtgatctgaaatctgtcatactgacatgaggaggcaaaagtgaggtcctggtggcgagcgggcctcgggtatttcaagctttaaggctccactgggctccctgggggccgtttcttccttgcttcttccttgcctcctgtcataggattgggctactctttggacctgattccaaggcagctctgaggaaaacaaaccctcagctccctgaaacatagatgacctttttaaaattccaggttcatggagtgcctctctccagatggccccaaacacttccatctattaactcgtgctcattcaacgtgcagcagaggctattgatcaccttccctgtgccggggactgtgctaggtgctgggaatacaaagatggggagaggcctcgatgcgattcccgattcagaggcaggtggcaaatgcttttcccacagtgagggaagggctgtcaccgcgatggtgctctcagggaaccaaggttcacacattcagggaattcggggcactgagtcagcattctagactctgccaggatgaggaggagcaggggactcagtttctttacatgcagaatgactgtcccctgccctgccccactggcataaaatgtcctcaacatgtaagaagccctgggcagagatagtgtccagggtgtggtcagttgacgtggcctgtcagtctttggccacgctctcaggcccccctcgctgtggctgtgtgtttgcaggcgcccctcagactccaactggaatgtgtccgtgatggtgggaggccgggctgtggtgctcctagtagggctatggtggcaagctttaggaccttgtgagcctgattcacccggtaatctccacctcggaacgccctttctccccgctgcagagcatggggctgggsgggagtggagagaaccctgccttgtaacagggcagcggacagcaggtaaattgccttccccgggagtagcgtgccgcccggcaggggcctgggtgtgccaaggcccggctctggggatttcaggacccaggccagcgctccccagcagcagggcaggaggcagcctgagagtcggcagccccgccttggagtctgagcactcgcgcccatccgtcaaccttgcagagcattgcaactttatgcctacgcataaaaactggagggactcgtcccagagtttgctgccgccgccgccgctgccattagagcggttttaattagctgcaggatttttaatgagctgaaatcaagaagagccccatctcagaagtaagcgagagccgcgcgcagggaagaactagtctgacaaaacagaaggaggtggtgctctygggggactgggctgtaggctcccaccgatcgatcggcgacgagcagatgagttcccgaggccaggaggctgaggagggaagccagggctcagagaccagcgcccggtgcagagtccccgctgctgccaccgcggcagaaggcacggtgccggattcaaggtgacggcagtgcctggctccattctcctcaagttgccatagcagcctctctcccaacaagcagcttctccgggagccctcagccgggagggacgtcattgttctctcctgcccgtgtggtgcaaggagacccaccggacagagaactttcccgagcccggggtccgctgaccacgtgggtgcacccatgctgcctggagccaggcacagggacaggtccccacggccacagggaatcctctgggcagctgaggggagcgtccaggcccagaagcagctgcagccaagcgtgtccttggagccgtccatgcgtctgtccgcctgctgccggtcgccactggaggtgcgtgtgttttggctgaattcccaagtccttgcttgtgccctgaagtgaatttcttcaaagagacacatttttaaatcaaataaataaggaaatgggaggaatccttcgccctgccctgtgtcccaggaggggtttataagattaattggatctttttttttttttttcttaaagtaaaaattggtgacgccattcaggccwgggggagaaaagccaccaggaggactaggaattgtgaggccaggcaggagctgctggaaactcgctggggctgtttatttttcttgcctgaaccctccctcttctctgcccctggaaggctggattttcttattgtctgttggtcttgggatgggtgtaagcaggtgaaggcaggttttgcccttgtcatcggagctgagagtgatatagtctgtgatgaggatgggacagtcccaggtggaggctgaggcctgtgactgtgtttatgcctcatcccccagccttccaggccccagcctgtgacagatggtggtgtccactccccaggcagcagctggactcccaggagagggagacagacagctcttagaccagcagctcctgttgccttgaaaacaacgtgcgacttggaagcctggggtcctccgaggaacaatagaggattctacaccccctggaatgcccggggatctgtcggtgaccaccctcccttcccacaccttaggggaaaggagtgttctatagagtccagttggccagccatactgctggccagttacccaggaggggaggcacgctgaccttttgattcctgtttgcacggagcagggagttagctggtcagatggtccccagtgagaacaaacacagagctgagggtcccagagggaaaagctggggtctgaggcttaggggctaaaccctgaagccacagacggctccaatgccagcttccctgggtatagagagagggtgttcgtgttctctcgggggccagcaaaggcagggtctttgaaaggggaaacgtgaacagatgaagctccaccaccatggaggtgtggtcctgggtctgtgtcttcttccccttcctggatttgggggcatggatctggtccttgccctggctcccaggcacatgggtggctggagccaggcatcatggggtgggtttggtttggggcggttcagaaacaagtgaggacaggtcttcgctgcagacccatttagtccttgacagtggatgtcggtactggctcgaatggagacagactggggagaagagaggaccggccagctctcttgtaaccactctgcagcgccagctactgaacaaatgagatgatgatcacacatgctcccgagtcccctttgttcatcaggtagagcctgatattgagggacccattattagctgttttaccaggcagttctgggcgctagccatgaagctgttctccttcctctctccctccttccaaaatgtcttgatgttggagrctaccctaggtcaaactggcttcccggtgtctgactcaggaggctgcaggaagcgcacccacacsgtggccagcttactcaggggctcgcgacagttgctttccagctggggccttgctggggaccatcgatggtatgtgtgcaggcactggccggcatgcacccgggcatgtatgcatatgygtgttattgaacccgcgtctgcttaggtccgtgggtgcggtgcacatgtgaacaccgtccccatgaccgtgcaatagcagctgctcccgagagaccttgcaggttcttcctggtccccatctgagagccatggcccccctgtgtcgktgcgtgacatcttttccattcttctaactcctttctatgactgcctggggctcccccgagtgaggctggagagaacagctttgcctgccttgtcagctgctcactctctcctgaggctttggggctggccccggtggggctgggactctgcagtgcagtgctgtcctcacagagggaagggcttgggggacggtagggcatcgcagcctgctgtggggcttacagtgctgcatctgtgtctttgcaaggcagtgaaccccaggtcctcaggatggcctcatccagggcagccatggagagagaggccccagccccgcacaaggggctttgagtctgagcccttggggacacatgagtgtccatttctactctttgcaggcaaggcaggggtggcctcggtggatgacaggaagcagcagtttgtctttagggcagaggccattgcagtgaggtcggagccagcctgacaccccggagccagctccagagacaaaacaggcccagctcagtgattctgtaaaaagctggaaggccgcaggaaccaactgctcggcacagtccagagagcccagcgtcaggtgccttcccggtgcggagaggcctggggcgggttaattaaagttaactgagtgaaaaaataattatagaaactgcagaggggagaaacccaaacctgcaatttaccctccctagcccttgagcttttcagaaccatctggtcgtggggagtcgtgggcaggggagcagggagagtgcctcttcccatctctcatgctccatggactgggtgtgggggcttctttccccagtgcctgggtccgtgttggggaggagtcacccggctgaagtattgtccctgggcagggagatgtccttgggccgagcagcatatttgacctggggcttaaacagccacccagctgtggcctcagaggctactgggagctgcctacctggcctcacctccctcaggcactgacctgtgccagggtggggawgttccctccagcgctcttgggtggaaaaagggtgatcctctcggcctagccagcaaggcccgctggaaagtaaggggacagagtgactgaccttcaaagcggggttggggggtccctagagtgcctgccgcctgtggctctctccccctgtactctgcccatgccctctctacacaccactgcaggaacttatattcttcctttgggcaaatggccttggggtgcccccatctccatgcacagcctggccctgttggcgtgactggctggtatgtgggggatggggaatttctctccctgccctctaggaggaagcggggtaaggggtgagtcacatgggtatactctgggtctgcagtggctggagcagttagtgcccacccccaggaacacgagggggtgttagtacccagcctctgcgcctctgagcttggagtctgttggacacaggtctagctgccccacctccactccaggcaaagggcctcgagcacagggactccagtggtctggccagagcctcagctccctctggtgtgactgtccagagggactgacatacgccaacccatctgtcagtccatcagtgaggacagccctggctgtcacaggagagtccgtctgtgcttgaatatcctttgagcctagcaggctccttttcagagctgcctgctctatggagaccttgtccccagtgccctacagagagaagcagggtggaggcacatccaagagcttctctgcccaccgggccgggtaccagggacaaggacccaggttcccgccagtacctaggcccccgccctgggagcacgcatgcttatttggaggcctggacagtgcagggggtggctgctggttactgactgggggcctggaggttcccaactgggctccccaaggcagggccagagggtgtctcattccatgatttgtccagaggtgcagatacaggagaccctggtggaaagctagcattccagccacaggtgggaacaggcttccctcagcctcctgggtgtgaaaggatggaaagggcacccctgggtaacttgtagagggcagagtcatccggggattgcacttggattgctgcagtgagcagggcctacacctgcccgggtgcctygcgcctcggtgatgactatccctcctctgccccgtagatctcggcctgatggacgcctggtgtggacgatgagggaagaacgtgccccccacacccaagaggtgacccctgagccagccccggatgaccctgcgacctggaacaatgcggctggcctgcatgttctcttccatcctgctgttcggagctgcaggcctcctcctcttcatcagcctgcaggaccctacggagctcgccccccagcaggtgccaggtgagtccttgcgctgagtcctgccatcactgcccccagctttccagcctgaagctcaggcctccacagctgccctggtgtgctgggcttgggggaaaggggcaagtctgtgccaagacccccggcaggcagagtcctggcttcccggggaaggcgttagtctcaatgtgggagtgctgtgtctgatgcaagacctccagccagtgcctagcagcagggtggccccttttgggagtcatggcaaggctgctgtctattgagccagttgttgcccttgatgaaactcagatttaaacaggattccaccacctctcaggcctcttccacattgtcagggacatcagaaagtagacaacttctccctgagcccatgccccacaagcaagactcagtttccctgcccagccctggggaatctagcctctctggtctggacaaagggggtcagggtacctcctggtttagtgaggccaagaccccctccgagggtcccccactgctacttccattccacccctgcctggtagcccactggagtcacagagggctgctgggaacaggtgggatggcagggaggccagagcaggaagggtgattctggcatctcagggcagacggagtgtggagagggagttcaggcaaggtttctgctgccgggacacggtccccatccccagagatatggaaggacaggaggtcagctggcagggtgccaaggcctgggaactctctgctttggagggagaggaggggaggtgtctcagcagtggcccctgttaggggcagttccatgaagccacacactcacagtccacatgctctagggcatggacaagctggtgcacccccagagacaccgctcctctgcagggacacccactcactctctcttgcttgctcagtgctgtgatccagagacaggatgaaagagaagggggccagaggtgtaggcagaggggttgctgcgtaaatccctgccggaagcccagagcacaggaaggggtcttactctgcaaccgctccgcccccattatggacgagcacccatgatgtgtggcctttagtgcagattgagggcctgtgggcaccaggaaggaaggtgaaaagagcacaaggaggccagagctggggccctgggtctggcagctgccagaggctccccatgggcaggcgaatgagttgagagtcagagggaggcagccaaggcggtggcctccaggagatggtgggcgagtcatcggtgctgactcacgcctgtgccgggcccccacaggtggtggctgtcagaagtgggtctggccgctcccaggcgtctggagcagcaggtgcgcagcagagccggctctcctgtgggagctttgcagcctcacatgagccccagaacagctcatgacactgcattggcagaacagggcccctcgggacagcgccaccagggcagacagcgagctggtacctaaggtcatgtgttatctgcatagaagcacagtcaggaagaagggcgagcaaacgctgactgggtgtgtccttggtgtgtgcgtggttgggggtgcatgtaggcagagggtccaggcggccagtacccacattctgcaggaggagcctgggagaggaggcatgagtgtgcctgtgatgcccacctgggaccagggcctggacccatcggtgggacactcctggatgggactgtggtttggtggcttcagctagtgccctgccctgccgcagcaagagtgctcactgcgcaggtccctgttgccctgcccagcttcccgagtgcacatacgtgtggattacaggtgggctggggacccaggggacggctgggatttctgggaagatcggatcctcaggctggcaggggatgtcagatggcacggagccgaggccatcatccctttgcagctggcagacytggcaaggagcacacgtgggtcttctgatggtccatgcagccagaccaccctcaccacgtgccaggtgatgggcagacttgacggtctgggtaaatcacaccaaacacagtcataaaactttaagtaatgcttacgttactttccctgagcaaagtgcctctgacacaggctgtttgtgttgatttgttactattcatttattccttccctgtacttctcacggcagcctaattgtgattyggtaccaagaaagcaatatcaaagtaattttccacaacattagttacaattttcttctgatctttcaagtgaaacaatcccatcctgttggcttctctgagcatataaaccttgattacatttatctgttggaaaccagtgcttacaaagtgtatgtgtccagttgcatggctgggtggccccaagggcccytgacaattctccctgtgaatttctgttggtgggaggaacacattctgggagttgccctgccatcctgatcaggcaaacaggcaggtgttggggtggagggctgggagtggagatgagcggatctacggaggaaattccataccatggcatgaactgtcctggggacggagttctctgggagctgcagtttgtggcacaacaaatgtagaaaggggatggggagtggcgggaattctgagttgcttgaggtcccttggggcctggcctcattcacgtccctcccacgcagccaccggatattaacagcacctgaactttacatggatcagccagccaagctcacctggctcaggcagtagatggaattgtagggggttgccagacttttgtaaatcaaaccacattttaaacattttttttttactacagtccaaatcaaatctttggaaacaggaagagctacccagtaagctatccgatgcgaagatgaagttttgtgtaacagagaattcacttctccagttataattcttttccagtctccaggattgccaggccctgaggccagagcttctgctttcaggaaattcactttttgacccagtagacaagacttacctcttctccaagagaaagacttggagaccaggccagaaccaggaataacaaacaccaatggccaggtgtggtggcacgtgcctgtaatctcagtactttgggaggcctgggtgggagaatcacttgagcctaggagttctagaccagcctgggcaacatagcaagaccctgtctctacaaaaaaaaataaataaaattagctgagtgtagcggtacacacctgtagtctcagcaacttaggaagctgaggtgggaggatcctttcagcccaggaggtcgagactgcagtgagctgattgtgccactgcgctccagcctgggtgacagggccggactttgtctcaaacaacaaaaaattcccaatgtactggctctgggggctgcagaaggctgactccacatttggtcgagcaaactgaattttacgagctgctttctttgtgaatgttttatcatagcgaatttggaacacatgcagtagtggagtaggatagtgccatgaacaccacataccgggcacccagcaccccccaccaacaccaggctggccccatccatagcaccatccacttccctcctttcatgtgatttttgaagtctataccagacatcctatcaattcagctataactatttcttttttctttctttctttttttttttttttgagatggagtttcgttcttgttgcccaggctggagtgcaatggtgcgatctcagcccaccgcaaactccacctcctgagttcaagcaattctccggcctcagcctctcgagtagctgggattacaggcatgcaccaccacccctggctaattttgtatttttagtagagacagggtttctccatgtyggtcaggctgatctcgaatccccaacctcaggtgatctgcccacctcggcctcccaaagtgctgggattacaggtgagagccaccgtgcccagcctcagccataaatatttcaatatatttctcagtttaaaagataagaactgttttattgacatcaccactgaactcattccttaataacatcaaatttaatgattcctcaatagcatcaaatagtcagtcagtgtgcaaatgtctgtctcacaaatataattacctttatttccaatttgttccatccaatatccagaaaaggccctcacatggcagttggtggatgagtcttttaagtctcctttaatctgtaagtttccttctccatctgtattcttctctcactatttatttgaggaaaccaggtcacggttcctatagaactttctgtaaattgagatttggctgattgggcctgtctgataaggattcacgttgttctctgttctttgttgtcccaataaattaggtgaatcttgaagcttgatcagatacaggtttggattggtttttgttttcttctaggggagttttgggggacaggaattcatgggtggttctgtattattccatcaggaggctcctgtctgcctggctgtcttrtgttatcagccgccagagatcgtgcctagatccagccattcattaggggttacacagtggcaatgttctgattttatcactccttcttcattcttttaagtggaatggattttgttttaatggggcaaggtgagtcattgtcagtgacccatgaagccaaagtgagtggtgtggattgattggtttattcatagatatgtatataaaactacaatgttaccatacagattctgttgtagtttattcatatatatatatatatatatatatatatatatatatwtaaatgcaatgttaccatacagattctattgtagtttattcatatatatatatatatatatatatatatatatatatatatatatatatataatgttaccatacagattctcttgctggcacactgtaaatagttcgttcttttaatgtttggcttttgcagagtgagttttctttaagtggggctaccccatgtttcagagccctttgccttttcctggagtcaaggagttgtgggtggtggttctagggtgcccagtggggaggcagctgtggtggacagcaaagatccccctcagggacccctggcacagacaatgggattggacagcccccgatgactcctaggtctgtggcctgtcttggggcactcctgcagggcatggggaaatttaacratgaagataataatgaatattgactgaacatttaccatgggccaggcctcgtaytgagaactttacttttttgagacagagtctcgctctgtagcccaggctggagtgcagtggcatgatcttggctcactgcaacttccgcctcccaggttcaagcgattctcatgtctcaacctcccaagtagctgggattacagctgtccaccaccacacctagctaatttttatctttttagtagagacggggttttaccatgttggccgggctggtctcgaactcctgagcttcaggcgatctacctgccttggcctcccaaagtgttgggattacaggcgtaagccaccacgcctagctttacatgttctaatgcatataatttcccttcccttccctcccttcccctcccctcccctcccttccccttctgttcccttcccttcccttcttgaggcagggtcttgctctgtggcccgggctggtgtatagtcttgccatgaaagctcactgcagctttgacctcctgggctcgagtgatcctcctacctgagccgctgagaccacaggcagacgccactacacccagctatttattttattttttatacagacaggatcttaccatgttgcccagactggtcttaaactcctgggctcaagtgatctcccgcctcagcctcccaaagtgctgagattacaggtgtgagccaccacaactggctaggtatgattcttacaaataaacgatgtctagtttgagacaatgtgccagcactcactggggcagacacagaagtagcaacaatactgatactagctaatgctctcaggccctcgagatgagccaggcacaatcacaagcacttttcatatatttaatactcatttactacttttaaaatttcaatagttttgggggtataggtggtttttggttacgtgggtaagttctttagtggtaaattaggagattttagggcacccattcgtcacccaagcagtgtacaccatacccaatatgtaatcttttgtccctcaccccccatcccagccttgtcccctgagtcccatagtctattgtatcactttatgcctttaggtccccacagcttagctcccacttataagtgagaacatgcggtatttggttttccattcctgagttacttcacttagaataatgccctccccatctatccaacttgctacaaaagacattattttgttcctttttatggctgagtagtattccatggtgtatatataccacattttctttttctttctttctttctttctttttttttttttttttttttgagacagagttttgcttttgtctcccaggctggagtacggtggtgtaatctcagctcactgcaacctccacctcctgggttggagcgattctcctgccttagcttccttagtagctgggattacaggtgcccaccaccacacctggctaatttgtgtatttttggtagagacagtgtttcaccatgttggccaggctggtctcagattcctaacctcaggtgatccccccacctcagcctcccaaagtgctgggattgcaggcgtgagccaccgcacccggtcaccacattttctttatctgctcattggttgatgggcacttaggttggttccrtatctttgcagttgtgaattgtgctgcaataagtatgcatgagcatgtgtctttttcatatgatgagttttcctctgagtagatacccaggagtgggattcctggattgaatggtagttctacttttggttttttaaggcaggggtctccaacccctgcgttaggacccaggccgcacagtaagaggtgagtggtgcgcragctatcaaagctgagctcggcctactgtcagatcggtggccacattagagtccagaagagctcgaaccctcttgtgaactgcatatacaagggatctaggttgtgcgctccttatgagaatctaatacctgatgatctgtcactggatatattacatgtaataatatatccatgtatatacattatatattacaatgtaatagtaatagaaataaagtgcacaataaatgtaacgtgcttgaaccacctcgaaaccaccacctccccacccccatctcccttccccagaccatggaaaaattgtcttccacgaaactggttcctggtgccaaaaatgttggggaccgctgctttaaggaatctccacactgtttcccatagtggttgtactaatttacattcccaccagcagtgaaaagcrttcccttttcaccacatccatgccaacrttattgttttttaagtttttttttttttttgagacggagttttgctctcgttgcccaggctagagtccaatggtacaatcttggctcaccacaacctctgcctcccgggttcaagcgattctcctgcctcagcctcccaagtagctgggattacatgttctaatgccaccatgcctggctaaattttttgtatttttagtagagatggggtttcattattttggccaggctggtctcaaactcctgaccttgtgatccacctgcctcagcctcccaaagtgctgggattacaggcgggaaccaccttgcccagcctgtgagccttttgagaaatgtctattcatgtcctgtgcccactttttgatgggattatttgtttttctcttcatttaatgctttatttttatttatttattttttgagatagagtctcactctgtcacccaggctacagtgcagtggtgtgatctcaggtcactgcagccttgacttcctgggctccagtgatcctcccatctcagcctcctgagtagctgggaccacaggcacccccctcttcacacccgtctaacttttgtatttttggtagagacggggtttcgccatgttgcccaggctggtctcgaactcctggcctcaagtgatccacctgcctcgtgctcccaaagtgctgagattatagtctgagccactgtgcccggcctcatgtaatactttaaaacccctatgagtgaattattattacaccatttgaaaaatgagactattgaggtaagagaggctaagaaccgtacccaaggccacgcagcttctgggcttcagagctaggatgtggcctgggcggctgcctgtggttcactgtaccacactgtctgcccagcacttggggtacccagtattgttgtgttccggacctggagcagagcctgggcagagagaacagtgtggataaargattggagtcctgagagaatgcggcacgtggagaactttaagtgatttaggggctgcagcatgacctgtggatctagactcctggctgaagacacagccggccctgggcccagcaggcccttgcagtgtggtagaggatccagccttggcctctggcaacaaggagctctggggaccccggagtagggagtggtgcatcagaaagctcattctgrgctgggcgcagtggctcatgcctgtaattccaacactttgggaggctgaggcggtggatcacctgaggtcaggagttagagaccagcctgggcaacatggcaaaamcccgcctctactaaaaatacaaaaataagccgggcgtgatggcatgggcctgtagtcccagctacttgggagactgaggcaggagaattgcttgaactcagaaggcagaggttgtagttcttttaaaagaactacaatcctttatccagtgagctgagatcgcgccaactacaatcctttatccagtgagctgagatcacggcaactacartcctttatccagtgagctgagatcgtgccactgcacttcagcctgggcgacaaagcgagactccrtctcaaaaagaaaaaaaaaaaaraagaaagaaagaaagaaagaaagctcattctggtggctgcctgttgtgtggccgtgggcagagagcagacagggagakgcaacaaatgcaaggagattgggggcagccaaggatatcgcatgcagtgttggagacctttcaaatgagaggacaaggaggtgaggagggcrgggagggcagtggtcttggttcagggggacttgggtttctggctctagaggagggaggttgggggtgccattcactggggcagatgtgccagatggggagaggtcggggcaatggggcaagagatcacaggttccatttggggcttatggtgtctgaratgcttggcagggtgtgtggagtctccctgtagctcctccaccgaggggtgtccagccccacagaatgaaggaccaggcaagacaggcaggaagcccccaccatgccctcgcccctctrcacctgcgtytccactcacaggtcgacacactcactcctttaccctcatacaccccaggcctggacgctggcaccatgcagggtggggagggctatgggagagccttgccctgggagaggggctggcagctctggacttacatctactccacatttccaggccaggaaaccagtatcctggaagctgtccctgctccccrttgggctggatgccagcatggagattcatgcttttcagcccaaacctcacattgtcctgggatgggacctccatgcctgggtccctgggcttgccagccacagggagagatctgtacatgcccatctgtgtgaaggccctgcaagcccagccgcttagctgtaccgaggcaggggaggggtgcacagggagatggagacacgggaggaggaagctcgggctctgctctcgggagctcacaatctgtgggggtcaaggaaggaggttatccaggcccttccttacagggttcccaatctgggggcagtggaggggagacctggccctggctcagcggcgcctgggggacacttaaggcaggttgtaaacctttcttgagaggtgagtgctgaaggakccaggaggacttcctgkaagaggggaactgtgggctgcttgtttgtcctctctagtgaacaggaggtgctgacctccaatggaagcagtgaagcgggcttgggtgagattccagtggagccaggggtctccctccgcagcacgtgctgctatgcgtcatgcctaatatctcacagctagaaatgaatagagccagaagtccaatgcccgcgggtctgcctgatgccggggctcttgttttgatgtcctggaggcagcgctgtgttgattggagaaagtgtggccttcactctgcgtcccagggttaccagggacacactgccctgcctgtgcctgttcggaggaccaaactgcaatgtcagaaggtctgtccagctcctacagtgactgtcatgttctgagtgtgtccccctggagctctgagacaaatgccaggacaaatgtcgtgggtgggccaggaccacaggagcgcctgctaagaagctctcaacagctcacccaaaggagggtgatagaggcaacagaagtgcagcggccacccctacctgctctctctgagcagctgggccaggttggctgcaggggaaatatgtctactggccctctcagagagagtccggtcctcgcgcagctgggcgtctaagcccagactccttcctgggctggtacctgcccctccagtttccatggagccggctgctttccccgggcaggtgggttttattggaaccctcttgcgtctgtttcctgaaaccattttctaacggcattgcggaacatcatatatatttcctacaaaccttgggaggctgacacatccttgttgtgactgtgaacatcagaagtgacatgtaattgcagtgatccatcctgttaagtagctggcaatacattatctcaaaatcagcagggctggaactctcagaacccagtgtttctaaacaatgcacctgcagcttcaaactctcttcctgaacagcgcccaaggctggcaagggccacctcgccctcccatgcctcacttttcctgggccacagcagagacaatttcactccagggaaagccacctactgggttttcagtactcctggagtgccttctccttgtcacctaatgcaccaggctctccgctcagggctgtgggtggggtccttgtcacagtgtttcttccaagcgtggctctggaagtcctgccctccttttttctcataaactccagaatgtcttcgtgggggttcctyctaggccaggccagccatcattatgcacaattggaggtggggaggggcagagagggtggccagagcccaggggcacagaaagccaagccccagttgctactttgcacccagcagggacacacccacactgtgctttatgctaattctggggtatggttcacatagattgcagtgtgaagggtgtcccctggagttgtgcaaagaccagtactgatggagggatggacatggagygctccttgcgtggtgattgcccaagtgccagaaataggcagggtcggaacatggaaccttcaggtctggataccccgagcctagtgggtttgatgcgtctgggcggtgctagctttgggaccatcattgaattctgctgtttgagggtgggggtcatgaaggaccttcactgccacactccctgggaggccctgatttggagggggagcccactgtggaccctgtctctgcagtgaaagtttctcagttcaagcctctctcacctgagcccrggccgytccccttagcagtgccatcctgtgtcttcccagtcttctacgtggccacgatttcctgggttcctccaccccctgcaattggagtgaatattcgcctcttcctgcagaagacaccctgggggtctctagccagagcctcactttcctttggtacattaaaatatgctaaatgaaaaataatgagcatgtaggaagtaataacaggaatcacctaattaaattaggaaacagacatcacatcgctgtaatmtgaaaattgatattaatagaaacggtcccagaattgttatgmtaaargttcctaggggcggggaaattaaaaaggagagcagaatagaaaattgggacaatcatgtccaataagagtgagacttatgttttaaaaggaactacagtaacatgctaaaaatagaagaggagatctaatgaagtcatggacaaaagtggctttgaaaaccgcagagctccaacgcacgtgtatgatggtaatttataaaatgagacaatgtaatcaagcttcaatgtgcatgaaatgtagtcagggttattgtttattgggtgcctggcacgtggtactcattctattttccctcgccctcctcggcaggcgtctttatcctcaactgaaacttagggagattcattcatttacccaaagtcctgaagcctgcgtggctcagccaggatttgaccccagatctgcctgattccaaagcctgtgctcccccttctctgtccttctttccttttgctattagttaatgtcatggtctatatgtttgtttgtttgtttgtttttgttttttgagatggaatctcgctgtgtcacccaggctggatctcagctcactgcaacttccgcctcccaagttcaagcgattctcctgtctcagcctcccgagtaggtgggattacaggcatgcaccaccactcccagtttattttgtatttttagtaaagacggagtttcaccatgttggccaggctggtctcaaactcctgacctcggtgatccaccacaggaatccacctgccttggcatcccaaagtgctgggattataggcgtgagccaccacacccggcctatgttttgttttaaggtaaggggtcttgctctgtcacccaggctgcagtgcagtggcatgatcatagctctctgccacctcaaactcctcgatatttcttttcttttctgatgttattctaccatttttctcaaaggacatttcttgccaacacccagcagattgtggcaactgtcagctccccaaaccgaagccccaaggctcttccattggttgaattaataaaacctacaacaaagacaccttctgaaatttcagtccaactggaaaactgggtctcccattatgtgggggcctgggcagggtccaggaggggcaggcggttccgatgcttgtcctgcgtccccaggtagccccagtgttgggttgcgtctccacagtggccaattgttccccagaggacccccgagggggatgaatctggctctgttcacctgccgtgtgagtcacagcccagagggcccagagcaggtctcaggtgtggagtgaccccgttcccactctgcctggcccagaatgcattggagggaccgggrgaggaggaagcggaggtcacartctgtgcatgagatgcctcasgattacctcgggtctggagtgctgggactgctccgagggccaggcattgagcccaaggaggactgaaggctgggggctggggagggatgccacatggctggacttcttttccctcctcctgtgcctacacctcccccacctctgttcccattcactgcctgagcatcttcagtgagagtcacctggcatcagagccaagcctcccgcacagcccagggcagctgccgtggagaggtggagggcaggggagactccactccccaagtggcaccaggctccaaagaggcccgaggtagggggccctttgcccggctctgtccccttcccccagcctcacttggcctggagtctcagggccaagggggagggcctggagacatccagtgggttgaaacggggcacacccactgccagcatgaagaagggcccggtggggtcccaccgtgtgccaaccctcctgatgtcctcgagcccctgttcctaacacaggcagcagggaagtggtgaggagtccacccacgctccaaggacagggctgttgctacgattgctgtccttctccatggccactgcgtaggtcttggttttttaaaactctgaaaaagttacggtggtagttatgacaacagaagcctggaggtccagttctggaggccaaatgcgtgggtcsgtaggggcgggcgcgggcccacacaccctggggctagacgcaccttctgctgggctccaactgcctgccggtggggttatcccgctcttgcattgaggttgacaccatttgtggtgcctttagggtcactgcagatccccctctccttctcacaatatttgcagaagttgggagcctctgggcggatctcatttaagccaaaaaagcttcaccattatatgcctgctgatgttttcattatgaagcttattttccaggatttgtggctctgcagttttgacttgaatcatagtggaagtcagtggaagattcgctcattttgaaattttattttatgtggggaaaatagctgagcttaaatcggttcagttgtgccctctgacagctgccactggggagtccctgcacagcgcaggctcctagtggggggtggaggagctcctgggggcttctcatgttcgcgtctggggtcccagagggaagtcgggggctgcctgtcatcttgccctcaggcctggatgaggcatttttcarccctccccaaaaggcctgaagacttctgagagggtgggctggccccatcctagctccccaccaagctctgtgcctggtcttggttttccaccagggcgggactgcagggatgatgatcygtgagcccctcactacatctggttgtgtccaaaggtgcttcaccatgggaaggctgctcctggcattcctcaagtcctggatggagtcccaagaccccatcccacctcctccaaaggctacagccatttatgagtgcatttgacctttgccctcagggtctgggtctgcattggagggaggggaatgaggagatgtccatgggaactgtgcagggtcactgggatccatcagacagtaggcctgacagagccacagggagcgggagaccacaggatgggggaaaggggatggggtgagggggaagtggacagacaggccccagggccaggggccaccgatgctccactccagcccagagctctgtgcaggagtgtaagtccagggtggccaggtcatcctttttgtttttgttttgttttttataaaagctaagaatctggccaggtgcagtggctcacacctgtaatcccagcactttgggaggccgaagcaggcggatcacttgaggtcaggagttcgagactagcctggccaacgtggtgaaaccccatctctactaaaattacaaaatttagccggagttggtggcaggcacctataatcccaggtatttaggaggccgaggcaggagaatagcttgaacccaggaggtggaagttgcagtgagctgaaatcacgcactacattccagcttgggcgacagagtgagatgctgtcttaaaaaaaaaaaaaaaaagctaagaatcggtaacatacatttatgtggattctcctgattttaaaggggcagctctaatttggaatgtgttttttaacgttagataataggtgatgtttggcacctactgttggttggatgggctgggaggactagatctttccaataccctaaacccccgtagggctgagacctgccccctaggccctatttggctccatgcctgctctccctataccccctgggaggacacagaggaggtgggtctcctggtgggaaggggatgctaagaattacttccagccccataggacccccatgaagccagaccccaagcggtccatgagcagagcatctcctgggctccgctgaccaacagtggctgcacagagcccctcagtggcattgtttggttcagcagccgggagccctgccagatacctgttcactgttcaggtcaggcaggggacctgaggggtcggggaggtgactggtcagcagagatacagggaaggcaagggccagagagtggggttctggggagcgcacctaattaaaacctccttcatttacgcacagttactcacatgcaaatatttgcacccactgacaagcttctgttgctgtagcaaaggaagaatcaattcaagcaaagctttcctgcgagtgggcactctctccagtatctacctggagatgcgggtgtgggtgcccgtgggtgtaaatggaggaggatttctgacttggcagcctgcttcccacagtgatggggtgtggcaggcawggccaccctggctccctttctgcccccctagggcaccatggcagccacactcagcaagggtccctttggagaggggcctggcctggcccagcaagggactctgcagattcgccttccctgctgcctctgtgtcacagcgatgtccccagtactaggagagggacccaagagtcctgagagcattcaaggaggtggcatccaggggtgtggtatgggcaatgatgatggtgtgagcactcagtgcctactgtgtaccaggcactgtgttttacatgctttaccaatatcctcatgccagagcctcgctgtacccgtctctattttatagatgaaaaaactgaagcacagagaggcaaagtcacttgcccaaggtcacacagccaggaagtatcagtgcttgaactaaaacccggttcctcagatcccaaaagtctgaagtcttcttggtgaccggacaaccactcagggctgggagcaagcaccacactatgagatgcatggcattggagggccagcctgggttagaggttggggagctgcacggcactgcccttcagactgtcagggcgtgcttcattcctgctcacagcagacatgttctggttcttgtgcacacgtgtgtgtgtcctgatgaagagtcaggtgcccatgtgtgtgcatgtgtgtgtgcatctggccctcacccataatcctagctgtgtacaagtatgtgtgctcacctcagtattactatacacccatgggtggacagatgccttacggttcatgtggaaagcacttcaccctgaagtctgggctggctgctgtgagcgtaccctgacaatgtcacctgccaggtcatggggcaggcaggggcaaatgacttgggccccacagagtgagttgtctgtcggttgtcagccacaggattgggtgacaaattgccattccagcaggcactcagcaaagccaattattgtaaccccttgcccacgacccgcacagaccaaataatgaaattacattcataatatttcaggtcaagtgatcgctgcttgaattagttccttcccagaacccagccagaagtagcggcagtaattaaaggattttctgggcttaaatcaactgtgcgcgtcaagcgtgtacaacacacagagcttgcaaaatgtgtgcaggcctcgtcccttcactggggagtgaaaaggacaggccatgattgtgggaggaccacaggccgggaggaggtgtgttattcctgccagggaaattttccactttcactcacttattttagagacgtttactgaaagatccctgctccaatggggcctcacagtgagtaaggtgatggggactttctggggtccaccctgactcctcccaagcaggtattttagcagtgttgcaggggtagggtgctgtgtttcccagactaaagtgcaggtcagagttcactgcagctttaaactcctgggctcaagcgatcctcccacctcagcctccccagtagctgggaccacaggcacatgccactgtgcccggctaactttccaatttttctgtagagacagggtcttgctgtgttgcccaggctagtcttgaactccttgcctcaagtgattctcctgccttggcctgccaaagtgctgggattrcacgcatgagccacctagcctgacctaattttaggataattccattgcccccgccactaaatcttttgtgcccacttcaatcactccccattttcaccctcagccccaggcaactacaaatctcctttttatcactatagcrctaccctttctaaacatttcatatcaatgtaatcatacactgtgtggtctatcatatctggtttctttcactctgcatgatggttttgagagtcatattttttgatatttactcatatcagtttgtttctttttattgtcaaataatattattctattacatggaattgcggttgatctgttcaccagctgctggatacgggattgttgatacttttggccattaggactaatgctgctatgaacattcatgtgaaagtttttatgcaaacctatgttttcatttttcttgggtaratatttaggagtagaatggctaggttgtaatagtaaatttacgttaaatttaagggatactgacaaactgttggctaaaattgctgtaccattttacattctcaccagcagggtatgaaggttccaattgctccacattctcatcaagacttgttattatctrtctttttaattatagctattctagtgggtgtgaagtggtgtctcattgtggttttaatttgcatctctctaatgagtactattaagcatattttcatgtgcttattagccatttggatatattctttagtgaaatatctattcaaggcttggcccattttaaaaattggtttatttatctttttattgtgttgtaattattttctagatataagtattatttgacttgcaaataacttatcccatctgtggcttgtcttttcattttcttaatagtgtcttctggagtggaaaagtttctaaatttgaaaaagtgcaattcaacatgtttttcgttgatggattatgctttttgtgttgcgtctaagaaattttttcctaatcttagccataaagattttctcttatgttttcttctaagtttttaagttttggctgttacatctgtgtctgcggtccattttgagccacgttttgtgtattgtgtgaggtctgacttcttctctttgcatgtgaatatccagttatcccagttcccagcacgtgctgaagactatctgttccctatcraattgccttcgcaccttggtcaaaaataaattgaccataaatttaagagtttatttctggaatctcaatttatttcattgatctgtatgtctattcttttgccaatagtgcagtgtcttgattagtatagatttataaaaagttgtgaaatcaggaagtgtaaatccttcagctttgttctttttcaaaaccattttgggtattctgagtcttttgcatttccatgtaaattttaggatcagctcatcaatttctgccaaaaagaacaacacctgctgtgacttgataggaatggcattgactgtaataataaacttgagagaattgtcttcttaacaatattgaatcttacaatccatgaacrtggaatgtctctccacttgtttaaatcatctttaattcttcttaccattatattgtagctttcagtatacaagtcttatctttctttagttaaatttattcctaagtattttactctttttgatgctacagtgaatggaattgtttttctaatttaattttgggatcattcattgctaatatatagaaatacaattgatttttgtatatttatcttggaacctgtaatttgttagttaattctaattgtttatgtaaattccctaagattttctacatacagaattatgctctctgcaaataatgagatgtttacatcgtcatttccagctcgaatgccttttatttctttttcctgcctgattcaactgactagaacctctagtatggtaggaaattgaagtggtgagagtagacattcatgctttattccggatcttaggggaaaaacattccatctttcaccaataagtataatggttgctctaggatttttgcaaatgacttttatgaccttcaggaaattgtcttctattactagtttattagaaaaaaaaatttaaccatgaataggtgttggattttgtcaaatacttgttctacatctattgagatgtttatgttgtttcatcctttattctgtcaaaacggtgtattatattgatacattagcctcacattcttgtgataaatctcacttggtcatggtgtataatcctttttatatgttactgaattaagtttgctcaaattttgttgtggattttttttttttgagggatagttgtagttttcttgtgatgtctttatctggctttgctatcagattaatacaggatttaaaatgaattgggaagtatttttacctcctcctaccctatttctctggaatagtttagggaggattggcattatttctttttaaatgtttattagaatttatcagtgaagatatctgagactagacttttctttgtgagacattactttttttaaagatggagttttgctattgttgcccaggctggcctctaactcctaggctcaagagaacctcctgcctcagcctcctaagtagctgggactacaggttcatgccactacacctggctccagactttaaaattttaaatttctagctcaatgtcttcaccatagttctattcaggttttctatttcttcttgagtcagctctagtaatttatgtctttctagggctttgttcatgtctttctagggctttgttcatktcattcaagttgtctcatttgtttagcataacagtgttcatagtattctcttataatcactagtgatgtcctcattttcattcatgatgttagtagtttgtattgtctctctgttttctttcaaagtctagctaaaggtttgtcaattttgttgatcttttcaaagaaccaacttttagtttcattgtttttgtctgttgttttcctgctttgtattttattatttccttkctttagtttgcttcaggtttagtttgtccttttttcctctcttttgtttgctttatttgttacttcctctcttttgtttgcttcagatctagtttgttcttcttttttcatttcttaaggtggaagattaggctattgatttgagattcttcttttctaatatagacattactgctataaattttcctctaagcactgtgttagctttagtcaactttaattgtctgatttccagatcttcttattaaatttctgtctgatctgctgatctattggttctaccaattttatcacaaccttgggctagctaagatttttgaattattttcagcaacactcttgggcatggaattttccaatcaatcaatgttcatgcctgattccccttggtagaatgtaagcccccagggaactgggcaaggtgatgaaagcagccccaggctacaatgccataacctcacactgttcagtagattttcttgaataaacgcttcttgatatgttgtatgcttttggtcaatttctggagtttttttttttttttttaaggggtagggtctcactctgtcacccagactggagtgcagaggtatgatcatagctcactgcagcctcaagctcctgagctcaggcgatcctccctcagccccccaagtagctggaactacaagcatatatgaccatgtccagctaatttctttattttttgttgagagaggcatctcactatattatctaggctggtcttgaactcctgatatcaagcaatcttcctgccttggcctttcagagtgctgggattaccagtgtgagccaccatgcctggcccaaactttttaaatggtgatggttgttgtttttcctgttccgtcatttcattttgggaaagaagctaccaggcttctcactcagytctttcagaagccctaagtctaggactggggtcttgatatctacacagacaggagatgaggtctctgactcaaccacagtgctgagctggaagtgcaactgctctgtaaatagagccctcagaaggtatcagaacctctggccattggtggagtatgttgggacaatcctagtttacacctgtggcctggtgtaattattatcagtgcccccttactctcagaagtgggtttatttgatgataaatcatatggtcattgtgtagtataaattattgtatacttctgtacttctgtaagaagaaaatgcaaccagaaagaatggatacaagaagtagtagtaaggaaataaattgtaggaacattgttaagtataaataagtatttactttttttggtgagacagaatctttgtcacccaggctggagtgcagtggcatgatcttggctcactgcaacctccatctcccaggttcaagcaattatcgtgcctcagcctcccgagtacctgggattataggtgcacgccaccacacccagctaatttttgtattttttagtagagatggggtttcaccatgttggccaggctggtctcgaactcctgacctcaaatgatctgcctgccttggcctcccaaagtgctgggattacagatgtgagccaccacacccagccaatatttactttaaaaataataaacactaattttgccagtgtgtaaggacagcgacaacgtggaagtttagacaggaaaccgtaattggaatgaaaaggtctataagatctttatgttgttagggaagacaataaggatagtaaaacaaacaaagaaacaaaaaccaactttggactttatttaaaacaaggctagtcactggaattgtgatgtatattttctggcctctgcactgacccctcccagtagagcccactcctagagctgggtggctgtttaatcacttcccgttcacccgattggtgaggggggattcccatccatggttatggggatggccagcactcaacactggacagaagagatcaacagcagtttatttgttattatgcccaagcctgggggaggaggattgcaggggttgcactcggaaacagggtggacaagcgggggctgtgggaggcaggctttgtagtatcaagaaggtgaggtgacccctggttgctgtgggaggatgtcatgggtttgtttgaataattccatgggcgggcagggagtgaaacctgctacttgtgaatcagcaggcactgtgcctagtcccttgataagtaggtcatttggctgggggacttatccaagcgaacagtggggagaggaacttgccgttagtccatttgcagccgcccacacttgctccaggtgtcaaggtagcacataattttaagggtcttaactttaggccttgcactgcagcggcagactgtctcacaggagcytaagggtgggagcactccctctatcytgagtaggggctgacccaagccaagtgagttgaggaggagactccttgcccgagtctcaaaacccccacccccaactttggtgctgggatcccctgctcagtgtctgccctgatcaccctctgccctctcactctgcctgtctgtatattggtctctaccatctgtccatcttcactttcagggacgtgctgtcaaaatccatagccctggggctcatttgtggctcctccttcaatgatgtatatggaggctggccaacccatgtggccctcgccccatggagagcagctgggcatcgttgatgaggtgctgagcccagcatcgggtggctggcactcatactccccaccagccataggcaaccccagcctcctctgacataagcccctccatccctgacacacatgagggggtccatagcctagcagtgctcactgtcatcccaagacctaatgtgattctgtgggtgggtgcaggtgaagttcacctgctgcttctcgctacccacagcagtctgtggagatgccacatcttcctttcaagatctgcgatctcctaatggaggaaggaggattggctcccctggtaggccaccatcacctgggagatgcaatggtgccctcccaggggagccaattatgcaatggcatgcttggtgagtgacattctcatgaacgccactgcagcctgggcagttggccaagcagctgcccacttccctcttttcctacagggtctccatttctcctgggagcatatagctctcaggcaaaacctgagtattctgagttatgtccactggggaggctggcactggggctttttttgtttttgtttttgtttttttgagacagagtcttgctctgttgccctggctggagtgcagtgacaccatctgggctcactgcaacctccaactcccaggttcaagtgcccctgtctacctcctaaatagataggattacaggtacctgccaccacgcccggctaatttttgtgtttttagtagcgacagggtttcaccatgttggccaggctggtctcaaactcctgacttcgaacgggcacccgccttggcctcctagtgttggaattacaggcgttgagttaccacacccagccactgggggttttgaacctgccactcktttgagctgcagaatccctgacagagcctggctgaggagtgcagggctgggggcaagaacagccagaacactgtggcttccttcaatctacctgcaccaggaggggcaggcgttgcttagaacaacagttctcaaccttgactgcttgttaggatcacctgtggaggtgttaaaaaccccagtgtcctctatggaaaacagtatggagatttctcaaacaactaaaagtaaaactaccatttgatcccgcagttccactaccgggctatctacccaaaggaaaagaagtcactctataaaaaagacacctgccttatatttcttgcagcagtactattcacagtagctaagtcttggaatcaacctaaatgtccaccaagagagaattcggtaaagaaaatctggtacatatataccatggaatactatgcagccataaaaaaagaatgaaatcatgtcttttgctgcaatgtggatggaactggaggccattatcctaagtgaaataactcagaaacagtcaaataccacatgttctcagtaagtgggagctaaacgatgggtacccatggacatacagaatggtatgatagacattggagactcaaaggtgggaggataagaggggcacgggggaggaaaaaacctattgggtacaaagcacactatttgggtgatgggtacactaaaagcctggacttcaccactaatatggtttggctgtgtccccatccaaatctcatcttgaattgtaactcccacaattcccacatgtcctgggagggacccagtgggaggtgattgaatcatgggagtgggtctttcctgtgctgttctcgtgatagtgaatgagtctcatgagatctgatggttttgaaaaggggaatttcccacacagtctctctcttctcttgtttgctgccatgtgagacatgcctgtcatcttctgccatgattgtgaggcctccccagccacatggaactgtgagtccaataaacctctttcttttgtaaattgcccagtctttagtatgtctttatcagcagcatgaaaatggacaatacacctctgcagcccaccctgagagatccagccagcccctccctccacaggctctgtcccagcaccatggtgacttgtcacttctccctccattcctgttcctcaagatcactcctccacacaattgctctgttcatatttgccctgttgccctccaagcttctccagacaagaaagaactttggtcctgcccttgaccaagtcactttctcaccctgtgccctggtcctccccttccyractcgcccagggctgctgtttggtcaaggtcatggacgtgtgtgaatgccagaagctcccaatcccctctctggctgtggcatcacctgccttgtcctgctgtctccagcatgatctcagcccctgctggagctcagacccatgtgggtaacatggggctcttggctgggtggtagcagtttctcctggaaactggggtcagggagagaaatcagtgacacagagggcctgtttctgaacagatagataggatcagaccttgagagacaacttgataggatagtaatttaggaaatggaaggcagaatttccttgggcctgtcagctctgcatcccagcatgcttctggttgccttgacaactcaacaggttaaacttcttttctgggcatcagtgtctgctcaggcaggaggtgacagaacccctggaggtgtscagatcttcagcaggcagatgactcagagctcaggctgaccttcaccttgctgggctagctggccttgggttgtccctggctgcctgcatgagcttacgatcatgtccaaccagctgcctctgcctcctatccctcctattcatccatccattcatccatctgtttatccagtaagcagtcattgagcacctgctgtgtgcctggccycatgctagcttctccaggcaggtacatgagttcctggccctctctccaggtcaaacaggaataagctgggaggtcaggaagtccatagaggctttacacctggcatatgtgtgggtccatttagaaagatactctcaacacatgcaatgttgcaagcctgtcacccaacgtctaccagacccttcttatagatgcgtcatttgcaaaaacaaaaacagtctgttttctttcacttaacactgcagggtggacctcttaacctctttccatatcgagacggatttttttcacccatttcagtggctttcagtgttcgttgtaaagatgcaccattagtttatttagccagctcctttctggttcatatttaaactgtttgtagttttatggctattcctgaattatttctgtttcctcygatgtcatctttttctgtttgcttcttttgatgtctcttgtggtggaggctgtcctcagatgcytgatgagccctagttacccattcatagttgagagtggagcaataaacatgtgattgattttgttttgtttttgagacagggtctcactcggtcacccagactggagtacagtggcacgatcacgactcaccacagcctccacttcctaggctcaagcaatcctcctaccccagccttttcagtagctgggactacaggtgtgtgccaccatgcctggctaattttgtttcctttttgtagagacaaggtcttactctgttgcccaggctgatctcgaactcctgggctgaagcgatcctcccgcactggcctctcaaggtgctggaattacagatgtragccaccacacccagccacctgattttgtaatcggaaggagggggaagagcttttcttcagggtattcgggtgaggagtcaaccctcttggttccaagggagaatcattagttggctagggttgctgtagcaaagtattatggactaagtggcttaaacaacagaaatgtgttttttcacagtcctggaggccaggagtctgagatcaaggcattgggcagcgtcggtttcttctgggacctttctcctgggtttgtagatggccatcttctccctgtgtcctcccatggttttccctctgcccctgtctgcatcagaatttcctctttataaggatacccgttctagggatcactagggtacactctaatgactccatttttgataccggtgggctgggggaggtcctcgaatgccagtggggcctcaaccccagccagtgtccaggctcttgacacccttgcaagaaggaattcagaaaatagtgcaagtatagggatttattacaaagtgaaaagtacatgctctggctgggtgaggtggctcatgcttataatcccagcactttgggaggccaaggcagrcagatcacctgaggttgggagttcgagaccagcctgaccaatatggtgagaccctgtctctaataaaaatacaaaaattagccrggcgtggtggtgcgcgcctgtagtcccagcttctcaggaggctgagacaggagaattgcttgaacccaggaggcagaggttgcagtgagccgagatcacaccactgcactccagcctgggcaacagagcgagactccatctcaaaaaagaaaaaaaaagtacacgctcaagaaaggagtgccggcagactcaagagtcgtgtggtggggtgtggggctgctacctttatgcgtttatttaatccaggggtggaatattcatgaaaattcctgggaaaaaagtggagatttcttagaactgtagtgccacacgtttttacaccaaacatgggtggtctcggaactgtcacagcactggtgggtgagtgagttaggatgytaatgagcatacagcgaggtcctaggagaaaccgaggtcatatctagtgccatgttgggcccagttggtcttagccagcttggtccacaccctgtttttcagggtgtcatatgaaactactgcctggaatttttattctcctgtggccaccttgtattattcctgtctcattttaacttaattacctctgcaaagactctatctgcagtcacattcagaggtactgggggttaggacttcaaggtggatttggaggggaatgcagttcattctataccaaacggacttgcagtctccatcctggcagaagacccccagtgtgtacaggaccggaaggcagccagggctttgatcactctgtctgaagcctcccagttagtcctctgaaagcagtgctccctgctcctcctcccagcttggagtccataggttatttgcagtttcctcagcaggtacatcttccatctcccgccaggggtgcagtaggggatagttgcctggtcactggattgtctttttttctttctttttttttttttttaaacagactcttgctctgttgcccaggctggactacagtggcccaatcaagctcactgctgctttgaactcctggactcaagtgatcctcccatcttggcctcccaaagtgctgggattacaggcgtgagcckctgtgcccaactgccactagatttttaagcccacatttcacccctgccatctgcctgtcctggtgcttccaagtcctgcactttgctgcattctgtggggcaaggcagtcttccccgcactcctctgcaggctcagctagcatgtccccttcaccctgtagaatctgctcccaccctccgtccccttcccatcttccaaaatcatgttgcaatctggcatctgctgctgttcctctctagctctcttcattaccatgggcccctctgtttcattccttcgctgtcattatgctgggatctcaggaggaagatgagctcaacgtacacgttcagtccctgtgtttacccagaatcctcctggcttctccccaagaagaggtcagagccgcagcctgcggaggagggtgttgaggcagctcagccagcatgaggctggccctgctggatccagtggggagaggtcacggtcccctagggctgaggagggagagagagagctgtgggcggggcctgtgcatctgtccttggagtcctgaagtcttgaatctctgttgctactgagagggaaggaggcctccaggtcttgctctgcactacaggggctctggacttgttggagaggtgtctcttcactccagggcttccacccgagacctgggctcccgggactgggtgtgcccagcctcctctcccccacccccctgccagtgatgtcataggtgtgacactgcagccaaagaccaggcgaactcaggcgggtgtctaccacctccaaaataaaacgtgttttctaaactgttgctgaagctgctgaaatgttttgtaaaatgtttacacctcccttgatataaggcaaataccttctgtcagccgggggtgggccgggtgggggagccctgggcggggaggcaggatcaagtggctctggtgtcattggtgacacccatgtgtgttcactcctggtggaatttctcctctcaaggtctctctgtccttgctggggagatggggactgggtccttggacacttctgttttaggaagcctaagctcactgaggaattgttctaggggaagtgtctttgaaggaggtgaggcagacacgaagtccaaagctgaggggatggggagttgctgaaaatgagtgttccctggagagtggcaaccatccctrgaggtggcaggcgctgagagacagaactcggggggacacctagggagactggactgcagccccagggctgacttcccagccatctgaccagagggaatggaaggcagagatcccccagacaccccaggctgtctgggtccagggagcttcacagggtcctaaagagggggatggggacctggagcaatttactgtgagttacaaaaaaaaaaaaaatcacatgcagtcggacctgaaccatgcacagtgagcctggctttacacttgagcatgacacgtgatacccactgtctcctccagcagctctcttgaaggccagggaagccagcccrtccgtgacctctgtgacagagctactgctgcagccacacactcagtgtgtcaggcactagatagaaatggaaaggcttcaggccacacacaaggccgtggggctccagcttcccctctgggagagcttcggcactacatgttctctcctaggcagcactgtggtgtcggcagccccgctgtctgtacacacagctcctccgccaggctggagtcaccctctatgcccagaaactcccacggaagaagggcatgggcagctcctcataccatggggagggacaggagggactgtgtgggcctggtggtgacatgcacacatgacatacacccatacatgtaccacacatacacaccccataccccatacacacgccacacatacaccacacatacgcaggccacacacacatacacactcccacacacacatcacatatacacactgcacacacacaccacacatacatacacaccacacatgcatcacacataccccacatacaccacacatgcaccacacaccccgcacacatgtaccacacacatgcaccacacatatataccacacatacccacactgcacacacatgcaccacacatacacactgcacaccacacacaccacatatgcttgccacacacacacggaatgcatgtagcaaacacactctgcccattggcctctgtccaccatccaaagcttctctgccagccctggcatctgcttacagtggaggggcagcccttttcttcctggggctcccacagtaagctgagcagagcacactgctgagagctggaagttctcccctcaagaccatggggacacaggaggcagggagctgggcaggcagtggtatgcagtgtcaggagcctccagggcaggcccccactcccctatcctccttccactatgcagttccttccccttgcaggggtcagcctagcctgggagctggggccagttcaggggcttccatatcagtgagggccacgtccatcattgctgaaagcagagtggccaccagcactggcccgacgtggacgcagggaggagtggtgcccagacctggcccaagccagggtggctacagtttgatctgaccagagttgccctgtctgtcttcagcttgcacctctggccatcccaggttcagggccactcatctcagctctgtcttatctgtggaaataggaaatcaaagtccatgtaatcacaagggaatcgttcattgggaggcaactggacccaaccagaaagctagtgctctcggggaccctctctgggggcccgcagccatggctggaaaccctattgcagggtcctcggagtcagcattggctccagcagcatgtgtttgccttgacaccagaagatggagccctgagccaactcacattcctccagtccccagtccttctccatcttctgtcctctgagatcgggcatcctccaggacagagcccaggtatcttcctatctctgaacacccacagtcaccttcccacactgcatcaccacagggtgtgcagggcctaacactgctatgctaggttcttaacacatgtctgttgtgtggttggatggatggacagatggatgcatggatggtgagtgggaagatggatggatggatgggtggatggatggatagataggtggatggacagattgatggaaagatggatgggtaggcagatgagtgggcatatggatggatggatggatggatgagtaggcagatagatggatgtgtgggtgggtgggtgggtagatggatggagggatgtatgaatggatagagggatggctgggtggaagaatgtatggagggaagggtggatggatagatgaatggaaggacggatagatggatggaaagttggacagatgggtaggtgagtgggcaaatggaagtatgtgtgggcagataggtgatggagggatagatgtttgtatagagggatggatggatggatggatggacagatggatggatgggtgggtgagtgggtagatggatggatggatggatggacagatggatggacagatggatggatgggtgggtgagtgggcagatggatggatggatggctgtttggatggatggatggatagatggaaagatggacagataggtagtgagtgggcatatggatggatgggtagacagactgatggatgagatggatggatggatggatggatggatggatggatggatggatgaagggatggatggatagatgaatggatggatggacagatagatgggaagatggacagctaggtgggtgggtgggcagatggatggatgggtgggtagacagtctggatgagctgaatgaatgggtggatggaaggtgggagggagggagtgatagatgaatggatggatggacagacggatggaaagatggacagatgggtgggtgcatgggcagatggatggatggatgggtggacagactgatggatggacggacggacagacggatgggtaggtacatgtagtaaaagaaggaaatacatgaggggaggcaaagatttgttggtagactgaaccgtagcccctctggggactaaattctctcaggaaacaggttgaaagctcaacatcatctccagaagctattttcttgcagttcgcacacccagcattcctgkggtcttgtcatcaggctgcctctggccctgtctttcttacctctttgttccttggttgcaccccttccccctcttccctggggctgggcattctcaattggtaacacgaacctggaggggatgtgaatggagatgaggtttctggggagaaacagctgtttcccaccccgagcgtaactcccatcacgggccttgggaagctggaacagcctaacagccacccccagttccccacccacatctctcttttctccctgctttgatgttctccagttagtcctggctcagcctctgcagctgctgatatgaatacactaagtggatcaataacatgtcagtcctttgccaggagcaagggtaagagggggtctgcatctatcaagtgctgagtgacagctaatcatttttcacctggcattcacccttccgaagataagcccggctctgctgggaacaagaagacaacgtcagaggctcccctgctccacttcctgcagagcccagggcaccagcctggctcacatttccactccctatgcgtgatcctgtgttaagtgtggggctcagtgggaatgtgtgcacgccctgggttcatgagcaaatgtgtctgtgggtgggattggatctttgtgtgtgcgtgcatgcctggaggctgaatacctgtgagtgtgtgtgtatctgagtatttgtttgagaatgtgcatgactgcgtatgtgcagatgtctgtgtgcacatccatgcagatctcagtatccatgtgagtgtgtgcatgcacaggcacctaggagcatatgtttgaccatttgtgtgtgcacgcgtgtgtctacacaaaggtgtgtgaggggcctgtgttcatcatcaaggtgttgctgtatatgccaacatctgcatctcccttggttacccttgagtcctctctctaggagacaggattcccagcaggctgtccttccctgagccatttcactgccactccctgctcagctggtgcctagaagagaggagtggtggctggaaccctgtgctcacctaccatcccccttcctgctggagaaagcaggtgcctgtagaaggaaggcagtctgagggtgaaggatcctggattggacaggaacatttcaattgcaagggacagcatcaggtagggctgtatctaggctctgccttggtgtggtcagaacttagcttctccattccttgcctctgcttctcctctcgtgggcttcagtcccagatagccttttgccaaggggtggccctggcatctctgggccgccattgtcaccccattgtgttacctgatcatcctcgagccaattcctttggcaggaggatcccatgccccttctggtgtgggtggtgccacctcatccaaaccacaggggctgagagtggggaggagtagcttcccgtggcgaaggggtgctggtgtggttgtgaagggggaggttaggtggacagaaactgagtgtgggtactttcctcctggggtgaggtcttgcgtctcaggcactaagaggctcagcctgcaggcaccgggcctggctcctcggtgcccttggccccacatgggtgctgtgcagtcacttccatgcagccacaggcagctgctctggcctcaagctttagatgagcctagcctcctgaccaggctccaccggttaccccacacccaggcccagccccctcctgacacaccctgccccacaggcagcttccatgccctgggtgtggggcctgggacctccaccatcctctcactgtgcagaaggggaaggtgctgggcgagcccccacccgggggtcaggtgctgcattaggggcctcaccttccccagtgttccctccacttttagatgaggatacccccggcccccatccgggctcagccaaggagccgtaagcagttctgtaaagtgtggctgcggggctggcagccgggctgctcttcccaggctccatgaataattgaagctccattaaaatgtgcgtctgcagcctggaggacacgccctccctcactgagtgtgggcgcaagcctggacagtattgcctggggctgcatctgcctcggaaggccctggaggggcacaaagaccaggtcagacctgccactcctgggccctgcccctgccccctctccttccctgccttcccttttctccccatcctagcatgtggcaggcatggagacctggccctggagctccccagccaggtggcacagagaggcccactccgggtgggctggggaggtccccagctgctccacctctccttgggcactgacagagcctgctccaagggtggactgtggcccagagtggggggccacacctcggcacaccccagccagggaccaggccgcagctgctcaccagcagatccctggaggatcgacccagcagatgctgggggttggggagggagtgagggcacagagctcccgggagccatcggcagcgcacagctgtcatcaggagaccagcactgctgtgtgtgcaagtgcaagcatatgtatcggggggcgctgttatgagggacatgagtgtgcgtgcacagagtgtgagggtgtctccagagctgcgtggctgcatgtgattgtggggacacaaccgagtctctacgtctgtggctctatgtctgcgcgtcacaaacccttgatcaggctaagaggtccccgtggggaagggcatttctccttggctcctgactgatgcccctccccacacactcaccccccaggggcatcctgtacctgctgttgtgggcccctcctcgactcattctgagagctaagcctcgagtcctaatccaaatctgaaattcctggtaatgaaatctgtgaaaggtgaaaattaaaaacccatggccacaatctcctggtccctgcagtggcccagggtccctgctgagccctgcgtggggcctcgaggcgccagtaccagccctttccccactgccctgccctgagctcagtgagccttcactccctcattagcaagaagggtgcttctcctgccttcaccttcctttgccccaaatgcgacgcaagcgaaagatactctttctcccttggctctcccacccactctggcctccctggtcctcaccactgggactctgggggtctcggcacagaggtgtgatgaaagaagggttaggggctgccagggtgagccaagagaacagagctggaggcttcagcctcggccagccccttatctctagcctcatcttctatattctctcatctggtcgtggtgggtgctttgggaaggatcagggcagagtgacctgggccggagcctggccacagggtctaggtggctggtattttgggctgagctggacttgcccactggagacactgggaatggggccgctcagggctcttgcctggaagtggtccgattccccttggcccagagagaagctttcagggtggggcatgaaggtcattgcccgctgcagcaggggcttcttgcattctccctcttcctcctgtaagaaccggggtctgagttgacccagttctatcccaaggccttcagcaaccgggcagaaggccctcaggccactgacctcttgagatgactgtgctttgtggccaggagtggaaggtgtggtggtagatggggcaggggacagggccagccagtcacataccaggtcctaaaggccttgccatcctgggacctggtattgatgtctttaaaggtgagtatcagctggtcacattggctcatgcctgtaatcccagcactgtgggaagctgaggtgggaggatcactttagctcaggagttcgagaccagcctgggcaatatagcgagaccccgtttctacccataatacaaaaattagcatggtggcgcatgcctgtagtcccagctactcaggggcttgagctcaggagatagaggctgctggaagtcctggttgcaccactgtcctccagcctgggtgacagagcaagaccctgtctcaataataataataataataaaagtgtgagcatcagctgggaggtggggagtgaagggtgtgggcactagaactccctctgggtggctcacaggatggggctggatcggtgtcccaggagcagggaaagccacccaaatgtcccacctctcgacagcagtgctgaactccagacatggcgaggacaggtttagatttgattcttcctcctgaccgccataaagaagggggctccctggcaaggggctaggagacgtgggccaggggctgcaaagaaaggggctgaggggacagtgcatgccggcaacccagccctcagggccatcccgagtgctcagcctcagtgcagctgctcctgctcccccacctcgacccgcacctctgctggcagtgctcccctcccagctcctgcaccttcccctcctctgcttgtatctcagtcccacccacttttccaagcccagcccttccgtgccactttcgctgatgcctgatcctgagccctctcctccccttcccaggccctttctgtgccaaagatgcacttcatccacagtcgcccgggagccacttctggccacgcgtcctgctccccaggtgcgtcctatggtggggatcctctcccaccacctccctttcttcaaatgaggctccctggctgatcctgtgttcctgccaggggaaaaacttggtaccttgggcatccccttctggaaatcttccatatgtcaggcttaggacggacaggcagcgcaggaccacaacttgtgccgacccaggaggctgaaccagcctcccgtggtggctgcagcactgcccaaggagtcgccgtatgtgtgaacccgtgtctgtgtgtgtagagtgtgtgctcccggcccctgaaagcctgtggccacttgcattcatgcacatgagtgtccatgcacatgtgtgtgccacagagtcccagagtgggctgtagtggagccgagagtctgccgtggtcaggccgtgcttggggctggggcctcagcaccggatggggctgtgcatcttgtcgcgcctggctttattaatccattttgtgaatagacttgggagttcatgttgggaatctggccatttgctcccatttcctccaggccccccggaaggaggaacacatgttaaatatttgcggttttgctgcgttaggttttaaagttcagcagtaattaccgtgaccaggtgccaagtggatctgctccctggagaaggctcctgccgtagcgggctggtggctgcattccaggccagcctctgtgtggcgtttgcacaagcctgtgtgccttgctttccggcgcctctctttttcggcctccactgactgctgggcccttcactcggctgggctgtgccttctgtgggtgggtgctctcctctggcccagccccggcccacactcccaaagagcaggctgcgggcagctgaggcaccaatgtgggactttggtaagcagagcctgggggctccagcaagtgccttcgctcccacggcaggttcatggccacacctgtggctgtccacacacatgccatcagagcagacagaactgtatttccagagcacatgttagtttttaaatccctcaccccagccagccccatttcagactactcagttactctttcatgtaaatttcatccaatcatgttttcttgcacaaattcagcatcattcacacatccccgttgagttcacagttctctctaggctctggcctgggtgagtggtgacatctatgtccttgatgtggatatatgcagatgctgcttttggggcggcttctgtagccagggcggtgccctctgcttcctgggtagcagctgtgtctctgctgggcttgacctaggactacatgtcacacccctcaacagtgatgtctttcagggttgctgccagatcaaaggaagagttgggggaacacagtgccagcaatgccaggcaaaggaaaaggggcacattcagccaagcctcaagtaaccatgccctgcaggcctcacacagtcccaagagagaaccccgcatggcctctgatatttgggtgtggttcgatgagcatccctgagacagccacaggcacccagacatgcacctgccctcaacagactcccagcccactgggaagagagccacacatgctcagagtacaggtgcttaggagggggaggtgcaggggagcccaggccagggaagggagagagggaagcagaccccacttcttcgagctccctgggaggcctgtgagcccagggcaggaggagctggggtcatctggggagaagatgcaacacaaggcaagcttgcccagtgagggagactcagtcatgaggacagaggtgagctccatagggtgctgctgcgttagtctgacttctggccctgccctctgtggaccacatctgagtcctgygggatgggcttggaataagcaagaagagcatctagggcatgttgagaaagactctggcacagggagctgctctgctggcttctagcaggcgtgggcagagaggagatgggcactcccccactgtgcaacaggataccctgcaatttagtaatcccaagacctccaggcctcagtttccggtagaacttagagggaaatccaaaggaagcccacagggaaacagactgtcattaaagtgcagctggggctgcagtctcatctgacggctcaacaactgagggaggatctgtttccaagctcagccaagtggctgctggcaggattgagtccgtctcaggctgttggccagagaactccctcagttccttgccatgtgggcctctccgtagcacagttcatggcataggagctggcttctttcagcgtgagcaagccagagagggaaatgagacagaagtcacagcgcgtgtgtaacttaacctcagaagtgacagcccgtcattgtagctgtggtctatgtgttagacgctagcctccaagtccagcccacctgggaagggattgcaagagcatgttgccaggtggtgaggattgctggcaccatcttggaggctgcctgccrcaggtgaggtatggttgaggtgctttcatagggaaattgtaaccatcataggtccactggccaaagcatacagcaagtcaatacacccaaacctggttgcaacagagaaagagatttaattgtagggtcactgaacaaggaaatgggaaaaaacctcaaatccagctccccaaggagtttgggcctggggtttttaagggttttggagtgggctgaaggatagagattgtcgactggtggaagagtgcagggtgaagtgccaggggcagtgagaggaagaacctgtgttctcaggctgatccccatcttctgtggggtcttcaaactagttttgctggaattcacagtctgaaagaaaaacatcgtatatgatccttaaacaaaagcctatgattttaaggttggagatcctgtctataggagcaatggggatgccaatcaattctcaaacagtcttaggaccctcatgtcagaaatcctacctataggagcactgggggtgtgcatcgtcaagacttagtgccatgtgactttctgctacaaggaagtgggccaaagtgcagcctgattgatgcttaattataactatattcccgtcgagaacccggcgtgcaattcttgccaattccgtggggacagtttcaaaatgacatgctctgccttcccctgtaaaaggatcactggatgctgtgaagaaacagtcagaggaagcaaggttgaagcagggagacctcttgggagaaacacttcactaaaactagtttctctctctgtacaatagatgtaaggttaatcatagaagctgtctcaggcgacattgtaagaattaaatgagataatacagggaccacgctaarctcattctttggtcttttcccctaaggaaagaagtggcacatgccccactgccttttcgagagtctggcttatgctgctgcctactcgagttcattggatgtgttactggaaaggggtcccaatccagaccccaagagagggttattggatctcacgcaagaaagaattcagggcgaattcatcaagtgaaagaaagtgtattagtcagggttttctaaagggacagaactaataagatagatgtatgtatgagggggagtttattaagaagtattgactcccacaatcacaaagtgaaattccacaataggccgtctgcaagctgaggagcaaggaagccagtctgagtcccaaaacttcaaaagtagggaatccaacagcacagccttcagtctatggctgaaggccccagagcccctggcaaacaactggtgtgagtccaggagtccaaaacctgaagaactgggagtccgatgttcgagggcaggaagcatccagcacagagaaagatggaagctggaagactcagccagtcaagttctgcctgctttattctagccgtgcttgcaactgattagatggtgcccacccagattgagggtgtgtctgcctctcccagtccactgactcaaatgttaaagtcctttggcaacaccctcacagacacacccaggaacaatgctttgcatccttcaatccaatcaagttgacactcaatagtaatcatcacagcaagtttattaagaaagtaaaggaatagagaatgactactccataggcggagcagcagcttgggctgctggactaaggatacttattgttactttgtgattatatgctaaacaaggggtggattaattatgagttttccgagaaaggggtgggcaattcccagaacttagggtttctcccctttttagaccataaagggtaaattctaggtgttgccatggcatctgtaaactgtcacggcactggtgggagtgtttcttagcatgctaatgcattataattagcgtataataagcagtgaggacaaccgggggtcactttcatcaccatcttggatttggtgaggtttggccagcttctttaccacrgcctgctttatcagcaaggtctttgtgacctgtatcttgttccaacctcctatgtcattctgtgacttagaatgcctaacctcctgggaatgcagcccagtaggtctcagccttattttacccagtatctatacaagatggagtcactctagttcaaacgcctttgacagatgtgttttcgtgtatgcaaacaatgattgagatgaggtttgggttcttcacaaggagcccagagcctgtgcccaaggctgtggccagatcctctggtttacacagagaagatctcaggcagagaaaaggtgtaaagatgcactgttctccttgctggctgccggtgacctcttttccactccaagaagctcatggactcagggaaacaagacagcctgtctcaatggctcagtccacacggacagagattgaggtgcaaggggagggagtcccttaatccacacactgctcacrctgggacagctgcgtctccacttcaacccagccagctctgccctgcatgagcttggccatgtgagttcagctgcataccgactgtgctctgttgcaatgctgcctctttcttttgggctctgaaaagccgccccctgaggctcatgattgcccttactttaaagatgaggtcaagcacatttggccgtcactcaggagatcctcttgtctggtccttctaccaagaatcgttgttctgcaccagctgttgcaaggctcacgcctaataaataagcccgcgttctgttttgcccccagctgggctgtactacatactgtcctgacactgaccacctggagttagcaccagacgccacaagtaaaggacagagccctccacaagactgactttacttcagacactggccgcaagtggggtccccaggccacctgcaccgctggccaactggctacagagtcaggtgttcctgtgaatctgtagccagctggccagcagtgtargtgctggggcccctccagtttgaaaatttgttttaaagatgcagaacacaggcaagtactatacttaaaattgcatttttattagaaaggatacccatagatagaacagggtctgggagggtcccaaacacaattttctcaggctctgggctcctggtcaagagcccaaacctcatctcaatcattatttgttcacatgaagacacatccaatgaaccgaagtgggcagcagggcaacgccagaccctcggaaaggcagtggggcatgtgcatcttagaggaagagacaaagcatgagcttagcttgattcctgtatcatctcatttaattctcacaaggttccctaaggtaggttccatggtacctccttcatggagggcatatcaccctcccagcagatcagtgtgttcaactgggagctcctctgagcctcagtgtctagagtttttattaggattgcattatgaattggggtttgattatgagtaatcaatgattgatgattgattggctgcatgacagaactcaatctccaatcaccctcccctcctctcttcaagtggttggtctttctggtgaccagctcctatactgaagctctctaggagcccaccaggacccatctcattggcataacaagacatgcctatcactgtggaaattccaagggtttttgaagcactgtgtctggaaccaagagacaaagaccagatatattctttttttttttttttttttgagatggagtcttgctctgttgcccaggctggagtgcaatgacatgatcttggctcactgaaacctccrcctcctgggttcaagcaattctcctgcctcagcctcccaagtagctaagattacaggcccccacaacaatgcccagctaattttttgtacttttagtaragatggggtttcatcatgttggccaasctggtcttgaagtcctgaactcaggtaatctacccgccttggcctcccaaagtgctgggattacaggcgtgagccacagtgcctggcccagatatattcttgataccacagcccattaccaagtgaatacagccttgtaaagtgcaactttcaaacttactttgggatccattttattatctctttactagttgttcttgcatctgtcagttccattctgatttatgccctcatttcttgtatggcatcctaaaccccctctctgcataaattggggtgtaacagatagattattgcaggcccttccttcagctccgaaagaacatgcaacataagagctggaacttcctacataggagccactgctagcctctaggagccacagccagcctctaggagcactttctcaacggcccacacaccatcataactgcagcctgctgcagagagctctacaaacttccrtcgttgatctgtgatctatgaggcaagcctcctctccctgtgagcagacagcggtgtcagaggtgtgtaaaccagagcaactccatcttgactagggcctgggaaaaaagaggctgagacctactgggctgcattcccagatggttaaggcattctaagtcacaggataagatagaaggttggcacaagatacaggtaataaagaccttgctgataaaacaggttgcagtaaggaagccggctaaaacccaccaaaaccaatggccatgggagtgacctctggtggtcctcactgctacactcccaccagcgccatgacagtttacaaatgccatggcaacgtcaagaagttaccctatatggtctataaaggrgaggcatgaataatccacctcttgtttagcatatcatcaagaaataacmataaaaatgggcaatgaagaatggaatagccattcttcattcctttacttcttaataaacttgctttcactttactctatgaactcaccctgaattatttcttgtgcaagatccaagaaccctctctgggggtctggatcgagaccccttccctataacagcaatggggacccacactgtgtgacacagtggtgctgtcccccaggtgggatgaatatgaaggaatggggtggcagctcactgggccagcccccagcccccaggagaacgccctgccatcgttgtcccaactgcaggagctcagggagaggagaggaaggagggagagcactttctcagtgcccaggccaggaggggcatcacgagtggggtctgttgggagtgaggacccaccttcctgatcccagagctgcccactcccactgggcccagcataccaccctgggagcactgacttcccccagggaccttcctgacatggggacagggaaaggcactacagggtgaggtgggggtgaggttctgttgacaaccaagtctcctgcacagcttggtccctgaaacatcccctgaccccagcatcaagctgaacagagggtaaacgggatctctgtgtgagggtcctccatgccacggcttgggcaaggccagaagctgcatcaaatgtcagatagggaagtcccagcccaggcaagaaggaggctttaaaaaaggcttgtgtttgttggcaagcagcagtgccaggcctggcttttgatcaaaacatcctagctgttggcagagacaaaggcaayccctggaaacagcctggctggggagagatggaagagagggcagggttgggtaggggggtcagctctggcccctccccagctggctcacagcttcctaccctcagggcccgaccttgctcctccatggggagggagggggtacttggagaaaaggctttaaatgcctcacaggcagagttagcaatcaggtttcaggaggaaactcacagattgatggggaagccgtcaaatgcacccctggcagcaggagagtgtgaatgggaccgggaacagtgtctgcctccagccaggctgcccccttctcccgactgcccactgcaagggcagtcagagggtcttaggttctgacacacagacacacgcagacacacacacactcttcactctccactgcagccatacaaaatcacattcttggccagtcatggtggctcacacctgtaatcccagcactttgggagcccaaggtgggcagattacttgaggtcagaagttcaagaccagcctgaccaacatggtgaaaccctgtgtccactgaaaatacaaaaattagccgggcgtgctggtgcacacctgtaatcccagctacttgagacgctgaggcaggagaatcatttgaacccrgagggtagaggttgcagtgagccgagatcgcgccactgcctgggggacagagcgagactccgtctcaaagaaaaacagaaacaaaaacaaaccaaaatcacattccccaccttttaccagaaggcttgctcacacctgtaaatggagtgtgcctcctctccacctgtttctaattaaagatgtgtattttctaaggcaccacccgccacctggcaatgtccttacaaaagagactgctccctgctgcagggccagggatggcttcagcccaacgatgctaagaatccatggtgacagagacagacatggggccgggatcccaggcccagcctgcgcttggaagcacctcttgcctcactatggtgtcatagaccctcagcctgagaacagtctcaggatgctgttgaactgagacttggactgagaaaggaggccaggggatagactggagggtgcttccgagttgaggtgttgtcctgaaggtcaacagtggaggactagccaggaactgatcacgccagattctataccagcctggagcccacctgggctctcccggatgctgctaatcaggatggagggtaggggtgcttgctgcaggtatttagaaggctccccagctaaccgctcccaggcctgcctccctgtggatgatttgcaccaggctgttttgtcagcctagcactgccttccccggggaatagtgaactcacttttgcagagaagggatctctcagagggcccttccgaggcactctctggtgtctgcccaagctcagacaagatgcatagcctggtgcctgccaggccaacgggggtgactacttatccagcagataagtgtgtgtgagcagctctggggacatggggcaataaggggaggtctcatgtgtcaggggcagccaggaaatgttctgttaagatgtcctttctgttcctgagattttctagcaccagcagacaccgtggccaccacccctctctccctaccccatactgcagacgttgggagtctgcggccatgtaggatgcagcccacagctttgtccccaacattcatgaaggaatgcatggtgtgtcactgccattctgagataggagttcagcaggactagtttcccaggaccctgatgaaaaaacaggatgcagtagagaagctggccaaaacccrccaaaaccaaaggtggtgatggaagcaacctccggttacccttactgctcctaagatgctaattataatacattagcatgctaaaagacatacccaccagcaccatgacagtttacagatgccatggcaactcctggaagttatcctatatggtttaaaaaggggagggaccctcagttccaggaactcccagctcctttccagaaaaactcattaataatctacccgttatttagcatgtagtcaaaaataaccataaaaatartcaaccagcagccctaagggcttctctgcrtatggaatagccactttttattcctttactgtcttaataaacttgttttcactttgctctgtcagctcactcttgaattctttcctgcacaaagccaagaacccacttggccttctgggctgagccccagttttggggtttgccctgtgacaattccatccccaggttcagggccactgagacacgcattcggaactgtccctagcactgggtattggctgccttggtgaccagggctaagcgttcactgtggccataattagagctgggacaaatggctattaggtcctaattgtcagcttttccaaatctggaaaaaagccacgggacagaattcccagaagggaattgtccccacggactactggggacccttctcaaggctgtgggcatctgtttgcggaactgtgtcatggaagccacgtgccatactaagtttgaagtctgagccaggctctcctctaaagcatggctgtcctcctaggtcctcctaggatgggcatcctggccaccccttcctttgagcttcccccagccttctccaatgtgttttctgcccagctaatgccccttgcctaaccctggacttctcactctcctccaagcccattccctctgcatttgatagccacgtacctggcccccaggctgtgactcactgttatctccaagcactagagaattttctcctgtcatcttcagcaacaagtggttgcagttttcattgcagttttcattataataagaccaaaagaaaaaaaaaactgtagctgagaaaatagatgtgtgctttccaccctacactgagaacatcttgacatttaaatccaattacccttttcccattcttgatgaggatatgacatgctgctagaacattctgctagataaatatatcatattctctgactgctcaaaacctcccaggggtggatttgggggttctgtgacccccgttcactatcggcctctgtgagaggacagggtcgtggactggctgagctaaaaggccctgaaaatgtttgcctggaaaaattttgcagcatttgacctctgcctttcactgagtcattaattgggagaatggaacaattgcagaaacagggggacttttgtcctttgtatcagatctgtacacattcaaaccccccatccctgggctttcagcaaaacaccacaaaccagtaggccctgggcagagaggtattaattaagcacattcccatattacttcaaaatgtctatcctcccagaagcaaagagtcattgactctaaatgaagcagaaagccagaaaggagcccttacagctattattctgctgtaaatattagttctcttttgacatctggagagagagagtgcaagttttttctttttttcttcttttgagatggagtcttgctctgtcacccaggctggagtgcagtggtacgacctcggctcactgcaacctccgcctccagggttcaagcaattctcctgcctcagcctcctgagtagctgggattacaggcacacaccagcatgcccggctaatttttgtacttttagtagaratgaggtttcaccatgttggccaggctggtcttgaacttctgaccgtgggtgatccacccctctcggcctcccaaagtgctgggattacaggcatgagccaccgtgcccggccggagtccaagatttttagcaagtgygcatactgttctgtggctagagagggagatggtgggtggggaggatattgccaggattaaagccgggaggaccctgcatcctttgccttccagtagggttccccagtatgggccgcatccacagggatcaggcaaaactcccccgccctccttctgaaacccacttaccatgtaaagttacacggttttaacttgactctgcatccatttccacctgcagagaaagaggaaaatgaaagttctgggagatttagaatctcattgtaactgttaatttcagccaggatggaatccctttcctatccttgtcccagccatgactattatcatcctccgttgacctctctcccccctcctccacaagatgaagtgttaacaagcagaggaaaattagctccactcccccagcacaacatcccctgccctgcagaagwcgtggaagccataagccatccctccctgccttcctcccccttcatcagggctgagtggccagttgtcttcctcccctgaggatttcatcatcctcagatatcccagagagtgtttgcagttgttcatcctaaattacactgttgttttagcctgttgtgtgctcagagctgawtaataaacagaaattaagtcacttatttactttttgcttcaaatcacagtgtgcgactcgagtggttgatatctcactgatatttgtgaatgcgtggatgagtgactggatctgcttgtgtgttgaatggaattcaaggttccttccatcagtcccaaaacatcattcctaagagctcacatgtgcctgtctgttttttyacaaaaacaccttttgtctcttctaatagtccctgaatgcttaggtaagagtggagaatgagagctctcttctctgacatccaggctctgggcatctctcaaaaagagatggtcaaagaatctgatgaggtctgctgaaaaggaagggtgccatagagaaccagaccagcccccatcctggtgagcggtgcctcctcacacaaaaagctaatggtttgggttggtgtggtcagaggagagcagctctcagagacagaggtgaggatggaggccctttcattttcctggtgagtctttccatactactttttaaaagaaagtcggtactttaaaatattttgtaagtcaatttgtccaggatgcctgcaagttttcctggaatttgatgcaaatacgaggctatgctaaagccaytcagcaagctgtaggagccccaagtggagaaactcaaactrgttcacaggagcaaacatcatgcagctccctccaaggctacatcactcgtgggttgtggtgtttctttgtggaagtccccaagctcttagggtgagagggctcttcagtgacgcccagggacctttctcaaggctgtgggcatcggtttgcagaacygtgtcatggaaaccacatgccatactaagtttgaagtctgagcaactgctgggctgagaagatcttcaggtttccctgtggccgtgcagcctgtgtggcatctgccatgcaaggagggatctgggacaaagacagcttgctggactgggtcacttcagggaattcatggcaatagctttcccagggaaaggagaatcaccctgaaacagacccagactggcaatgtaagtcggactgtcataccactgtgttgaaactgcagcacgaagtttctctgcctcttctttctctgtttcagctctcygtttcaggaggttcagcaagccctaaaggccattacctggccacctacctatcttccccactagagagtaaacctctctagagattagttatttatctttccatcagcccccagaactggcatcatatgggacagtgcacacacaagtcttggtttctgaacttatyggcatcttgtgggggctgtccatggtgttgaggccccactgtagtcatttcagttaatcatataaatggccagaacctcacgggttatccatggtgttgacagatttcacaccttacwttccccgggtcctcctatcccagagaacagaacctggagctaaacccttagagcggggtatcattgggagctgtccgtggttctgaaaacagcactccctctccttccagttgcctgagctgctgcggcagggtcagaactgtttgtggtgtcagcctcgttttgatcagctaattgccaattttctgcttcttggtccagcttagaccccagccagaatctggcctgctgctgctgtcaatcatgctctgaggtacctacatggtcctgcttgtattgactctgcctgtaacgtcagtcctgccaggccctgaccaaggactggcctctgactgcaaggctgcrttttattccagcctgttgtatgtcaggttccctggaaagcagactgaggcagcgatttgcactcaggaagcttgttgggtttatattatgacaaagaagagttaaaataactttggagaaaaatataagtgtctgctgtccactgcaagtcaacatgaactgtttctgatagtcctttttgacagggatggaaaacaacctatttttcaaaccagtggtcacacaccacatacctgaggccacaaacatcttccctmgcaaatataccatcatcccaccaacatggtggttgcaactggggctatatcttgatagagtttatgggattctggtgggacttgcgtgtcttttgtaggactggactggtgaaattccatggtgatttgatggtgatgactactcctgcatccttgaggtcttttatcaagcagagtcctgtggatttttttttttttaaattgtgctaatctctatgagacccccaggaagtaatattgcctttgatttaatgtctagattcatgggagagggtcactgtcaaaggctggcattccctatggtgacggtccttatcccacagatcaaggacatgggggttttgccagctgtcacatctatctattcggattatacatctgggaactggggagaaatgctcgccagatgggagtctgtgaacccaacatgagccaggcttgggtcatttattacctggtaccctatgtgccctcactgtatcagggtgcaatggcaacacttccagttctcaggggctaagaccccagatgtaaatgtcaaaaaaaaatctagaaatgtctgagtgttctccttccccaagtgtacacctgtttaaccaratggctgtgggtcctgttggggaaagactgagaaaacattcccatgtgtatttgccatgatgccatggggttcttcttggggatgtggtctctcctttggtcactgagttctggatctgaaaactgggtgtattagtttgcattgtgtttctataaaggaatacctgagactgggtaatttaaaagaaacgaggcttatttggctcatcattctgcaggctgtacaagcgtggcaccaacatctgctcagcctcaggaagcttttactcatggcagaaggcgaaggggtagcaggcatgtcacatagcgagagagggaacaagagacatgccagactcttttaaacaaccagttttcatgtgagttgacagagcaagaactcgctcattaccatggggagggcaacaagccattcatgatggctgcacccccatgactgaaacaccccaccagactccacctctacattggggatttcatttcaacatgagatttggaggagacaaaacatccaaaccataacagtgggcaaagaactgtgccattttcttgggacagctgatcacccctccttgatttgtttttgttgtatatatcggcttgtcgaccacctgactttcttgttttttgggatgccatgttttggtgaccacctccatagctctctgcagatcagcccctcttggctgctacaccaacattgctactcagtaggacaagtgtgcacactttggttatgatggctaagtaccaccgtgtggtttctgttattttacaatcctattgtcccccatcagtctcggggtgtccaggtctgtagtggcactgcctacattcagccctgtcctacagaggagaggcactgctgggcttctcactcatgctggtgcttcctgaactctctgggctgcagaggcattctgccctctgcaatataggctggtggccctctgttcattgaagamtactacagagatctctgtcctacaacacaacatatgccccctgatcctccttcccctctcaccagtgtgttctatattgctttagaaaggggtgggggtatcttctaggcagtagtggattttccagctttccctagcatgtccactgtagcataaccacctttgggagccttttgatctcttcctgcactatctaccacagcaattctttttttttttttttttttttttgagacggagtctcgctgttacccaggttggagtgcagtggcgcgatctcggctcactgcaggctccgccccccgggggttcatgccattctcctgcctcagcctcccgagtagctgggactacaggcgcccaccacctcgcccggctaattttttctatttttagtagagacgggatttcaccgtgttagccaggatggtctcgatctcctgacctcgtgatctgcccacctcggcctcccaaagtgctgggattacaggcgtgagccactgcgcccggcctaccacagcaattctatcatccctgcttcattgagtgtgggcattgctttctgcacgtatctgagagccatctagcagcatgtctgcatcgtctcctggggtcgttgctgcactgtcagatcctctaacccaagagaatcctcccttatcaattactgctctatccaactttgtgttctgcttttttctttttttcttttttttttttgagatggagtctcactctgtcgaccaggctggagtgcagtggtgcagtctcggttcactgcaacctctgcctcccaagctcaagtgactctcytgcctcagcctcccaagtagctgggattacaggcacctgccaccacgcctggctgatttttgtattttagtagagacagggtttcaccatgttgaccaggctggtctcgaactcctgacctccggtgatccacctgccttggcctcccaaagtgctgggattacaggcatgagcccccgtgcccagcctctctgatctcttgtctacccckcacaccctgccccagcgtcaaggtctatgtgtactctcctggttcctgccaatacctgatttctggatccttcttttcttttggggtatagttcctttcttcccttagcaaatctagcacttccccagtggggacatgctgtgatttaaccgtagttattggtctagtggagaaaaggtgggggcagattctgaggaaggcatgtgttatgttgcaggacagagacctctgcggtgtcttcaattaatggaagaccaccagcctgtattgcagagggtggcgtgcttctgcagcccagaagattagaggaaatctgggaattcaagactttcacaggcatcgacctacagtccccaacgcatttctcagggtcctgttccttctcagccaggtgcctgccattgccaagagtcacccttcagaagctggatactcttcctttctccccttcatttttttttctttaagagacagttttgttctgtcagccaggttgtagtgcagtgctgcaatcatagctcactgcagcctcgaatgaactcttcggctcaagcaatccttccacctcagcctcctgggtagctgcaaccacaggtgtgcaccacaacccccacctaattaattaattgatttattatttatttatttattttgagacggagtcttgctctgtcgcccaggctagagtacagtggcatgatctcagcccactgcaacctccacctcccgggttcaagcaattctcctgcctcagcctcccgagtagctgggattacaggtgcctgccaccacactcggctaatttttgtatttttagtagatatggggtttcaccgtgttggccagggtggtctcgaactcctgaccttgtgatccacccacctcagcctcccaaagtgctgggattacaggcatgagccaccatgcccagcctaatttatttttattttgtgtagagatgggctctggctatgttgcccaggctgatcttgagctccagccttaaagaccttcctgccctggactcccaaagtgttgggattacaggtgtgagccacagtgcctggcctctgctactcttaagtcttgagacctgtcctcttgctggaggtaagagtctctatataggctgccacagagttaattgccagccaatgccattgttcccaaattactatttgccccatatttcttagcctccagatacatttttttacatgccagggcattttcttccactggtacgccatcctagtttatcatcaataaacattttaacggaggcattactgcctctggccttgtgccacagctgcctgtgctccacctaccaccaatgctggggacctccttgctggctggttggcaggtgattcaaccctaacatttcatcttagcatctgctctctctgccccactggcactgactgtcgggttcctgggaaagagactctgaagaagtgcaggaggtgaattgcacggggctgggagggaggtgccctctgatcaacacctgtaagggaacgaaggaagcaggagtgagggcaccgggtggggatttagtctgccagtcccacagggagctctggagctgggatattcccacagaattgacctgaattgatgcaagggggctgtgcctttataccacacatcaactagtgtctggatgcaggcagccccaggggagaaggtgcaaccttgggtgaggggactttgtccagctgagaccactctctggagagagacccagccaagctgcagggctgtgatttcacaatctcacctgaccccagcctccctgcacccttcacctctggctcccagcccctgctgtcctggctcctccattccacatgggacaaggagtgactaaggtttacttgactggggcggagacagtttttccaaattcctttgcttattcaaggatcattgaaaattaattgtagctggtgttattgaactcacagcagtctttagttttataaaagccttttccttccaagkgttgccatttggtgttactgagatacaagcaagatgtctgcaaaactaaaatagcatttttttaaaaaacatggcactttagagttctaaaatatgttcacatcgttttttatcaatttgattgaggtgtaatttataaacaagaaaacacatgcattgtttatcaaatgtattccatcaccccaattggagacgtgaaacatttcccccaccccagaacattccctcgtgttcctgctcactcactccccgcaccgcccccggcaaccactgatcttattccatctctagagattcattttgcctgttctagaattttacataagtgagatcctacagtgtgtgttcctttatgcctggctgattttgcacagcaaaatgtttgtgaaattcatccatgatcgtcatgtatatgagtagttggtgtttttcttacaggcaagcagtattccgtagaatggatgtaccatgttcatttatcagtttgcctgttgatgggcatgttctttgagtttcctgacacagcatacctggacacaggccatgttgtctttagtgacattcaggcaggaggagtgacctagtcacagccatgcggccaggagttagtgggaggtgagttctgcgaagcagggggcctgacttcactccattccagcgtcacctaacaaaagaccctagaaaacaaggatctggccagataactggtacattttgttctttttttttttcaaggcatttatttttccataagatgctctggtcattttctttggatgctacttgagttagcatcctgccaagcaatatgaattctcctttttaaatcagggcgatggtaattgaggggcagacctgcagagcaatcggtttgggcacatgcatgtcaaacggactatatatcatgacatcagacattttgagaaaattgctgttcctccctgaatgtcaagtcataaataatttcaggttggggagagctctggtaagcatatgtttgactccagggaatggcctgtaaatatggtgggccagagaataaagaacgagggggcagatttgtggggtcacttctggtctggaccttgctataacttgttgtagagaagccataggtgccccactcagacacacttcagcgggcaggtgcgcccttcccctgctgcagttagtggggacagctaattgctcacagctgcacccgtccttagagatctgacctcagctgataggatactcctcttctggaaggcgacaccttccccctggagttggcctgcaacccattcacatgctggtaaaccccttctccagggaggaagagaatagagccctgatttgtagcacttgccaatatctatggtgtaaatactcccactgcatccagctctaagctaccatgtaaaaataaacaatacrttgcttaggggatatagacatatgccacacacacatacacacacacacacatacacactactaagaagagaaaggaatgataaacacagaattctgtgaagtgattaccccggcaggagcaggagagggctgtccaagaggggcaaagagggagcgtcaatgatattgatagaattctgtttctgaaactgggtggtgaatacctggctgtttgttttcttcrtctttatagtgttatatattttcttttgcatgaatgaaatgtttcatgacaaaaaacaagtctaaggaaggcttttaagctttgagatttttttttaactgacacacaaggggggttcctagctctttgtggaggccgaggaggtggctcagcgggtctcctggctcccctgcacttgcccgctgggtatgatgacaaagtccacacttctaatgagttctggtggagaaggaacatggcctggggaaggagattttcctttccctcaggacaggcaggaagaggaggtggatgaggggctgtccacagagctgtcccgtccagtgctccctcctgccaaggacccaggggaatgccgcctgccactcacccaaagccaggctgttcgcactgtctgatccacggcatctagggccttaatcaatagtcatgtagctatgccccaggcactcgccaggcccaggcactcagcttccactggatggcggtgagctcagggaccctccacatcccccattatcatctccactctccaagggcagaagtgcaggacctaatgggtccgaacctgaccaagtccccacacctggtgagaagtggagacacagcttctgccaggacagatggggcctgcagcccatgctctggccatcacacagggctacccgctcgttggtgccagcgccgctgggcaggctcatggccgtgtcgccccaggttcctttcccctgagccttcctggcctgaggttccacttctgctcacagcttctgctggggtcccagctggggagggggagatgaaaggtctggcccagatctgggacccagggtctcttactgtctcaacatggtgttgggggtggctcctgcaggttccttcagcaagcccacaggcccggctgctcaccttgtcctctattgcaggagacgcacacagccttggacagtaagccctgatttcccattatacagatagtgaaactgaggctgcaggcaggtaaattgctgccgctcctgggcccttaggaggctctcacagctcagatcctcagtgtctaggccactttgcttcatccagaagccagtgcagtgaggaaggagaggccacaccatggataagtgtgtgacaggccttggaggagaaggcaggtgaaggcatcaggaccgaaggctcactcggaggagagcctcaaggagtgaggctgggaagctcccacccaacaggcgcacacccctgagggcatcagaggaattcaggacgccatgtgagatgaggcctgggtggtgccagagggacagcagcaaggggggcccccagcaggagaggccctggtgggcagaagggktgtgcatgccccagggatggcagcaaaagcagctatgtccggggctcccccacctcaccacaggtcccgccttgcagccatgaacaaagctctgagggaaagcagcaggtggctaggagagcacacccggagccagggacaactgagtttgatccctgagttcaatccctggctcagccactggccagctgtgtgaccttagtggctaaatatgtgtatatcacagcttcatcagtgtcaagctggggcaaaataataacctttctcccaccagccacccwccatcctcctaycatcccccctccatcctcctatcatcccccctccatcctccccaycatccccccatctccccaccatccccccaccaaccaaccaccaatctcatggccttctgtaggggccgatgctatgagctcttcacaacacatgggtggctggaatcagtgggtgctcaatgaaccccatcacagatgaagacagcggtgatgaggcacagggcagggtcaggctctgcctctaagtccctgggtggtcactagggccagtaacttgggcaggtcctgcagccctcagtcttactgctactcacccacctccctcccaggcactgtgggtgctagaggccagtgggtgcacctccctgaggccccaggctgctgagccaggagacccagggtcaggctccaaagggaggaaggacatgtgcccttagctatgggtgggttgtatgtcacgtgctgtgcgctgtccagctggcgcaccaagcacccagctcatgaaagggtccgggtcgtggccctcatcgtgcagcagccattggcaggtgcgttgtgccttgcttcctgcctttctcctgtccacaggctgcactctctgagtcctccctgaggcctggcgccccagctaggtgtggtccaggaagctggcatggctgggagaccgaaacgccctgagacgggccagaggctcaggcctggaaggaccctgagaaggcagggcccctcgccaagggggtgcaacaaggtggtctggaacccaagagaggagggtgacctaaggggggtggtgacagcatgaggtcacaggggtcatcaagtgctagttaagcagggtcagcagggttgggaggatgcacttttgggcagggtcctattacttgagtagggtcctggctgagttcaactgctccagcctctcctaactagccgtctgctataggggctgtggtcaccagcataggcacacgctgggacagacctcagggtttcctgctcagtcccctctggggctacccccaggaccccagggcctggatctgagagccatccatccgggaggagaagccaccagagttggcacatccctgtgtcctgggccactctgcctctgcatcccacaccccgcccctgtatcccccacccctaagcctcgggmtaagccatccctgaaggctgctggaggcgagagccactccccagtgtccaccagccgctcagtttcccatcagggtccagaagtattgattctcttaattggttgcccatagggaaccaaagaataaaaccaggcaaagcaaaatagagcattctttttcgttttccagaagtgtgatcagcaaagcctcacggttctcttacaaggccccaggcaccagccgcccacccccaacggagggaagaggcagtggtgggccctgggccaagcctcytrgctggggcatctgataccctttcagaccgagcctctccaggctcggtccaggctcaccactggtacccctcagcagcaggcagatgcacccccacccccacccagccctgcaaccctcccagccaagccagggagrgcctgagkatttcattatgagctcagattatcatcaaggacaagggggagtgatggggaagttacaagctctccttttaataatgaatcccatttcctcttggagttggttttcttgcaacagatgctgttgcagaaaatggaacaaaatggaaaagataaaaaggcaagtcattaacgtggccaaaaagccttcccagcagatgttggggatggcggggcagggtgcccacagcctgcccaccgcaccctcgcytggcccggctgaccagctgccacggcagggacccatatgttctcaggattcacggcttggctcggtgttgggaagcacagagccaccctcccgctgttcaataactgatgaccatttttctccaattaagctgaaattgaaggatcctcagacgtagacatccaagggaaataattagtgcttaaaatgttaattgtgctcagatatgcctgtgctgtggcggcagcttgccagtgagcaggcataggtargtcaccttctgccctcaagcagcccccatcaggcaggctggtctccccagggacccagtgtgggcagcccaaggccaagaccctggcagcttttctgatggtggacactggcttaatgatagtgagacgttctgtgaaccccccagcctcctgcctgaccggcccaccgtccccgggcactggcaggcagcatcagagagtggttacagcaaggacatggaatcagacagctcgggcctggacccaccrctctgccagcctacctgggcagcartgtggatgagggtgacccacttaacctctttgagactcagtgagtgccctcatgccaaacagggatagtaaaacctatcstgctgaagcccccaygggagcgggatcatttctctgtccagcctttaacacccctcagcatggggcctgcggcaccagctcccaaatgaacaatgacagaatgagtgttttccctccaacggcgccaggaggrgtcagggatcggggtagcakcgtggtgtttcccccttctgggcagcggaggggccctgcttggccagccattcagaccccaccaaccctgcacctaggattggatgagatttcctgcccaggggttggagtgagatttgctgccacagctgcctgagccccaggacgaaggggaggctccgcctagcgggtmttggacgccccagctgcctgagcccgggagccctgggatgaagtaggggctgcccatgccaaccgcagttcccccaacctgcccgccgcctagggggaagcaccrccccctgcccggggagaggaattcactcccacagggattctcctgctcattactcgacccacgcgtgagccaggcttcgctctctgccaagatgacacgtctaagaggcttagtcttctttatgctgtggatcctgaggaaatccacttagatattctgtgttccctgatcygccacatawgattcctttatctcttgttgtcatgggaagtatatattaactgattaatattaatgtgttggccgattaatattcatatctgaaccgattcgtatttcacaggcaacgatactgaggagcatggcagagcccagacagctgtcggttttaggcagttccccggggagtcgcagaagtcgcatctgacccttcccgccgccccacgttatggacaccctctcattagcagtgtctgtcagggctggcatgcaagtgtgtttggactctgattgtggcaattaaaatccttgccatccaagacagcatattttatcgtttaaatagcattttacattcttctaacatatttccccagtaacattgttaaattaggtgataaaaggttatttttgcttctgaagttgaaatacgttaccattattccttatctgcctggaattagaaaggtttcagaattagtgttccaatggtttcattatcaaaatttgccagactttataaaacaaacaacawtttttttgcccttgtgttcaacaaagatgggcaaaggctttgtcttctgacattggagattgctttcagcgttcggtggagaaagaagccacagccttccctgcagccaggggggtgcactgggggctgggggaaggctcgcttgcatttgaattggagccaccactgtcacctgtgccactgcctgggcatcagaggccacacaggtcagggaggtcactcttgcccgtgggracggcacagccagagcctgcaccttcaccagggggagcggccaggagcctgcctatgtagcctgcatgtagcttctccatctctgctcctgtctccctccagcacccctttccagccccagccctttctaggccccatctccaatcttttcttcaggacttctaacaccaccaactgtcctccatctacctattatcctcccacccaccatctccccaccaacttcccaccttccccctaccaaccacccaccttcctcccaccacccaccctccatcctcccaccacccacccaccatcctcccaccacccacccaccatcctcctaccatcccccctccatcctccaccatcccccatctcctcaccatccacctgccatctcctaaccatcccccaccaacctcacaccatcccccctccatctcccaccatcccccaccaacctcccaccatctcccaccatccccccaccacccaccatcccccctccatcccccaccaaccacccaccatccccccaccacccaccatcctcctaccaaccctctccatcccccaccatcccccgtctcctcaccatccacctgccatcccccaccaaccacccaccatccccacaccacccacacaccatcctcctaccatcccaacaccacctacccaccatcccccaccaaccacccacccaccatccccccaccacccaccatcctcctaccactacccctccatcccccaccatcccccatcccctcaccatcccccaccaacctcccaccatccccacaccaaccacccaccatcctcctaccatcccccctccatccccccaccatcccccatctcctcaccatcccccctccatccccccaccatcccccaacaacctcccaccatccccacaccatctcccaccatccatatgccatccccacaccatctccccactaccctctgtgtaccatcctacctgacatcagtgtgccccccgtgtgcatctccccatcatcagtgcatcacatctgacaaggaagacacccttgtgtggtacaaaccccctcctcactcacacttggcagtcaagtgtgctatgagcygggcctggggcctcatacctgctaatggactgctttatccccgcacctggcatccccaagtcacccgggtccatgacctcttatgagcaaaccgtccttgctacagcactctaggctgcggggctcttccgagaacacatttctctctagaagaagcacaccaggcaggatgagggactgttctgctgggatcaggggaccttgccgtgcatcttaaccctatgcctgctctcatcccctttccctctgtttttggtttgatccaaggacaggatcgactttaccaaagaggaggctcatcctctcccagacgtccaaccaggatggagctttagcttgactggtgggaayagtccagggtgctgtgtggcagcccctcaagtgtttgcccacctgcatgccmgctccagcctctgccacgtctcacagggacaactgtcccagctgtcagaggcaggggtgacagcctctcaaatagactagctaagaacagagctgggagagcaaggctaccagtttcctcctgagcccaggctggggtccatgcaaatctgttgtggatgtgaaccttgaagttgattgcagatgatgtgaacctctgagatcctgctctgcagggccaggtcttgatggaaaaggatccctttctgctgagcacctgagtgagagatgccggctcaggggcamctgtctgcagcctgatcctccttcttccgagcagctcagccctgcagagccatcctagcctggcccatccttgtgtctctcacttgyggatgcagcagagctaaaggctggaaatgacattctcaggatgcccaccacccatgcaccccccaggggctcaggatggtgycttcctgtggacttccggatttccaaaatccctgctgtctgcaaccacagattttcacagaagcctctggcactggaaaccttctgatgcccctgtcaaagctcccaccgcctgacacacctgtgctgtgctcaccccgccccatactccctgttacacagcagcccttcattctgtaatcaactcccagacaaacagaaaacatgctagcagccgtcgtaagcatcccccatgtgatttattgccatcatcacaatattttgtttggagctgtaatcctccggacataaatcaagtcattagaaggaatgacgtttaatcctggggaagatgctgtggtgggctgagcagcagtgaatcacctctcaccctgctagtgaatcattcattctagaaagaacggccctccacacacctacctggcccgctcctcatccctgccacgcgcaggcgtgaaagacagaaggcacaagccaggcttgtttgtttcccggaatagcacatttcacaaccgcaaagaggtgcccaaaacacatgcccggtgctccagactggagccttaattcctccagaaatgcacgcagcctggaggggctgcctctgtgtccgtggtgggctctcttcgtcccgagagcagctgcgctggttggacttcaaaggaagcaggaaaacagctcagatatcttctttagctctcctttcacggtgaccccagacgccctaccaacagccattacatgggagcacattccgtttgcaaagctggcgggtctaattgcagggcctttggtggagatgtgcaggcagaggctaagcaaagagtttgaggccttgaaaggggaattcagggacctcgggcactgtcttccaggagcccagtaagctcctccacccccacccaggcaaacaccggcttccagttccctgcaaatggcacctctcttggagcaaggagacacccccaaagtgctggagagcgaagaacgggaagggggttgggtcttggctgacggattgccttagaagacttcatgttattgaataacgtgaatactgtgatgatggccaattccaggtgcgcatgaagatcgtgaaaataacagctatttccagtgtttacatctacttaatattctcgtgctcagagctaacgaggctggcgttaggcggtgacgtgggcctgtttgaaggatgctggaagtcgcgggcctaggttgcatggtgtgtgtctgggctgcctcccaaaccgaggtatgtggcccagatctggctaatggacagtttcacccaagctctgtcctgtttccagctgacagctgctacctgcaggtgctgctcgagtctgtctctggttcaccataagccaaggttgggtcttctcccccaagggctcctccattccctgagacctccctgtctgggggtcctggcagcatgctatgggaggagtcctccagacatttccctcaccctcacccctcatacccctgactcaccaaaccctctagccctctggctttgttgttctgcaaaatccaacatttccttttcctacccccgcccaacctgcctaagttcagatgtccccactcctcacctccatcataaggtaagaacctgaatttgttttcccacttccttttgggcctcactcttctccaagttccccagtcacctccagaatgacttctgaacatgcaaccctcaggagtctctccgccctccccactttccccaaccctgcagtcagcaccccagggctctggaggctgtacaggtatgagatgcaaagggcctgtggtttaggtgtgagtgtggtatgggggtgtggaggcagccccgtctggcatggctgtgagggggcagtggaagacaggctgtctgtgctcccatgatggtctggggcccccctggtcagcccacatggccctgtgggggctcctgctgctacagggtgctgggctgggcggaggaagagctggccattcaggatgggygcagtggctcatgcctgtaatcccagcactttgggaggcccaggcaggtggattgcttgagcccaggagttcaagaccagcctgggcaacatagtaaaaccccgtctttactgaaaacacaaaatttagccaggtgtggtggcgcacgcctgctactctggaggctgaggcatgagaatcgcttgaaccaggaggtggaggttgcagtgagccaaaaccatgccactgcactccagcctgggcaacagagtgagacgcggtctcaaaaaaagaagaaagaaagaaagaaagaaagaaakaaagaaagaaagaaagaaagaaagaaagaaagaaagaaagaaagaaagaaagaaagaaagaaagaaagaaagaaagaaagaaagaaagaaagaaagaaagaaagaaagaaagaagaaagaaagaaagaaagaaagaaagaaagaaagaaagaaagaaagaaagaaagaaagaaagaaagaaagaaagaaagaaagagccggccattcagaagggagcagaaaggggctcttggacaggtatccaggggaggtgatgtccccacagccagccactgacaagcccaagattggcatccatactcaggtttggtgtctttttttaagagatgggatctcactatgttgcccagactcaacatgggagctcaaactcctgggcycaagcaatcctcctgccccagcctcccgagtagctgggattccatgtgtgcaccaccacgccagtattatgctcaagtttgacccctcaaagaagctggtgtaatcctcaggccagagccttccagagcttctcttgccccagcccttggctggacctgactccagcttcaaggccctgccctgggagattcaccccrgctctgaaatgtagactgcagctatccagaccctcggcagggaagagccggactgayggccagagcccctgagtgctccgggcagtctctggccttgtccctgcaacctgtgaattgccagagtctctgttctgttctggtggggtgggktgggggggcacacaggatgacccctcagctgcagctgcccctcggtgttccctgagatgccagagagaagacactggagatgttggtgtaggggtgggggtgggcctggaactgtagctgcccattcactgtgcttgagtcagggccgtcacccagactccgggacccctgtgggtacagtcagtgaccatcagtgctcagccgtctgggagctcttccaaggatcagagcacccatccctgagcccctaggcagccctttgcagtctggagccccactctccccagggtgtctgcagagccccacccaggccagagcggcctgcagtgggggtcacttcaaagaagcatcacttaagacagattcacttttgtggctctttagggtatcacagcaacagctgtgacaggcttgacagctccaggccagctcggtaattgacgtggcagccagaacaatgcatcccaaggccggctggagctggaccgatcattttcttgcagctgggccacagtggtaatgaggctgccgtcctggctgcctgactccattccagggtgaagaaggacatgctgcccacgtctgcccctggagggcctgtctcagggctgggccagtgggtagggagcacttttcctgtaaacaggcatgtgtcagcacattcttgcactgctataaataaatacctgagactgggcagtttataaagaaaagaggtttcattggctcacggctctgcaggctggacaggaagtgtggccccagcatccacttggtttcttggcgggggsgggcggtgctcaaagagcttttactcatggcagcgggcaagcgggagtgtgcgtgtcacctggtgaaagcaggaacaaagggtgagacttgggggcaggcggtgccacacttcacaacaaccagatctcatgagaattcattcactattacagggatggcaccaagccatgaaggatccccccatgagccaaacaccccccaccaggacccacccccaacactggggatcacacttcaacatgagatttgggcggggacgaatgtccaaactacatcaagacagcccctttatggggccaccccagcctcgggctccagcctgactcacttgcttctatttgctggtaaccccacaatgggaattcmccattatttagaccaaatgaggtgccttcctgcagagctggctgcagagtggtcaccacgtgccatgtcagccagacaagaggaggcgttgacatccgtcccatttaacccaccaggcatggtgctgtgaggtcacggctgctgagagcctggggtgggatcccggtgggcccagaaaatggcagcctccaggcccaggcccactgcctctacccctctttccctgagaagtgctggtatcatgcccccactggcccagaagagccacaggtggctgaatgagctcccacaggcacgtctgccccccgcacctctgaccagccacccctgatcccctaattccctctcctccaactgccctctggatgtctgcacttgggagacctgtagtcaggtctcctcaaagtccacagggatctgtcytcctgcgcagggaatagcatcagcattcaccactgctaaagtcagaagccagcgtctccctctgcagtcagccagtcccaggtcctgctgatgtagtggcgagttcaggccaacttgtcctggcccccaagggcccagccccacatgacatcagtagtttgaaatctgccatgatgggatttcagaccacggaaatcagcaaacactgcaaaccaggctgctccccgctcccaccccatcacccagaaagtcaggtgttcaacatttcccagcacacctccatctcccgaaatgttcttcaactctccctccactgtttcatcatcccctgggtccaggcctcaagagtctcctgcctggatagtgacagcaatcccctgaccaacctttctgctgtatctttgactccatctcagaatggtccttaaattcaaaataactccacaccctaaagctctttgagactctcctgggccttaggaggtaaggtctagtgtctttgcatggctataaagcctctttcttgccggccagccatcatggttgccctttcttccttccctccttccttccctcccttcctcccttcttccttcctttctcttttcttttcttttgagacaggatctcactctgtcacccaggctggagtgcagtggtgcaatcatagctcactgcagcctctaacgcttggactcaactgatcctcccaccttagccttctgagcagctgggactacaggtgcccatcactgtgcccaggctaattttttcatttttttttagagatggggtctcactatgttgtccaggctggtcttaaacttctggcctcaagtaatccatccatcttggcctccaaagcactgggattaaaggtgtaaaccactgtacctggccctgccttttcttgacactcttcagtctctggacccatctcttcatcccaggagccttgctttcatggtggaaggccatgaagctctgccagaaatgtcctcattaccctcaggtgccaatttrttgtcacgatcttcaggagctgtcacctgcaacactgagctagctaacatgtcaactgtcccacattgcctgcaaagtcctccatggctgccatcacacatggagttgctggccagtgcctctcctccttgctagactggaagcttcatgagggcaggggccacactatcccattcctggttaagacactgtcatcagtacctaagatgctactggcccgtataggtgctccatcaatgtgaagtgaatggatacatgggggcagatggcaggatcattccgcgtggtgtactgcaaagtggaggccagccagttggtcttgctgtcaacatcccacgtgggaagcagagacagggcaagccagggagcgacactgggttgtgggatagggccacgcagttcgttctttcccatttgcagcagcaaccactagctctggcttgttcttccaggcccacatgtgttgaaggaagacaagcagccaggcacggtggcttatgcctgtaatcccaccactttgggaggctgatgcaggaggatcgcttgaggccaggagttgctgggcagcatagtgagaccttgcctctatgaattttttttttttctgagacagagtctcactctgtcatccaggctggagtgcagtggcacaatctcagctcactgcaacctccacctcccaggttcaagtaaggctcatgccccagcctcctgagtagctgggattacaggtctccaccaccacactggccaatttttgtatttacttagtggagatgggatttcgtcatgttggccaggctggtcttgaactgctgacctcaggtgatacacccgcctcagcctcccaaagtgctgggattacaggcatgagccagcacacctggccaaaatatacatatatatatatagtataaaaatatgtatatatgtatatatttttttaattagctgggcttggtggtgcacacctgtagtcccagctacttgggaggctgaagtgggaggatcacttgagcccaggagttcaggattrtagtgagccatgaccacggcactccagcatgggcaacagaatgagacactgtctcaaaaaagaaaggaaggaaggaagtgggggagggagagagggaaaggatacataaaggaaagaagaggcatgatctgctgtaagccatgtgccatggactcctagaaaccacacagggatgtgcacacaaccacacactccccacccagggcacgctacatcacacacacaggaagcaggcacctgtgcagcacaaatgtgtgctgtggtgcrtttcctcggcatgcctggtgtgacagaccataggacatgcacacctgatcccatgcgacatgcacatgtgtaaggggtgatgcagtgggtggcgcgggtgtgctggggtcacacacaccctgaacactgtagaggtcactgcaggctctgaccgagggatgctgagaagcaggagctgaggatcyctccctgtagacaggcagggcaccagctcaggactccccttcccaacccactcagtgatgggcaggtgggtagatgtggcgcaggcgggacagccgttgggtttgtagactggctgaccagctgaccggctgactgacaggcagctctgatgctcgactctctgacagckccaagggaattcacgaccaaggctgagctgacaggaaccacccagctgaatcgtggatcctaatcactaaggcgagggaacagaatcactaaacraaacaagtgcggtcagagccgtcaggcgctcatcggccagagacaggaagatgcaggctccgctcctctgcagatgcaccccagtgtcgctgcgctgggggcaggagctgcgctgcgggagattcagcccctgcaaagggaaccaggtgatcagcatgccaggagcagctgactttcaaccaatgggctctggctctgccccgctttgtgtcccatttggtgtgcacatttgtggatttgcaagatgcatatgtttggcacattttaccgatgaatttttagcccattttaccaatgaaacasgttcagcaaggtcaaggcacttgtccaaggtcacacagcagtgggtgtgtgcgctcagttttctctcttttttttkttttttgagatggagccttgctctgtcgcccaggctggagtgcagtggcacgatctcagctcactgcaatctctaacctccacttcccaggttcaagtgattctcctgcctcagcctccagagtagctgagattacaggcgcccaccatcatgcctggctaatttttgtatttttagtagagacagggtttcaccacgttggccaagttcttgacctcagatgatctgcccgcctcagtctcccaaagtgctagaattacaagtgtaagccaccacgcctggcctgtcttctaatttttgatgtgctaagcctgcattaaaaactacaactccacatggaccctccagggtggtcctccgcgtggtccacagagggagggagtaagcctttgctctggtctgagccaaaggtcactgtgactgagtttgatcatctcagagcctaggggaagaagccccccacccagaggccaaagctggaggagagaggccaatacatgaccagtctgatgcagctctccrgtgtgtctggcctgactgctgcctcccctcgaagtccacactctgaccacagagctgtcatcagggcccaggaacagccggctcctgtgctggggcagccctgccacctggaaccccacgtacctgtcccgtgtcctagggcagcaggtggccgtgactgtgacagaggctggtctccaggctgtgccctgggracccagcagagaatgtaagaagttggattttcccatgaacacagatgagaattgaagcccttgggtgaggcttttttccgggcgttctgtgcccaggagtccaggctgcccgctcattgctgcatgtgttgaaacttcagttttgcatctaatttgcatatgaacagcctgcctcagatggaggatgcagttcacagtgaggcagtcagaggcccatggggacaatgtgtccctcagccctggggcagtggagacctcacaagggcagagcctgagccggtgggagaggagccagagaaggtgtggcccggtcccaaagcaggscccggcctggcatactgtggatggtgaaaggagctggcagagccagtcttcatggccacccagccagggctgggggtggacagactcctccagtgggattgcccctgtctgcatctagccagggggctggcacctgctgcccagatgcgtgggcccttcccagctgggaggctccagccagaaccctgggcccagcttctgggaagccccatacccttcctcatgtccaaggccagctctcagtccagaaagcaccagcctttccacaggcattgatgggcattgtgccagaatgacacagatggacatgacacaggccctgccccaaacacaccgagaaccaacaacccttcactactgatcagcaggcgatctaaaccagcagacgagctgtttcttcacctccttcaggctatcctgccctgtcttcagaacatccagctgggcgtggtggctcatggctgtaatcccagcactttgcgaggccaaagygggaggatcatttgagcccaggagttcaagactgcagtgagccaggattatgccactgcactccagcctgggtgactgagcaagactttgtctcttcaaacaacaaacaaaaaaacactcttaaagccccatgagatcacatgagaccctgtctgtactgggtcaaattgggtgcccgccccaccctcaaaaaatgctcaatcccagctccctgtgcttgtaaactgtgaccttgtagggtctttgccgatgtaatcaagttaggccactagagtgggccctttttaaaaacattttatttccataggtttctgcggaacaggtggtgtttgattacctaagttctttagttagcggtgaatggtgagattttgatgtacccataactggagcagtgtacactgcacacaatttgtagttttttatccttcacccccttcccaccctttccccgagttcccaaaatccactgtatcattcttatgccttcgcatcctcatagctcagctcccacttatgaatgagaacatacaatgtttggttttccattcctgagttatttcacttagaaaaatagtctccagtctcacccaggtggctgcgaatgccattaattcattcctttttatggctaagtactattccatcatatatatatatatatatatcagagtttctttatccactcgttgattgatgggcatttgggttggttgagtgggccctattttaatatgactggtgtccttataagaagaggagaagagacacacgtgtgcaacagctgtgtgaagacgaagcagagattgatcttctgttgttgcaagccaaggaacgcctgggctgtcgaaagctggaagagtcgaggaagcatcwgcccgtacccaagaggcagtggagggagtgtgaccctgctggcaccttcatttcagacatctagccttcggaactgtgagagaacacatttttgtcattttaagcctcccagtttgggatactttgttacagcagctgcaggaacaaaccaaagcacctcccgtgatggttaattatatacgtcaccttgcctaggccatggtgccacagggtttagacaaatgccagtctttgtgtgtrtgtgtgtgtgtgtgtgtgtgtgtgtgtgtgtgkygwgwbagagagagagagagagagagagacggagtcttactctgttgccaggttagagtgtagtggcgcgatctccgctcactgcaacctccacctcctgggtttaagcgattctcctgcctcagcctttcgagtagctgggattacaggcacacaccaccatgcccagctaatttttgtgttttagtagagacgaggtttcaccatgttggccaggatggtcttgatctcttgtggtctcgcgatccacctgccgtagcytccaaagtgctgggattacaggtgtgagccaccacrcccggccaggaaggcattttttagatgtgatttgctgtaaaatgtgtagcctttgagtagaggaaatgaccttccacaatgtgggtgggcttcatccaattagttgtaggcctgaagagaaaagagtgaagttccccaagtaggagggagtctcggacctccttcccatgcaagctgcggcaccaggtcttccctgggtctccggcctgctggcagattttagattgccagcccccagaatcacatgagccagtttcttaaaatcaacccgtctcgctctctcctctctctctcttcttcytcctttcctccttctctcctctccctgtctcgcttccctctctccttctcccctcctccacctctacctctcccttccctctctctttctctccgtctctttcccgcctccatatatatcacctgtgggctctctgtctctctgataaccctaactagcatgccacccccccattcagaacccttcatacttcccatggagtggagcctggcatttccctcaggcctctctcccccaacccgcccaccttctctcctgccagcaccctgcactcggggcaggccatctgtagctcagcactgcactgtgaggtcaggtgcgtgaccagctgtggggctgccccagggctcggaggcctttcttgtgtgcaccttaggtgtgggagctgcttcttcctaatgggggcatggaagcagcagggcagaggccggcagcctgggctgtccgggacaacagtgttcatcccaccagatgccactgtaaggagtccaggtggagccgaagctcagaatccrggtactgcacgtgctgaggaccaagatgcagtcgggaccttgccttcagggaactccccacccccagtcgggccagcctgagccaagagaagcagccaaaagccctggaggctccctggcctgttgggcaatggaagtgracgtggagtggacagcgccaatgggtgtggggcaacctgccagcagactcagccaccrgaagccccgggcacatggaaacgcggccacacaaacggccccatcaggaaatcccaaaagaccaagaagcacgactcaaactccaccacrgacagggacctgggactggcatggccgctcctgccctccttccccagttctctcccatgcctgtccctctgcagatttgactctttaaggacagtcgcagtgatgggagtggcgggacactagcatcatcgcccatcagggctcggggctgggacatgagcagccaatgcagccgtcattctcccaagagtgagccacctggggctgggggaggccaagggctcattcgaggcagttgggtcctgtcctcacctgtcagtgctgcctgtctacagggcctgaccaaaaggctgctccccagttaccaccctccatggctcctgggcagtggggattggggcttttgtgtggcaccctgcaggtcttcctcctgtgagcctagagaggagcgggcaagagacccttctccttggacatgctggtatagcctcctccccaactctgccccaaacccaggcctgatgactaagaaactggcctcacacactcatcagtctctgyctctcctcaatcaggaggcttttcagctaaacgctgagaacttcagccaatgaagagttcacactgtggaacacatttggcagtgcccataactcacgccttgtttattctcaccgatgctcttatcatagcgcatgtgttccagccactccacgcatgtcatctgtccagaaagagaaagtgcttgtttatttcttactgtgcggggggatggagctcccttacagattgtgaaccttatattgacaggagaagagaggtaactcaagacaccgaaagtggggtgtgcgtggttggtcttggattctgtcgcaggggtggaggtggggaggcagggaaggtgcrtggcagcattggtggcgttggatggaagaggaggtgggttgtggctggagttgctctgcaaggccactgatgttatctagattgtacgttttatttgggggcttgagaggggctggaggtggttatactgaggccaaaactccttcccacccataagtgccccccacggcactggtaccactgacccctggtggcaaaccttcctcatcctcgtgagcccttagctgtacttccctgagcgctgrtggagctgtccagggtcctgacgtgcagcccacttggggatgtgcagacccctgccccaggatacctaaggtttctcctggttttcacttgcccagagccagcagtggtttttgcttcagcctttatctgactggtgcatggaagagcagttttcttcctagtggggacactaggttcacggcaaaggggaggtccctttagatttccttcattacgtttcttctttattcgaaagtgaacttgtagccaggtatggtggctcgcacctataattccagccctttgggaggccgaggcaggaggatttcttgaggccaggtgtttgagaccagcctggacaacatagcaagaccccatctctaactatttctaaaataaatgtaaattttttttctttttctttattttattttatttttttgagacaaagtctcactctgttgctcaggctgtagtgcagtggtgtgatctcagctcactgcaatctctgcctcctgggttcaagtaattttcatgtctcagcctactgagtagctgggataacaggcatgcaccaccacacccagctaatttttttgtatttttagtagagatcgggtttcactatattggccaggctagtctcgaactcccggactcaagtgatcagcccatctcagcctcccaagtgctgggatgacaggcatgagccaccgtgcccggcagtaaatttttaaaaatgttaaagtgagcttgtggggataggtctaatctttgcctgataagctgccgtaagtctaagggttgggaatagcttatggcaaactcaggctctacttaagatgttactgatctctcttactctccacaaggcaatttttcctttcaaaggaggaagttgcaggcaggttggctttatggacacatgtaaacaggaaatcaggagactcgcccagccccaggctttgtctagaaggaacttttcctctagttaatgccaagggctctagctcagcgagcattagagtgggacagccccagaagcttaggctcagagtccagaggtccaggagacagtgtccccctgtccagtcctcacaggtaaaatggaacaggaccacagcccactgccctccgaggctgtggggacagtgccagtgggaggtcatggcctyaggggctgcaacctcaacaagcacatggccttccatcttccccccgactggcaggatcccttttggaagtggcttctcagccccactcttggccaaatctggcatgactcatttgctttagaaaaggaatatataagcaccgtcacaccttgatgagatgacaggagtgacaagcagagtgatttcccatatctgagactctgaggaggagaggtggtttagcagagccagctgccataaccagaagaaaataattaaggaaatctggcagagtagaggaaaaccaagtggtgcagygggtcccttctagtgaagggagctgtcatcatcggctgcgggagagaaaggagctctggaggctcgtgctgggacagctgcagtaatgatgggatggggaagaggagggggtggctgtcaaggagggaaayagactctgggcatggcagggggtggcaatgagcagcttgattctaaagactcctctctcaggccaggcacctgctacttacaccccacaccctgaagggtgcagccaggtctacttggagcttcccctcagtctccagggaagagtctagaaggcctgtttcaaagatcccccacatgcacgcatgtgcacataagcttgggagtgcccaggaagatggggacactctgccctttgcccaggggagagcatacccttgttcccagcccaaagggacaagcggaagaaagatgaaatgtgtcccagttctgcctgcatttctgcctctcttgggacttgaggaaggttcgggcaagctcagggaattcaggctgtccattccagggctgaccttgcatctccttcctggcctgctaatgactgaaggagacgtgcgggcacggcctcagccttasattgtctggggcatggcagtggctgagtctgtaaaactggacctcatggagaaatccacagaatctctggctcagggaagacctggagatcccttcaccagctgggctcctgccactggacctctgcccaggacgtggagacagccaggaaagtggtgggacactggaacccccctcccgcaggcagcagccaggatttgctcaggtgtggtcgggcatggtgccccrgcgcgccagccagaagatccagctctctccttaagggatagctggctctgatggtgaccatggcttttggcagagcctcaggacgaaaatgtccacccacatggtactggagcagaaagagcccctgattcctcggtggccaggtagggactggggaaggaggctccagcttctaaatagattccccccaaagggaatctccttgtcctcctgcgactttcccccaaagcagaccaaatgaggtatgacacagaatattctgctctggccaaaggttcacctcaccagagcttgcttcttaggtgagcccagcccaggcatgggcctccttggtaggcagagggggcgttccagagcatggccattgatgcactggtctctctgtgtcttcctgaggtcatcagtaagttaacgctggacaattaccctctacctgggcgctgcttagggctttgggggagaccagggcgagcaagatatgcttagctcaccccagaactccagagccagctgagaaggccaagatcacaaagcaaatgcccaggttagggaacttcctgtagcaagaggagaagaagcacgttccattcctaggcctggtgtgtgcaaaggtgtgggtgtgaatcatattccaagcatagagaatccacagtggccagaactggggcatggctgatggggtgtggagagagagtggatcgagctttctgaagggtcctttccctgtgacttaatgacatggtggggtgcaggaggaggtggcctgtgagagtcctggctgctccacagggcaggtatgggcacacctgggcagggtgcctttccagaccttgtagatcacatcaggaggcaggcgtgatgcagagaagagagcctcagctgcgagccagtgggaccacatgtttgctgcgtccccattttctgcatgggtaggggatggaggggctccagcactgagccatgccctaagctgcctttccctagagcctaccccaagatccctccagcctggatgtccacagccagcagcccataagcagttccctgggagccatgtggcagatccgctaatactgtcctctcctctgtttgcttttcaggaataaagttcaacatcaggccaaggcagccccaccacgtaagttctgagagtcagataaatctcagtgcayacagcccttgggaaactggggagggctggraagaaaattaggagctcacattggatccaytcttggaaagaaaaatgtgtccagcctttcccaggagccttgggaacaaagcccagggctctggacccatgaattttcccttccttgttagaaggcttctttgcacggtgctaatagaggccgtaaatctgagcccgcctgcaggccacctattcccgccaccctctcccaggccaggttcctgggaggaccgcgccatcttgtggccgaaatgacacttacacctcagcgggagggaggcctttgggtgccgggccagggctcagaccggaggggtctcacctacagagtcagcctgtctccctcacctgagagggacaggaaccccagccgtggtgagagcctgacctgtgtggccctcagtgcccagctgtcctttccactcagataaccacttctcttcttgccccaggacctcccaccaggcggctcccaggatggtgacttgaaggaacccacagagagggtcactcgggacttatccagtggggccccgaggggccgcaacctgccagcgcctgaccagcctcaacccccgctgcagaggggaacccgtctgcggctccgccagcgccgtcgccgtctgctcatcaagaaaatgccagctgcggcgaccatcccggccaacagctcggacgcgcccttcatccggccgggacccgggacgctggatggccgctgggtcagcctgcaccggagccagcaggagcgcaagcgggtgatgcaggaggcctgcgccaagtaccgggcgagcagcagccgccgggccgtcacgccccgccacgtgtcccgtatcttcgtggaggaccgccaccgcgtgctctactgcgaggtgcccaaggccggctgctccaattggaagcgggtgctcatggtgctggccggcctggcctcgtccactgccgacatccagcacaacaccgtccactatggcagcgctctcaarcgcctggacaccttcgaccgccagggtatcttgcaccgtctcagcacctacaccaagatgctctttgtccgcgagcccttcgagaggctggtgtccgccttccgcgacaagtttgagcaccccaacagctactatcacccggtcttcggcaaggccatcctkgcccggtaccgcgccaatgcctctcgggaggccctgcggaccggctctggggtgcgttttcccgagttcgtccagtacctgctggacgtgcaccggcccgtggggatggacattcactgggaccatgtcagccggctctgcagcccctgcctcatcgactacgatttcgtaggcaagttcgagagcatggaggacgatgccaacttcttcctgagcctcatccgcgcgccgcggaacctgaccttcccccggttcaaggaccggcactcgcaggaggcgcggaccacagcgaggatcgcccaccagtacttcgcccaactctcggccctgcaaaggcagcgcacctacgacttctactacatggattacctgatgttcaactattccaagccctttgcagatctgtactgaggggcgccgcagctggccggggccgccctgccccggtcactcacctgtgctcccgggcatcctcctgtccctggctcctcatcctgggagcaacagggctctgaggacgtgaggagccatcgctgtgggaggcagcaggccccgggtggggggcagaggcgcccagccttggatggggaccccagcccctggcctgtacctgtttcctcattccttggctgagggagaggctgagaactgggcagacacccctggagctcagccgacagttttgatgagcagggaagtctgaggcccagaggacggggggcccagcggtaagggatgtcccgcactcccttagccattgccttggaccaaaccacgtggtttgcagcttttctacragccaggggggaggttcccttggattaaggttccaaataaagcacatggtttccagagcagcggtgtgtactctgtggtggcgtgggagcacgtggaccctgggctgggctttctggggctctttctgccttcccggggcagcttgagccaggtgctgcaggccccactgcagagaagtccagttcaggagcagcttcctgggagaagagcacagaggacccagcggctctcagccaggacctgcaggcgtctgaggctaggtcccagtcaactggggtgcttccgtctcagtcctggcacattaatcctgaaaggaaaagataggcctgttcctatgggggcctcctggggtgtcttcttatcagtgcaccttgcaggggcctctggggactgccagagcagtagccagctctccaggcaagctgccaatcagggctgaggccggagccagggggcacggggcatgcatctcggtgggtgtggtactcccagcaggaagcaaggctgtccctggctttctgcacctctgagccaagcaggactctggcctgaggctgtcatctgcagacactcaccctgatccctggccccactcaccctgatccctggccccactcacctgacaaaaccacctcagggctgtcaggatgcacatgctctggaggaggagaggagaagccatagaggaaacttctccaaaagcatacatgttcacaccagagagggctccagaagtgtcagcagtcaatgtggttctgggaaggtctgggaggaggtgtttgttggagtgttgagtgtgggcatgagtgtggctgcatttgggttttgtttgtgatgggaagggctgcctgactctggagtctctgccctctgtcagcctgtctgcaggagcctctgcatgccctcctgggtcattctgtgggttgctctgtgggccctcccaggaggctgccctctgtctgtccctatttgctaggggagatgctgctgattctccacgtggaggtgccactggatccctgggtggacccccaggtggaggccctgctgattcccaggtggagaaactgccggatccccaggtggaggaactgctggatccccagatagaggaactgctggatctccaggtagaggaactgctggatccccagatggaggaaatgctggatccccaagtggaggaattgctgatccccaggtggaggagctgctggatcctcagttggaggcgctcctgtattactagttggaggtgcttctggaatctccccaggctcacaccagcctgagctgctccatctccttttctgcctccatcttggaccctggaacattgcaaaggggaacaaggcactgagccttcctcctgcccctttggggtaacatccatccaggagatctgagaagcagggagacctccctcgggttccagctggaagcggcttggaccatccaacagaagtgacccagaggggcagggaagaggctgtggtcagggcctggggaactcttgggacccgtggaagctgagacagcagatgctgaggggcccagaaagccagagtagctgccctgcaccttggccaggaccagggtccatgtgagaggagacagggaagtgcctggctgaggacaacctaaaaagaggtgccctgggtcccggtgctcaaacgtgagaccacgttcatgtgcaggaaagtgtccctggtcatgggtgcatttggtgaagccagaggcagtgcccctatggcatctgctcagcagggaacacctgaactctccgctracacagcatctgggagcagcttggagacagtgaggatgacacagcccctcccctgggtgagcgtgtgtgtgcgtctgcatgtgtgtgtcgggggagaaggcacrtgcacttgtatcatctctcagagaaacgccggctcaagctggacagacgtggacacacaacgcatccatcagtggggggcttttgttgcaggtggtgatgacagaagacaggtgcaggcagtgaccatgatcaccacttgacagccctgagagtgacctccaactgaaggccagaggcccagcctggagaccaacccagctccaacccccaaccccagccccaaacctcacagggctcaggaagagccgactcagtgcagtggtagggaagtatgtgtgtgtgcacgtgtgcatgtgtctgtgtgtgtgtctgggtgtctgtgtgggtgtctggcctgtgctgtggggtgggtggatgtgagcgcgtatatgtctatgtgtgtgtctggcctatactctccacatgtgtgtttgtgagtgtgtgtgtttggcctgtactgtgggtgggtgtgagcatatggatcatgtgggtgggtgtgtttgtgtggatgtctggcctgtgctgtgggataaacgggtgtgagcatgtgggtgtgtgtgtctggcctgtgatgtggggtgggtgggtatgagcgtgtgtgtgtgtgtctgtgtctatgtctgtgtgtgtgtgtgtgtttctgccctgtgctgtagggtgggtgggtgtgaacgtgtgtgtgtgtctctggcctgtgctgtggggtgggtgtgagcatgtgtgtgtttgtgtctgtgtgtgtctctgtgtgtatgtctggcctgtgctgtggggtgggtgggtgtaagtgtatgtctgtatgtgtgtttctgtgtgtgtctggcctgtacagtgtgagtgtatgtttggcctgtatcatgtggatgggagtgagcatacaggtaatgtgggtctgtgtgtctgcgtgggtgtgtgtctgtgtgggtgtctggcctgtgctgtgggctaaatgggtaatgagtatgtgggtgtgtgtggggggagggaggtatctggcctgtgctgtggggtgggtgtgagcgtgtgtgtgtgtgtgtttctagcctgtgctatggggtcagtgggagcgtgtgtgtctgtgtgtgtgtgttcctggagtgaggggtgtgcattgtgtgtgagcccgcgtccatgccgggtgtgggctgtgtgcagtctgagtcctgcccgtctccaggaccatctcgtgcacctgctcctcgtctctccctgcccattcgctggccattttgtggatgtcacctggaaggggccaactgatcagagaccctagaaagggccactggcagctcccaggggcaaaggaggcccattgagttgggagaagaacagcccaagccccagggccctccccagcttggtccccctgtgggcccctccgggcggccccagggaagtccctgccaggcctctgcccttgagtggctgagacctcctggatgggagccccactctctgagtggtgacgagaacagacgtcccaaagcctagggtccctcctggggcttgggagccccaaaggccttgagtatcctggggagataggattcaaggtccacacagatggtcaggtgggaaactcgggcagttctggctccccccagctccccctcctccctgctgtctcgacagggtttggtggcccatacagggcctgtccaaggggcccaggacaaagtcaggcaggcagtggacagggggtcccccatcatctccccctactctcaggcagggtttgccaatttcatcctcagggctgagccccttggtgggggacaggagcctgtggagcccatggttctgaggcctggaggcggcctcacctcactgcccctatctcttcttggccccttcctcttcagggagcactcgtggtgaacccagcgaacatcctgctggcgtccctcactcctccactgctctacaagcccaggggacccagagctgggcacaagaggctgtgttgaaccacgggatccagaaatgggcaaaggtgaaagttgggggtggggtagtctgggctcaagtaacactgcccctacctccggggactcccagctgatgggtaccatgactcctgaatgaggaataggcaggcgccccggggagcagggtgtggggagaggactgtatgttagccccactgccctgcccgggccggggagggggtgtgggagccctgagctgggttcttcacactgccctggcctggctgcttgttggcccttctcactgcccagggcacgctttgcacaagaggctctgttgggagatggcagcagagggggacccggggtctgggccaggccggggctactaggggactatcctcctgcctctccttcaccctgggccggcctcaggaaaggaggagcaggggagcagctggaggtgccaagagctctggaagctagggaagggggcagggggcaggggcagagggcagagagagcaacttcctgtcacgggcctgggcgacccttccgcgccacctgggtatgccagcctgagtcaagtggacagtgagtgctgagcgtggagaagtgcaggtgcgtgcgcgaggtgtttaaagaggagaccaagggactgggaccctgagtgtgtcgggggtgcaggtgtcgggggtcactcgtgctgggtgctgcgctgtggcctcgtgtgcgttgcccagtgcccctctcccagcggtgctgtccactcatgcctcgctctactgtataggtgagaagactgaggcacagaaaggcgtggccagagctgtgcagcgcaggagttggagctgggattgcgcccaagcggccggcaggggctccctcgcgttcgtacccacaggcgcagagccgttctccgccgccaggtggggctaagtccccgctcccgagcagcggcttggggatccccggcggggccgccaggtggcagcagcgctctggccgcgcggctccagctcccgggcgccccgcgtccccagcctccccaccgcgcagtcggctcctctgtcacctcgccctcccaaccatggggtcacggggctcccgcccctccactgtctgcgggcggcctccagaggttactctcaaacccaccagctccaggggacccgcctgtgctaacactaagcccccaaacacccgcagcgcccctaaagcagtgacatccacaacctccccgggggcttgtcctgcacgctccatcagggtgatgtcaggccttctccaacctcaaccacaacacgaacgcacacgcgcaaacacaaatgcatgcacacacacaggcacagacgcacagacacacacaaccacacacacagacacacagacacccatcctcacaaacacacacccagacagatatgcagacacacgcatgcacacagacccagatgcacgcggacacacagacacacacgtaaacacacagaaacatgcacggctcaggacggggcttcttgctgcattgaaataaatgggaagaaccggaaggtccctcactgtctcagccaagtgcatgcacttcccacgctgagccctgtcctccacttcccctcctgcactggccagaggtcacccccgacacacacacacacacacacacacacacacacacacacacacacacaccagatcccagtcccttagcctactccttaagcacctcccgcgctcacctgcgccctctctgcacacacagcaggctttcccatcagcagaaaacaagctgtcaatgccccacctttaaaaacggggaagccgtagccagatggcccctgcagcgcctgcccatttctctcctctccttcctggcagaacccacccctcagcccccatggcttcacctccttttccactctggaccccaccctggcctgccttccaatcttgccacccgcagagtccgctgacaaggcaccttccactgccgcacgctggcaatcccaggcactcttctgcctacacactccctgggcgagctccccatcacccctgtgctagactcccggatttgcccctgcagccctgatcggtagacccccatggccagccgcctcacccccagctgtcggcacgtccagcgggtgtctccacttgaacgtctcacctgagccgcacacctttcacacctcaagcccctcctctcccggcttcccggctcagccttccctacaagccctggatcgtccctttcgcc

SEQ ID NO: 93557 - DNA, 12321 bp, Homo sapiens
cctcaaaaagttaaacatgaagttaccatttgacccagaagtacctctcagtatataaccaagagaaattaaaacgtgtccacacaaaaacttggacacaaatgttcatagcagtattatttataatagataacatatggaaaaaacctaagtgtctatcagtagatgaatggataaacaaaaggtggtatatccatacaatagaatattattcagtattaaaaaaggatgaagtactgatacttgccacaacaagatggaccttgaaaaccttctgctgagtgaaagaagccagtcacaagaggtcacatattgtattactccatttatatgaaacatccagaatagacaaatctgtagagacagaaagtagatgagtggtttctgggggtaagggaaaaggggaataaggagttactgctagtgggtatgacgtttctttttgggatgatgaaaaatgtactgaattagataatggtaatggttacacacctgtcaatatattaaaaccttctgaattgtacatttttaaatggtgaattgtgtagagtatgtctcaatttaaaaaaaaaaaaaaaaaggaacagttctaattttcggattgtccccagctttgtggctccgatggtctgtagagccagccctgagtgggctgcaatcctcccatttctccattcagcctgtcagatgctgctcctcttcaaggttcakcccaacaccctgtcacccctccacagcccacccttccccacctctgcccaccatggggaagccttctgatttcttgcaggggagccttccctggaggagtgtagtggtttaagccaaaagcattctgggacactgagttcatcgtacttttctctctacttttgtatacatttgaaactttccataataacagcaaaaaggactctcccctccagcctgcccggcactcaagcagcttgtgtatatcttcgtagataaatgtacattaatgattgacctacatgaagataaaacaataagaagaattccctctgctggagtgtagacccacactgcccttttcccagcatggtggtatcaggagaatagaacagggcctatgccttctcttctctaatgatccttggtttgtaagttttttccccaagagaccattccttttatatttttatttttttaaaggtaggtgagttgcctttgcaaatcctttgcccatttttccactgggattatttttcttaaagatttacaggagctatttatatattctggatattgatcttttgttgggactgcaaatatatttttccctgtgtgaggcttatctttaatttttaaccatatttctagtgatgtctttaaaatgctctgaccttccgttactgttcttgttatctgtcagtttaaggcagggtcccatgtaagagtccatcactgcgcttcctggaaaatctgctagtgataaaggaggccgaagtttgtcttccctctttgccttttccaggaagtggatttcatttcattcttccagctcttattgctaccatagtacaacggagttaaaggggcaatcagaggcaagatgacgactgcattgtgagtcactgcaaggactttcccttcaattcagagtaagataaggagccagggagggcattgagcagaggagtagctacagcagtggtctaggcaagagatggcagtggcttggattggggtgatagaggtggaggtggtgagaaatggtcagatttggggtgcatattgaggatacagccaataggccttgccagtggattagatcagcagtgtgagagaaagaaaagagacaaggatatcccaaggtttttggcctaagtaactgtgtctacttttgctcaaaaagtaatcaagtatttgggcttaaagttaagtcagctccacaaatacagagaccatctctgttttgtgactactgatctccaagctaccacagtgacaggtacatacgcactcagtaaatattcgtggaatactaaataacaatctttttacaaatgggcggcatcggtggtataggcttcaagcacaccagaggacccattttatttccacagccctttggcatccatctcaactgtcccaacttctcattcctggccctcccttccattgtcatctcaccctaggaagagcgctaagtcccccactgtatccccatgcttctgcctcctccatccttctcatgcagggtgccccagggagtgggaagatggagtgacaggcagcagggcctgaaggactggagagctttctctccactcatttcagtcctcctgtggttcttctgccaaggcttttagcaactctgctcactatctgcattagccgcaagaggagtggatgggaacaaaagcaggatgagaggctcttgttctttctctctttctagaagaggctagcagagctcttctcaccttgacatttagtggcagatattcattaccctaaatattacaccaccagcaacaacacccccatcatcatcatcatcatcaccaacctgttaatcaaaataattgcaatcaccatttagtaaatgtttaccatatgccagatgctactcatttcacctatattattgaatttcatctgtgaggactccgtgaggtgggtagtatcatccccattttacagatacacaaactgagacagtttcacttgacccttttttggatcccctaccctattcttgctttgcaaggctcacttcctcatgctaaatcctttattgctgtttgcaaaacatgctcagtttctgcttgcatttccgcagccttcggatttcaaatccaaattttttagagtcaggcatgttctcactatattgcccgggctggagtgctgtagctattcacaggcatgatcatagtgcactgctgtcttgaactccagcgtttgaagacataccttcccctcatgccctcgactaaatgcttactgcccaggaggggcttttctttatctttggtgaccctgcagccttcagtctttcccagatactctcttcccactgcctctggcacctatttgtgctcaggcaaagggatgagtattgttctgcttgatttgggggaaaagaataacttgtggattgagctcataggaacatggcaccggctgtttggggcttttgctgttttaccaaaaatagcaaaatctcttgccaaaaatcaatctctctctctctctctctctctctctcacacacacacacacacacacacacacacacacacacacacacacacacagctttctcttggcttgaaaatattttgagggcacattgctcttgttcacatggcaaagaaaagtgtgggtttcagtatcaggctgacttgggttcaaacaggctatacctgagctgggtcatcatgcccaagaagcatgagtcagggctgaaatctactcgctggctcagccaagccccaagacctggcccagggctgcatcagccaaggaaggagtgccttttcccagctggtcttcccagaagacttgcctttttgcagtgcacccactcagagggggagtcttttcctaatgcacacaaaggtgccttatgtgaggggcaaccatggttcaaagcctattttgcctcatgctagctgtgctgcttaagacaggtgactgtacatatttattgtcttcagccaataatttgagaaccctgactctgcagcaggcactgggccaagtgtggcaggaccagtgtgacaaagtcacgattcctgcctcagagaagcctgcagtctagttgagagatcctcaccaacagttggatgggcacttaacctagcactcccagaatagatgctatagaagatgctgaaggaatggtgttccaggcaataggaactgcacaggaaaaggtagtgagatgtaaaacagcatagtatctgcagagaacaaagcacagtttggcattcctgaagcacagagagtcaggtgggctacagcaggagaaagggagagagcctctgaggcccatttctcttatctctaaagcaaggatgactattacctccatcagtgcgggacctgattaggtattcaatgcatgattgcttctatgcccaggtagttttgaaactctgttgcccagattggagtgcaatggcatgatctcaggtcactgcaatctctgcctcctaggctcaagcgattcccctgcctcagcctcccgagtagctgggaccacaggcacgcaccaccacgcctggctaattttttgattttttcagtagagatagggttttgccatgttgcccaggctggtctcaaactcctgagctcaggcgatctgcctgcctcggcctcccaaagtgccaggattacaggagggagccactgtgcccagccctagttttgaaacttctcaaaggcaggtaccgtgtctgcagctataccctatcatagcacactgcagctttgagcaccactgtttgaagacataccttcccctcatgccctcgactaaatgctcactaaccaggagggtcttttctttatctttggtgaccctgcagccttcagtctttctcagatactctcttcccactgcctctggtacctattcattctcagggaaggggatgagtatcagacactgtgctgagaataaaatctgtgttaaataagtagtttttgattgtctagtgctagcacatattaaagacctaacaagtatttgttggatgaatgaaataagccagtcctgaaacctggtccttacctcctagatctgcctgagatatggggttggaggagggtctttggagaggaacgagaaggaggaagcacatcaaaaccttctttccagagggagtagctgcttggaccatagagcaaagccctgtgaagcattttccttaaactggaggcccctgggttgccatagggcctccactctctggtttctgctctcaggggcaggacaggggagcacggctgaggtgtgagtggccagggcaggggtgcaggcagagctccagtcccagaaaatgactgctcatgtcgttcgctgggagtgtaaagaagaggctgggggctgaagaggcaaagcccagggaatataagaaaatcttagctgcagggaaaagcgctcttcttcgcaatgaaggcaatgaaattagaggtaattgcaagacacggagattcgataaaacctagggaggcgatcaggtaaggggggctggaactagcttgggagatggaacagctgttcctcccctccagcgccactggtaatagcccctgtgttgttagaattgaacaaacagtccttcctggccccaaccagcgatgccctgtaatgggggcagctggagcagccagaggagtgggggtagcttgcccacctatgagacacaagctttcccccgagacaccacactgtgctggggtctggaagcccaagaatggtagagcttggacctgctgtaagggcagaaggctaatggggatgactaccataggactgacctccctttcacctgcaggccacaggccaccagaggccctaggaggagctagggcatgccctccttccctgtccccctgtgtccttcctttcacttgctgaggatacagtggtgagtaattcacaccatgaaacagaatgaaatgtggaaagtgctggttaggaagcacaaggccacgtggacgcatacagcaggtgacagcccagcccaggtgctcctcagtttgggaaagtctttaagaagaaggggtctttagtggggcctgatgcatggctctggggagaggagtcagtaggaggggatggtagctgagaaagcacaagcaccttctggaagatgcattgcacttcagaggcaagattttctttcttttctatttttttaaaatttcttactctaatctcatgacagattagggaggcaggttttgaagaaggttgctgatgagatagaaaagcaacctgaggagatgcggtgcgaagagtgaccatgatgaaattagcacaatggctttgggaactggtgatcctgggctctacctggttggccctgaccatgggagccctgggcctggagctgcccttgtcctgctgggaggtcctgtggtgactgcccgcctacttgctggtatcctccaggtgctatgccctgggcactgtgggttatggagcggccackttgcctratagcaaggacaccatacatgagctgcataatcagaaccaggagcccaaagctgactcagcccacagacaccctaccctcattcctgcgcagacagccctctctcccattccccattaaagagcaagtttattttctaataaaagagagaaacgaaaagaagaaaagaaaagaaaagcaactttggggggaaggactattacactgaaaggaattacagtgtcaatgcttaggactattacactattacgcttaggggaaggactattacactgaaaggaattacagtgtcatgccatcgcaattaacatgtcccacagcgaggaatagctcagaaactccaagaaggccctcaggggacattaagcagcagccaaagccaatggtgatgaaaaccaaggcataatattttataagtttatgatgaaataagtgccagagtagaacccaaactggacagataccaaaagaacaagactgtgtcctttgcaagaacgtggatggagttggaggccacgatcctcagcaaactaacgcaggaacagaaaaccaaccgcatgttctcacttataagtgggagctaaataatgagaaccgatgggcacaaagaggggaacagcagacacttgggcctacttggaggtgcagggtgagaggagggagaggatcaggaaaaataacaatcaggtactatgcttagtgcctgggagagggaataatctgtacaatacagccctgtgacacaagtttacctacataacgaacctgcacatgtatccctgaacctaaaataaaaattgaaaacaataaataaataaatacaatatgtcaacaagaacatatgggaagaaccatgcccaaaatgaaatagtacaaaatggtcatgcttgggtaagggattgtggctgatgtttcttttgttgcttgtttaaacaaattgtttttctttgtttgtttgtttgtttttctttgagacggtctcactccgttgcctaggctggagtgcagtggcgcaatcttggctcactgcaacctctgcctcctgggttcaagcaattctcctgccccagcctactgagtagctaggactatgggtacccaccaccatgcctggctaatttttgtattttttagtagagacgagttatgatctcaccactgtactctagcctgggtaacagagcaagaccctgtctttaaaaaataaatttaaaaattaaaaaaaatgtaaaatttaaaacatgaataacagcaaaaaatggtaggtttagaaaaatgttgttttcaagctgcttgttatttcccttctccctcaaaacaaggtcattcatggccgttgtcagtgaaaacaaattatgtttccttcattctgcagcccagagacattgtgttctgctcaactcaatccagctcagtaagctctttatgtgaacatcttccctgcgaaggtcacctgcctaaatgctagggctgtggggtgagggaaggagacacaagcaaaaacaaggggagcccttgtcttcagattgactggaatataaggatgaggaagggaattaggttagaaagaaagatgtaggaatctttagaagagtctctatgctaggacttgctctgcaggtagtgaaaagtgagggtgtgataggattagagttggttcttaggaagatcattccaggagcagtgggaggacaggcaagaagagtggagtcaggaaggtgasagagcccacagactggcccatgcttccaggggaggagagcaaggctggggaaggacagcagtaagtgcagccaaggagccccctcttattggccagcaggcttctcttaagtgtggcaggcagggaacaggctaactcaccctgtcttcatgcctgaaagaagaatgcaccctagggcagtggttcccaaccttggctgcccagtgggctcaactgaggagctttaaaaatactaggtcctgggtcccatccccagatagtctaatttaatagatttggggtattttggagctttcagaggattctaatgtgtgatcaagtttgagagccactgctttagagcaccatcaaacacacgaggagtccacgctcctggtccccaggcaagatctcatgcttctgcctagaagagatgctgagcagctggtcactctttttattgggctctgaatttgaagcttttctggggatgtgacaactatgtcctctgcagcattgagagcactcagctactttggctcagtactactgatggcgttctgccttctgatctctcctcctgtgttcctcatcactatgtgtccacttccttctgtatgtccatgcctttaccatgcaattttgggaggggcaggaagaaaccacatgtgttcagggtaacatcttgacctggaaactcctttctgtcttttatgggaacaggggtgccggggagattctgggccttggggacatccagtcttcctagtcctcaatggctgaatacaggaaaaagacatcattttaggtatatttataaagcagctgagctctgtctcaagatggctaggatgagcatttggaataaaaagttgatatttgcgatatgtaaccaatacccgcagtaattaggcatgaagtttggccacctcttctatgggtgaggccacccagagttattcttgtctttcctccaccccattgagcatctccgatgtgacaaaactaaaatgctagaggcctgggtccagcacatgaggccagaaaagagtgtaggtacctgggaatgtcagtgccattcagtgtgaccacagtaagggcaatcacccgggcagctctcccaggaatctgtccttgtggccagccagtggggtgactttccagagtccattcccctgccagtctataagtggcaagcttgggagacagacagccaaggtccttttagggatgtggctagcaacctctgccagaaacctagcatgggtcagagggatagtcagctgctgtgaaccactagatgccctgtcaccaacatggggcaagttgaagaggtaggaagagggaagggagcagtggggacgccttcccctgccactttcacaaatcattactatctgctgggggctgggccccacagtgcatctgataaggttgttaagtcagccggaacacctgcccggccatctggcacttttatcctctagaccgggccacacaggcctctttgcccacctcctcaaaggcagtgggctgcagggstcccaggacacctgctggggagaatgagtgtcccccagccaccccaccgccaagccccaggtgctgcaaggcagcattctgggtcctcaggtaacacttcagaaatccttctttatttttttgagagatggctccctagcagcaatgtagcaggggtgggggcccccgctaaggctgcctggagtttaaacacaggttgattctgacctcactgagataacagagcaatgtagtagtgaggctggaacagggagaatttaaccacggctttttcttctcttcatatcagactaaattggagcagcagcccagggatcattaatcatctcaaatgctgggcttcagaatcttatctccagtataatcacctcatcccctcttctgggctctggaaaccatagcatttgaggagaaagcacagtacctatgttagcagatcttgttaggcgctatctagcagcacgtgacccgttaatgtatatgtttagctgttccaattgagttctgatttgtgttaagaaaaacacaactggggttgctggaaatgttctgtatcctggcccagatgatggttatacatttataaaacaccatcaagctctacacttaagtgtcctttatccatgttctctctgtctctctcgctatctcttccttatccttctattaataagttttttgaagaaaaataggccgtgtgcagtggctcacgcctgtaatcacagcactttgggaggccgaggcaggtggatctcctgatgtcaggagtttgagactaggctggccaacatggtgaaaccccgtctctactaaaaatacaaaaaattagccaagtgtggtggagcatgcctgtaatctcagctacttcggaggctgaggcaggagaattgcttgaacccggcaggtagaggttgcagttagccgagatcgtgccattgcactccagcctgggcaacagagcgagactctgtctcaaaaataaataaataaatctattttttaaaaacaaaaggcacaattgagtgatactaaactctcaaaagtagcaacaccacccttgcaaccaaggggcctaggctgtgtgtgcgtcactgtaaccttagtggctggatctctggctgctcagggcaaggcagtagaagggggaaaagaggtggaatttggaggaaagcacatctgtatttgcatcttgaccctgccattttctatgtcactgtggacgagtcatttggcctctctgctccccagtttcctcacctgcaaagtggggatgatattgcctgtcttactggttgttgcgattaagatgattaaatggcaacatctggcacattgaaggcacacaccaaatggcagtgctcattaccatgtaatagctggcttctcctgcttcccctgtcctcaccttaccctgtcacacctagcacctgaaataaactttgatgttgcctggcaccctgtcctctcccttcacctcccctcacccaccccaggatttccgctcctcatttctttttattttttttgagacagagtcttgctctgtcacccaggctggggtgcggtggtgcaacctcagctcactgcaacctccgcctcctgggttcaagcgattctcctgcctcagcctcccgagtagctgggattacaggtgcccaccaccatgcctggctaattttttgtatttttagtagagatggggtttcaccatgttggccaggctgacctcaaactcctgacctcaggtgatccgcccgccttggcctcccaaagtgctgggattacaggcgtgagataccacacccggccagccttggctcctcatttcaactgcagaagtcctgcttatatgacttggcctgacccatgcaggtgctgccacccactgcagcaagagtaggtcactcctttctaacatccatcctttgagatcatcccaaccctgactctgtggtcagtgccctcagcagcagcatggccccaactgtacctgtgggctcaggagacactgggttggaattcccatggtgcatgcaaaggacatcaacagctactcaacacttgccactggggaccagggagtggtggttccttagagcagagggtatgggtgggtgctatggtctgaatgtttgtgtcccctccaaaatgtatgtgttgaaatctaatccccaatgtgaaggtaggaggtgaagcctttgggaggtgattaggtcatggaggtggagccctcatgaatgagattagtgcccttataacggaggcctcagagagctgctatgcctcttccaccatgtgaggacacagctagaaggctccatttatgaaccagaaattgagccctcaccagacactggatctgccaacaccttgactttggacttccagcctccagaactgtgagaaatcagtttctattatgtataagctacccagcttatggtgttttgttatagcagcctgaactatgacagtggggcagacccagtgctatttgtgtccactcaggaatgcagaccagtccaaggtgaggtgttccagagcctgtctgtgctgggtggacacatcagaggcatgagactcacccatgcacacccttttccagcatgcatgcctgtactgcagtgaatttactttcctttatgaaccacctacatttgcaaaatcactccttcctaatgagcccacgtttgcttccctctcatgccaaccagaagcagtctaatcccttttctacactctcagcatccaaatatttgaagatattcgtgtcccttgtcctcgaagggagcctcgtgcaggttaaagatcccctgttccttcaatggtagctcagacatcagcctgaaaagcagctccttgctgtgggccctgcac

SEQ ID NO: 93558 - DNA, 14871 bp, Homo sapiens
tggtaggcagtgccaccccaaagtggctggctccttgcatgcctgcccatctcggcagaatgggcattgtgaggctggggctgctgtgcctaaaggtctcagtcctgttcgtttgtttagtcagctgccacagctcttgcatgatctgggggtgcagaaaagacttgcatttgacccctgccctcatgacacagattgtcacagtcttccagggtaggaccagcttcctgcaagggatggtggtgggtggcagcagatcccagacacctgtgtgggccaggctgcagagcagggtgggggctgtgaggggctggccgggagggaggtgcatcaccggggccttgtgctgttagctttcagagacagcctatggtaatgacaagcaggcagcccaggcgcagtggctcacacctgtaatccagcactctgggaggctgaggcgggaggaggggtctcactatgttgcccaggttggttcgagaccagcctgtgagacctccttctccacaaaaaattcagaactagccgtgcatagtgggcacagctgtagtcccagttactgggcaggctgagaatggaggatcacctgagcccagaattcaaggctgtcatgagccatggtcacgtcactgcacaccagtgtgcaatcttttaagatcctgtctcttaaaagaaaaaaaaagcaagtaataaagatcgggcaaaacaaagcgagtcgactgcctaccacacagcctgccttggatcagagcttcctgcaaacacctgtgtggttttccaggccgctcactgcagccctgttgcccacactccggttgccacattccagctgcagccctgaatgttcttccacccacctgggcccagtgcctccctgatgacaaatgcccctgccttcttgctgagccgggtcttcaccttactgagtctgagacggtttccctttgggcccctctgttctagtgactgctggtcagtgtgtctcccctacctcacaccgatggtgggacaggcccgtgtctgcctttgtgagatgggccctgcaccttgcatataccaggttcccagccacagggggcagtaggtacaacaggtgtcatgtggggcaggctcctccttcaaaatctgaggcccgggggagccacccaggtcctgctcaccacccagcttcaggggggccttcaggcaggaggagtgtctcctggttttgcctagctcccctgcatcccctgtgccaggcccgtacctgcctctgacacccctctgtctcttcctgcagacgatgatgcttttgagcctgyggaggtcagcctgccagcccctggggatggtgggagtgaaggtgcattactccggcgcctggagcagcctctgcccactgcgggggcctctctggcagacctggaagactctgccgacagcagcagcgccctsctcgtgccccctgaccctgcccagagcgggagcaccccagctgcagaggcactgccagggggtggccgccacagccgcagctccctcaatactgtggtgtagacggcctggcctgtaccccaayggtctgggagcacctgtcygttgtagaaaacaccggtccctggggagacttgaaaggcccctgtcccagcctggacgccacgcactgccgcacgtcactggcgggctcgcgtgtgtacatagagaccacagcccgccttctgccaaaagaagtgatggcctgcaccgagcttccttgagggcttcagaaacatgcatagctttggatcactgtcttctcctttataaatggcagaagagtgacaaaattcattcagaccgcacatgttagaggcagggaatgaagaaggtactgtgggccatggccacacctgatgcgtttttggtgggcttacttggtgcagtgtgctgtccagagagacctgctgacccagtctgggacaggcacagtgggagctgccacagtgccccttgctggccgccctcaggagggggcctctggaccgtcagtgtggcgtaggcagtgggtctgcttcagggaggcagcctcttgactttgtcacaacggttgcactgaagatggcccccacaagcccagttgtgaatatcaaggtgaccctgcccctggctgggagctcccctggggctctggaacctgaagccctgagaaggagagcttggaaggaggttgagctcttcactgtgtctttccatctgggctctgcagcccagctctgtggcaggaggcctgaccccaccccatcagtccctctcccagcattgctgtgcatggctccctcaggaagaagctctggagtggggccgaggccccagatgctctgctggggtctggggactgagctgcctcctgtctctccactctggagccctgggctcttgcctcctgttgaattgcccctgggcctgcccccggccccatttgtgccataaagggttgcttcattgcaggaggggtggctgaaaccaccatcctgggctgcatctatctccttaaagtccactccttacatcaccgccactactgcagctcagtgcccagcggccgcatgcacacctcccggcccctcctcagcagcgcaggggctgggggcccttcctggcacccttttgcctgacggaccctgttgcctgctcctgggcagtggttttgttgcctgacacagggcctttaacatttctgaggtttggagattaagcgggttctgtgcgatttttagcacatccatatcttttctacgttgaatgtctggatctttcctttgtatgtttgtgtctctgtgtgtgtatgtggccaagcgtctgcaggtgagggtggcacatggaacttcacgggtcactgggggcccactcttccagggtcatcgatgcatcctgggctgtgctgaggcagtgctgtctcgctcagtctttccagaccagcggggcagcacctgggaggcctgtctgaagcatgcagttctgtggtgctgctcggggatggactccatgcacagtccacttcttgacacattctcacactgtggctggagacccattttttccatcccatgtggaatgagaatcttgagttgcccacagacagacttgacctttgtgccagaactgtccagagctgtgagttttgttactgaattgcctgtccctgagcttggcctgctggagcatgatgctggaggctgtgtgcgggcaggcttgtgctccccttggagaagggctgctacttaacaaggaagtcctggccacaggagtcccctactggctgcagaggacgaagcaggaagcatgccgtggatcccacatgcactggggcagggcagccaggttccagagcagcaggcatgtgcattatgggtgccaggtggccagtgagggcccgaggaccacgcagcagagtcccccacgggcctgagcctgagagctcagaggattcctgccaggcctcagaactgtgtgtgcgggacagggtggctggcacgagatgtgtgggactgggacgcttcctttggggaccagaggaacattaggggccggtcagacacgtagggggcagtgaggaaacggggtaaagtggaccatgcaggctgcagagggtgggccttgggctggccggggttgctgggtggccccttccccatgggcctccacaagcactcaggccactggcacgttgggccaggcagaaggtccacatggcagggctgcctggaacaccgctgccactgtggctccaggaggcccttgggagcatgaggagagctggactcgctcatctgttcttgcaccaccatccagaatgccccctttgcaaggcctgctgcagtccccagtctgaccagcaagtcccggggtcacccttgctgaaccttgtgctccaggggtcctcctcctctaggaccagcttgccacggtttctcagagcccaggtgccctctgacctgccatgcggaggtkggatttgatactgtacattgtcttgatgcctgtttttttatgttttcattaagggtttttagtttttggttgggttgacactaacttttcttaagatgctgtgagaatcatttcatccaaatgccaaataaacttgtgttccggaagaggcatggttagtccttggtgtggcccccacggctgccacaggctaaggtggaagaggctgggtacccacctttcagcagaatgcacctagggtttgcagcccttgcaggcgtccatcaaaccccctgaggaccaggcagagctgagcctggagcccctaggtggagtgtgcagggagagcagcagccctgagctgcctacagctatcctgcagcacccagccctgcttggggcatcggctgctgccttggcaggtgttgctgacgtgcacaggatccacataaaggcaaggctgcttgacaccatctgggagctagcatgggacggggtggtagggcagggcttggaacctggccgtcagcgccatttcctctaagctcccctcatcatccgggtggctggaaacagcccctccctccagtccaagccacctaatgttacaaagtagcctaggtcctctggggcctcttcactcatgtccagcagtgccatctctaggtctcagagggtagtgggcccaggaagtgtgattgcatgccctgctctgggggcactccagatgtgtatactggggggacgtcctgcggccggacacgagaggagtcagggttaggaaaggaactggtaagtcccttggcagggatgggagcctcgaggatgtggcccctcattttttatcccatctgctggggcaggagtggagtggtggtgttgagtcccgagcacacaggtcactgtcagcactctggacagagccccgagccctgcctctgggtaggggctgtcttcccatccccaatgtgggtagggccctgccctctggcgattggaaagaggcgcagggtgcaaagaagtcccctcctctgacctcctgcagggctccgtcttggcctggatccgcaggggggcctgggtaggagggaggctgtggtcttgggatggggtggcagttccgggcccacagtrgggcaagagacatcctacaccttcctcccatccttgccccgaaagtcatgggcactggggtccaaggtgccctcactatttgacctttcttgctggtggctttggtgtgtcattctggtccccagcctctgtttcctggactgtaagtggggataataataggtcacccctcccctgcaggattaacctcagcgattgttgctggcatcagtgcagccctgggaccagagcacacctgggtgagtttggagcgctcscgctcttcctggtggccctgcctgggcaccgacccctcccatcctctcctcagtagccacgcccctagcccagctagctaatgaataaatatgtagtagccaggccagcatcctggctgcgtggtctagccactttctagtccttcctagctgcggctgccactgagccacgcacgcccctggcatcatgctcgccttgcggtgcagctggtgtggcgcagactctgagagtgagcaccaggactcttcctgtctggcctccaatctaccctcttgccatgctccaccaccccttaggtcttgccactgggagtggggagggactggggagagaaaatactgaggtaggggtgacaggagagaaggttcttcactggcctcccctggcctaaacccctgacctacttcattcttggaccccagctgatgggatggggcttggagagggcccagatgactggcctctcagctcagcctcctgcccactgtctctataggtgcctggtgctatgactcccaggacctcaagtatggtgaggacagagtgtcatgtgaggctgtgtcagatcagtctgtgtcctgggaccaccagagcatgtgccagtggtgcaagagtggccaagagacagtctgcaccctgcactctgtggcctttgcaggtttctgtctgtagtcgtctgccccagtagactgactgggcatcaggtgcaagtgygtgactgtccccctgtgtgtgagtctgggcctgctgtgatygccggtcccgagtcagtcaaggctggtrtgccygttactgtggccagcccaagtgtgtgcaggtgatagaggtcccagtgtgggtgtgcaactgtgtgccggagacccttycaccttcatctcaccatggggcagccaactgggagactagatggataggtcagatgcagggtacaagagaagggggrtgctgtgacctgttcaggtgtgggggaagcagggagctaggtttcctgaggctgggctatcctctgggtgtatgggggccactctctgctgcacccccaggctgcctccctgaccccccccccaccccaaaggccccagtccttgttccagcagtccccacccactggaagaagctggccccctgcctgtgggggcccaggccagtccctcatcracattgactttcacagggtccggcggaactctaccctagggcccttcatcttccgaggctatgactcagcacctccaggcccttggaccctggagaatgacagccacacaagtcagcaccctgtggtcaggacccctcctaggcagaggcaggagccccacacagggcatgagagctcctgcgtgtacacagggaccaggaccccctacacacggragctgagacaycctacagggccaaaaaccctccacaggggctagcttcasaggaaaggagcatcctcacacagcagtccagatgcaccctctgtgtaggtgccaggtcccaccttacaaatcacaaccagccatggcccctgaggaccaggagtcagggtctctggcagggccaggatccctgaccacacacagctgggcttagagccccacaccaggagggctgccctctgccctcttccatgccatgctgggtgtgggggggggaagggtttcccctgcagtctgtggagctctgctctgctgaccagcaggagccatggacaccatgggttccattccatggaggcaatggggccgcactggggagaaacctggcctgaggaagggcctctgctcataccctgtgcyctaatggcacaagatggacaggtggtgaggtagagagggtgtcgtgtgcctcctccccttcattgctactctgaatggacactgatcctcagaaccacctggagatttgggaggctgggctgctgttgcctgtctaccgcgcactgcagctgcacttcaactgccggcggtgggggggcccgaggcgagcagactcrgagcacagcctggacaggcagcgccaggctatggaggtagactcgggaacaaggtggggtggccggagtgctcccacggaggtgagagagagcaaggtgagggcagctgggtatctcccacatctgtgcctccccccagatgcacgtggtccacagtaacacaaagtaccagagcatggaggaggcaccacgccacggtgatgggctcgagtgcaggccctgctgctggagktgctgctggcggtgaaggcagggctgtgattctatgtatgtttcmaaaaaaggggtycatggggatcctggaagtggacaggccaggcctgtggagtccgtggggggatctctagggtctataggatctgtrggaggatrgggcggtgggaatgcctgaatcggcagggccagtggcggcgagaaccctccaccccatttcccagatgccagatgcctcctgccactgggarcctcctgcttagagtaycccagctgagttccctcttcagagactcccycactcagaacccctygcacttggagcccctcccaggagcaggactgyagcaacaccaacttctgcgccatagtgtcgggcttgaggaargtgcctgagccaggtgaggagccaccgggtcgttttccggctcaggggcggggggtttgctggggatggcaccagcagggcacagggaggctggttccaatccccctccctctgccgccyrgggctctcagtgaatctgakgtccaccttcccgctggcgtcgatgcggcccaacacctcgagctactgtcgcttcgctgggtcgctgaccccgcctgactgygagcccacggtgctctggaccgtcttcgaggaccccatacccatccggtgggtgcaggtggagccaccgtyccccctcgccccccacacccctccccgggccttgcctggctcctcccgcaggcgctgcccctctcccaccccgttttgatctctttgccctgcaccctcagatgaccctgttctacascctgccccaggctggaccctcccactttcaccccataccgctcacgggtaacttcygcccccagcagcctcttttttttttttttttttttgagacggaggctcactctgtcgcccaggctggagtgcagtggtggaatctcagctcactgcaagctctgcctcccaggttcatgccattctcctgccgcagcctcctgaatagctgggactacaggtgcccgccaccaggcccggctaattttttgtatttttagtagagacggggtttcaccgtgttggccaggatggtctcgatctcctgacctcctgatccgcctgcctcggactcccaaagtgctgggattacaggcttgagccaccgtgcccggcccacagcagcctcttaaggggcacrcagtcttggcctctccgagagcctcggtccccgcagcagccccctgctcttcccccaccctagcagttgtgcactgcgctctgatgggcctggggctcagcctgtggttctgtcaaccgtgggcgaccctccrtgtgaaataatgaaataatgcacagagtgaccttagcctaatgtagcctggagggggtgggtgcgtgacccggcgtggtcccccattgcaagaggggcatttcctgccctaatcccactgaggcctcagtgtgcctgtctgttccgtgggagccctctgagtgaccctctcctacctcagcagaacccgggcctctccaggttcctctcagagggagaagggcccccaccctcatcctatacattgtgtctgaatcccctggtcagatggaaggagaacatctagcagtcagaaattccaccattaggccaagattacattattttattttaaaactaagctgggtggccaacccagggacaccgtgctctgctaaatgatgactccagctacatttcccgaggccaagagatgagaagctgctggctccaggctccgctgcaggctgccctggctgagcgggtgctgggcaccgcggagsgctgcctggtgctctgaagccatgccccagtgcctccctgggagttctgctgtggagtctgtgtggagggtgactctggagagatgtttgtgtcccggtggctgcctgtggtctggctaagtaaaggggtgagtattcttggtgtcactgtccaaagcaaagttgtgtccacgggacacagactaggtgaggctctgtgtccaggtgatgctgtccagtgagagggggttscagtcagagtgaggctgaccggaggccgctgtccaattggtgccgtgtggaatgtgattacatactggttgacaccatcctgagggccatcaccagctgagtgtctcagccgccctgtgtccctgggttctgtgctcttgtgtgtggtttgacactattccagtgcgtggagaccctgcctcgtcactgagaccttgaaagaaaaagaacctgcagtcaccccaaggaagaggagtctcggctgttcccctggaggctgacccagccctggcccaaaggctgacccagacccaaggcccaaaggcccagctctaaggtccaaaggggctccaccctgttctctagccggactcagtctctcgcaaggaccccggctcccagccgcactccccagacgcacgtggcccaccctccgcccgtcccgcgcccaccccctccctccagtaccggagccctaactggcggcacccgggcacccttttgactcagagccacgctccacgagggggaccgatctgctcacttgccccgtcctgggggtaccagagtagccagcgcgacgccttccgcacctcgcctaggctgcccttgtgcggccgccctcagtccccgccaccttgcggggccccaggcggcactggcatcttcttgtggttcttcctgrccggggctcggtgcgctccgcattctgctgggccgtccggggcgtygtctgcgggcctggaggcggcgaccagggcgctcacggtgccgagcgtccgcagcagggtcgggccgcggggcgyggcgcgggggacggcgcggggctcgcggcgggcaggcggggacggcggcggcggcggcagcagcgcgcgcagagcgtccagctccgctcgaagctccgcgcgcagcgcctcaatctcggcgcccagctcctcgcgcactgccgcgagtccctcctgcagccgccgctcgctgacctccaggacccccgccgggtaggtggccctgccgcggggctccccgcatactgagcacacggagccgcggctgtgcgcgccggtcctctcgcccgcgcccgccgccccggcccccgcacgctccaccagcttcagcagccgcggcacctcggaccgcgaagccgcttcggcccggagctggcsgagcaggcgagccagccggcccggggctcgggcgtcttccyggcccggcccattggattgcggccccgggtcccgccggcggcccgtgacgcgccgcagcacctcgctggctctgtacgcactacgcgcctgggcccacgggcggccggrcgtsgccatccgccctgctgcctccaccgccgccagcgcccgggatggccgggagccccaggctgcagcctagcgaccgctggggcccaggcgacgcaccgtggagggggcccgcgggacggctgtgggaacgaccaaagccctgrgggttccggtctggggcgcagggaaccccggcagggccgggtctcgggcagcccggttcccmggggaccctgcgggaacgacgacgttgtgggcaggtcctcacaaagggcatggcccagtttctgggcataggtgacatggagcatcgccagccaaagaccaggcaccacccgctagacacgagtcaggaactgagctcacattttacactggaagctactgtctccatcatagtcaagggaaagccaggagtggtcatggaccccacagcccttttcaatggctcagggcgacgtccttccatgtagtccaggccattatctcctcaccctgtcccctagtccacacagctggaggaatccatccaggtggcatctccagccccaagctgctggcccttccatgcgagctcttcagggtctcccttactctccaaggcggtctgcctagggcctctggaaatccctggccatctcaagctgggttttttgttttgttttgttttgtttttacaaacaggatcttgctgtgttgcccaggctggagtgcagtggtgcaatcatagctcactgcagcctccacctcctgggctcaagcgatcctcccacctcagtctcctgagtagatgggactacaactgtgcaccaccatgcccggctaattttttttaattttttttttttttgtagagatagggtctcactgtgtttcccaggttggtcttgaactcctggcctcaagtgatcctcctgtcttggcctcccaaagtgctgggattacaggcatgagccaccatgtccaagcctgtctgtgtctttaacctcctctaatccaacagtcttcttcatccttctgggtctttgcacagttcctctccccccccacccccgccattttcctggtggctctcacttttcccacttagatagggaaacgttccatgaccaccccatcccacactggggacctcgagcccctcctccacagcacccttcacagttgtatttaaatgactctgttttccatccacccactgtggggtctctgagcccagggctgggtcatttctcctgggccgagtgtggcactaagcatactgagtgctagcctgcacagaggccaggcccgggtgggccccaggacasagctgtcagtggctgtcttgccatggagtgagtggatgaatcagcagggctgggatcctctcccattttacagtaggaggctggggagaggagctggccagcccgtccacctctgcagcctggcatctgaggccctcatggcatccctgctggtctgccttcccctgcagcccttccaccctctgtggagccctcactactgcaccctactccttctcaccccagtgcctctgcataagcagtgctgcctgtggccgccacagggccctaggtatgggcagagagtagtatcccccacacagcatgctgttctccctgtacccccaggggctagttagcactctgggtgccctggactctggggcctccctcagcaaattgtggagggtggcctggcatgaatccaggcagatctgggaagggacatggcaagacagcccctggaagctgtgtccccgggtccaccgggatctggcccctgcaggtcagtgcatgtgtgcatgtgttgggggggggattgaggggaccgctaatactgtcctcaagcagctgctgaggagaagactgggtccctctagtcatgttcatccactcaatcactccctgcagcccgtctctctggaaggtgcaggaggaggtgagaattgggcactctgtcaacccctcagactcccccattcctgctgastcacccgtcctctgggacctccagcagctggctgtgctgatccctagagcctcattagccattctctccctccccccagtcattaaaacactgccaacaagagcgccctgggttcttttccccagccctactggagacgggctgtgtgacccaggggctctgccctctctgagccaagtcttcacctgtgaaatgaagagatctctgaggtccccaggacggatgacagggaggcctggacggtgaagaaggtgcaggagagagtccagatttgcagaaagagctgttagttttgtgatctctgcctggaggtttatggacaggttggaagagaagctgagccattgcaatgagtccagattagggcttgttcctgcaggggctacagatgtgggggctggcacttgtggcagagggttccaaagtcatgggcatagagaagacaggttggcaggagcaagggcagaatgggagcggrgtcctggggrycctgttgggccctgaggaggactgcagaggtgtcggtgaggggtggacaggcaggcgtgtcagcacaaccctgagcccctgagctcaagtgcagggatggccgtgaagcaggtgatggggaccctggcttgagcttcatcggtagcggggctggggtggacaccggggactggcggagaggagatggggtgggggctggtcaaagcagtgtgtccctcagggagcgtggcagagcggggcgcgcacacaggtctgctctccagttcctccgggaagttcctcaaattcagccagctccagctgcccctggcacagaggagctgactgaggctccagtgcagggcctgctccttcccctcctgttcccctcagtgtgccctgggccgggggccaggcatggtgggggtggggaggctggctgtgcctgtgggaagccaccggctcccggggctgtccctgggcccaggctgtagctctgtgcatgcagacgtgcaggctgggtgggcaactggccaccttgcccgtcagtaatgcattcacagtggggggtcagaggaaaccccagggctcctctgcttagcttggccaggggtcccgatggggcagtctctccgtgtgacttaattgtcatcccttttgtgctctatggctattaaataaaacttggcagccaccttggctggaggttttatgtcccagagcccaagggcggttgggagccaggggagcgctcagacggcagggccaggcgagctctgtgtgtgggaggggctgtgggggcctctgagagctgctgcagggacccggcagggcgggggtggaggcggagagtgtgactgtagcttcacagtcatcagagtggacgtggagatgcaggcagagtcctcgaagctggctcaggggtctgtgtggggagggggcacacccagcaggggcctgagggtaagcaagggaggcagcagggtcttggagctgcctcccaaaggtggtggggagccccaggaagagcaaggaacaggagcagccggcaggtgcggctgatccaccctgaggtcccggacacactggtggggacaggaaggctcatcttggagctgctcctggaggggccatgtgggtcacggcccctggccctctgctcagaccacagagcacaggacacttgtccagcctttgctgcgactgtgctgcttgctctgggagcagctgctgctgggcctttggaggaggaggaagggtggcctggctgggacccagcccctgtgcccagcctcttagaaggggaggtgatggtccttttaggccccaggagtgcaggctgcatagtggggcctctgtacacataagctggcaggtctggcttgggctttgctcaggacactgggtactgggttctgggttcagaggcctcatgaaaacacctagcctcagtttcctcatctgtcaggaccagcggctggctgggagggtgtgtgttagcatggcagcggccagcttagtctactctaggagaccttgcctcccagacccctgag

SEQ ID NO: 93559 - DNA, 13061 bp, Homo sapiens
ctaaaaaaaaacaaaactaatttctagagtattttggattttggaattgtgtataagaaattatggaacatataattcatcttgaagataggattttcaaatcagtacttatagatctacctcaatatttttcatttctgcagacatattccgttatacggatgcaacataattcatttaaccaatcttctattgatggacatttagaattttccaatgtctggtcttacatataatgttgcactgattatccctgtgtgtttattttaatgtacttgtacaaatagaaaacaacaatttaaatgtatgaacagggccaatttgaggaaaaatrtttctcatttgctggttgcaattgatttctcccattgtggaaagacatttatgtagaaaattctacattatgtagaaaattctaaatccaatggtggaaaataccttggtattgtggaaagatctcagtgctgagagtcagaacccatgttctagttcagtccacaccatttaacatgagcaattccagttttttgtgcatcattttctcagtccataaaatatagaattgtaatatatcaatcaatatgatttccactgaacaggtrctgttttaggtgcgtaaaaaaaaatcagtgaccccaaaaacacaataatccctactcacatggaacctacattttaatgaaaaagaacaacaataaacatgataactaagtaaaaatttagtatgtaggatagtaaaaagtgttaaggaaaaaaagaagaaacaaggcaggaaaaggtaataggataggtcaaggaggagaattaaaatttagacattagagtcagggacaacttcactcaaaatatctgcacagagcctggatgaagcagataaactatccacgcagatatgtggggatgaacagtccaggcagcagaactagcaagtgccaagatgctaaggcaagatcattccaggaatgttcaagaagttccaaaggccagtgtggctaacaatatggggtggggaagaagaaggaggtgagcttagacagacagcagggagcagatgaaagggctttataggtttcaggaaggaatttggcctgtagtctctgtgagatatgaggcccttggaggattgcagacacaaaagaaatgtgatctggttaatagtttcaaagggcctctctgttttaaaactatactgaaagggggcaagggcaaagtggggagactaggatggaagctattgagccgatccagacaaaagataatggtggaaagtgttgagcggtgagaaatggctaaattctggatataatctgaagataaatttaataggagtcattgatggatttgatacaggatgtgggagtaaaagaatttaacaatgactctggagtttgttgtctaagcaactggaagaatagagttgtatcaagtgagatgggaagcagactgcttggctttggatgtatggagtttgagatgtctaccagatattctagtaaaaatgtcctatccaagttgacacttggatagagatgagtctggagtttaagggggagtgatctaggttggagacataaatttggcagtcatcaatgtgtagatggaatttaaaaatttaaagctttgagactggatgggatcacacagggagtgcgtatagtcagaatgagaggtctggactgaatctggaggaatttcaacaattaggggtgaaagagagaaggaggagggagcaacattcagtaggaatggacagagagggaggaggaagtcaggagagcacggtgtcctggaagccaagtgaagacaatgtttccaggaggagagtggaaacgctgctgccaggtcaggttaggagagaaatttggcatcagagggtcactgtgaacctaagaacaattcagtggagtggtggggatgatagagtgactgtagcaggttcaaaagagatgggaggagagaaatggaggatggtgaatgttgcaactctcctaggtagtttttgtggacatgtgtaacagaaagaaaagcagtggaacctgatgggggcaggtggcaccaaggcaaatctttgttttttaaattggagaattaatgtcatgtttatatgctaatgaaagtgattcaatagagagggaaaatgtggatgctacaagagagggaaggctttttggagcacatcaactgagcagatggaaggggatgggatctagtgcagaactgggggtctggcctcgtctaagctcttctacagcaatgggagagactctagtaggcaggaaatgtggtgggaacttgtggaagttctgtttttatgcttcaaaaatgggaggttaggacattactgagagtaaagcagaactctggggaggaaaggaatgaggcagagggctgctgtttattattattaaataatatgatttaataactgtgctactacttgacaattaaaactatgtacatatattaatttgataaaacaaacatttttaaaaaataagagaggagaatgtctggactacttctctgggtgaattttgggaaacccttgagatgaatggagggacacacaaccagctgtggagtcacggttctggaatggaatgcccaaggtcagaatgaaccactggagtatgaaagattttctttggattttaaaacatgaagaatattaaaagtaacaaaacaatattaatgcatttcactaggacttctatcaggagagatcctgcctcttacaatttcaaatatatttcagtgattaagcaacgttaatcattgctatttctgcctttcaaagtctcaaacaaatagttattcagctctatgatgttgggagctctttgtatcctttgtaactggaagactgagactggaggatctccctctctgtctttcccacccctccctctctctttgttccacctctttctctgtcttttcccttcatcctgttgcaagacatgggcctccacaagtcacattctcagtcaggaactatttttttttgagatggagtcttgctttgttgcccaggctacagtgcagtggcatgatctgcagcctctgccttccagacgcaagcaatcctcccacctcagcctcccaagtagctgggactacaagtgtgtgcccaccacatccagctactttttgtattttttgtagagatggggtttcaccgcattacctagcctggtttcgacctcctgtgcttaagtaatctggccacctcagcctttcaaggtgcggggattacaggtgtgagccactgtgcccgactcagtgaggaacttctttattttcctgagaatctcgttttttcttccctctatctaaattgaacttatttttcaaaattcacatcaaattttgctttcacactgaagtttcttttgaccaatccagttctcagttatcttttcctctttttctttacttctctttatacttggagagataaaaaacccaggtctattgttggaaatagtgaaagggcgttaaggtgttatatgtttggaagaatttgtatgtgtaagtctctctatgaatttttaatagagcagcttagaagggaaaaggaagttttcaatagaaaacttggactaaatatcaggacatttgtatttttagaatacaatactaaaagttggatttttataaaagtaggactttaaaaggaagttttcaatagaaaacttggactaaatatcaggacatttgtattttagtcctgactctgccactagcagtttggctttgatcaagttatgtaacttctttgtccctcaatagcctcatctttaaaattaatgtcttggactacataatccaactctagacacaatggctaaaatgcaaacattcagctgcaatttaaagataggaagtgttcgttgggggcagattttgcctttgagggtgtgtgggattatgggttggcactggactttatgtgcctcagacaatgtccgttgtcagactactcaccatcctgtggagctgccgtcccatccccagacctcttaccctgccaccataggggcaccgcactagctcttgcttgtctgggtctttgttctgagctgcttaccctggcccacccctctttcatggttatttcaatctgcatcctctcagcttttacactgaattgctttctcttttttcttttcttttttttttttaagtttattgagacttttattattgtccaatgtatgagctatcttgataaatgtttcaagtacacttgaatatgttttctacttttaaaaaaaattatactttaagttctgggatacaagtgcagaacgtgcaggtttgttacataggtgtacacgtgccatggtggtttgctgcacccatcaacccatcatctacattagatatttctcctaatgctctccctccctttgcccctcacccctcgacaggccctggtgtgtgatgttcccctccctgtgtccatgtgttctcattgttcaactcccacttatgagtgagaacatgcggtggttggttttctgtttctgttagtttgatgagaatgatggtttccagcttcaaccgtgtccctgcaaaggacatgaactcatccttttttatggctgcatagtattccatggtgtatatgtggcacattttctttatccagtctattattgatgggcattggggttggttccaagtcttttctattgtgaatagtgctgcaataaacatactatccagaatctacaaagaatttaagcaaatacaagagaaaaacaaccccatcaaaaagtgggcaaaggatatgaacagacacttctcaaaagaagacagtagaggcgacctaaacatggagacagcgggctctggtactgggcagccggcctctctgctggaggctcccgggtccacggatgaccggcttttcctggttaaaggtggaattttccttggtactgttgctgcagcaggaacgctagctggatttattacaacattatcattggctaaaaagaaaagccctgaatggttcaataagggaagtatggtcacgactgcattaccggaaagcgggtcttcccttgccttgcgagctctgggctgcggctcactgtatgcatggtgtggggttggtgtgattagcttctcagtctggaaagctttaggggttcacagtgacatgtaagagatatcctcattttaattgaaggctacatcaccaactttctacccgagaagtcgtttttcttcgggacccacaatcaaaggctttcctccggcatgagaaaggagtaacattcccgcctggtgagtttttagtgctggagtgactcccagccggcccctaccccgctcaagctcctgctgactgtcccagtgtgggtcctggccargactggcaccaaggcagtgggatcctttataagtaggcctccagcgccatacaccagaaagcaggagcccacttctgggacactgggagagggtgcaggcagccaccagtacgcaaagcacagtgccctatccttcccggcagggtcacagttcagaagatgtaacctgattttcatctgtagttaatagaagcattttgccttgacattcatmctaaaaatagaaaacactagtaattccagggatctgggttagtctcttaagcatgtcaactattgatgagaatactctttgtaaaactaactccagaaatcacttgctagagaagcagcccttcattgccttagtctgagcacccacggaaagcacgtgttggaggcgctggcaagggccgcgcagccgcagtagagggccagggggcgggtggtgcgcacccgccatagagggctgaaggtgctgcccacggctttcttggcgtctcgacgttttggtcagcggcttttttccattctttccctccacttcttgagtgagcagccatgagttggactgtacctgttgtgtgggccagccagagagtgagctcggcaggagcgaattttctgtgcctggggatggccctgtgtccccgtcaggcagcgtgcatgccactcatgggcacctggctcttcacctccgtgagcaagatggcgactgtgaagagtgagcttattgagtgcttcacttccgaggagcyctttcatcacagaaaggtctccatcacaggaactggatcagtgggcatggcctgcgctaccagcatcttattaaaaggcttgagtgatgaacttgcctttgtggatcttgatgaaggcaaactgaaaggtgagacaatggatcttcaacatgrcagccctttcatgaaaatgtcaaatattgtttgtagcaaagattaccttgtcacagcaaacccccatctagtgattatcacagcaggtgcacgccgagaaaagggagaaatgcgctttaatttagtccggcaaaatgtggccatcttcaagttaatgatttccagtattgtccagcagagccccctctgcaaactaattattgtttccaatccagtagatatcttaacttacgtagcctggaagttgagtgcatttcccaaaaaccgtgttattggaagcggctgtaatctggatactgttcgttttcaattcttcattggacaaaagcttggtatccactctgaaagctgccgtggatggatcctcggagagcatggagactcaagtgttcctgtgtggagtggaatgaacatagctggtgtccttttgaaggatctgaactctgatataggaactgataaagatcctgagaaatggaaaaatgtccacaaagaagtgattgctagtgcctatgagattattgaaatgaaaagttctacttcgtgggccattggcctatctggagctgatttaacagaaagtattttgaagaatcttaggagaaaacatccagtttccaccataattaagggcctctacggaataaatgaagaagtcttcctcagtattccttctttggagagaagggtattaccaaccttataaagagaaagctgacccctgaagaggaggcccatctgaaaaagagtgcaaaaacactttgggaaattcagaaggagcttgagacttaaagttgtctaaaactaccattccgaaattattgaagagatcatagatacaggattatatatcaaaattttcaataaacttgaattcctgaaagatggaaacaggaaagtgggtagagtgactttcctttttatttagtcttccagctcttttatttagcatccaggtgctggatgatacttatttacaattcctaaagaaagtgtttttggtaatgctgatatagcagtacttaccttgttatatatatgtagttggcatttggttcctaaaaagtaggatgtaggtatttactgtgtttgagaaattctgattcttttcactagatatatgctatttattcttgctggcttatacctatgttcatttatatgctgtaaaaaagtggtaatttacaatgtaaaaataaaagtatgcatatacaaaaaaaagaagacatttatgcggccaacaaacatgaaaaaagctcattatcactggtcattacagaaatgcaaatcaaaaccacaatgagataccatctcatgccagttagaatggcaatcactaaaaagtcaggaaacaacagatgctggagagaatgtggagaaataggaacatatttacactactggtgggagtgtaaattagttcaaccactgtggaagacagtgcggtgattcctcaaggatctagaaccagaaatatcatttgacccagcaatcccattactgggtatatacccaatggattataaatcattgtactataaagacacatgctttctcttttttctaacttgctcttcagacttaatgctcagtattaccttcctcactatgagtttgtctcccctagaagatagtctatgtattccatttggctgtggatctgattctgcttggggcatgtatttctcttgaatacttgaataccatgggacccacccatgttttctgggactcaggcataaggcaatcacctcaattttctatgtccatgtaatgactcttgtgctggtgttatctaacatgttaactagattgtagttgtagttctctgcatgtaaggatcaatgcttttttttctgctgattccccaacaaccttatataatgttgagttcctataagatgcttagaaactagttgttaatttgtacattcccactttttggatctttaccaagcttatcttttgttggaggattttgtaaaaacaaaaaggggaagagtagacactgctgaaggaaagaacttaaaagtcaggaactgccttggtttccccttttattttcttcctcttgcttttgttatctcctctttctaatatagcaatatgagtgtatggctaccacatatatttgtttaaatttaacttaaaatatccattctagataatctgcctttagcccttttctatcagggtactatattttatcattaattaattccttataattaacttcatttatttcttattaatctcataatggacaaggagtaccagtgcctggttgaataaagaggggaatcactttgttgtcagaacagaaactcattcaaaccagctcaggtcagaaacaaaaagtggggaatgtattgaatgtctgatggtatctctaataactgtagagtaataattatagagatctgtcatttggtactggatccaggacccagaaaatttgaatccaaggttatttgctttgtttttttcagaagagttgatctcttggctctgctcctattggtacatcaactttatttttcctgggtcttactgtagattatcttactgtgctccggcccgcacatgttggtcccagcctctgcgtttccagatctcctaactcaaacactcatcagaaattaagtgcagtctagtttctgtgttccaattctaaattccaagaagagattctgattgtccagctttgctaagatacagaccccccatcctgtcagcaggggttagggtgtagaagagtcatgtcctacaaacatgggtacaaatatgggcatcagcacgggggaggtgcttacccctgaaagtccctaagtgttggcgtgaacagtttcgcaatatatactggctgattttactatggcaggctcacaaagtttatacagaatagacctttccaatctccttgatttctttgttttgaaatgtggctgatgtctgaatacagtatccaacaaaataattaaagtgctgtttggagatttagcttgaagggcaatcactttttaactkaatacgtttcttagatcttgatttaactgtctttttttggggtgaaaatttgtttgatcttgtcttatcattagaaaagatacagcatgggaattctatgcattcctgtaaagttcaaacacatttccttttgttgacaggtagtaatttgtatgaggcaggcaaaggaagaatggcttcaaacaaatgattcaagttcagaaatatgcaaataaatggattttctaattgttttttctttttttctttttttaaacttttaccttaagtctgttcattagttgtgattgctttgtaacaagaatctggagggcatctaaggacatcatcactgatctggggaaacaggacctgctttggggaattgatcttacaagatcaaggcagcactgtccaacataaatgtaatgtgagccacatatgaaacttgaaattttctggtagccacgttaaaaagttggtaaaataaatcaataaattaattttaataattttactgaaactgatatattcaaaatattatttcagcatgtgatcaatataaaaattattaatatttcacactctttttatattaagtctttgaaatctggtgtgtattgtacacttagagcacaactcaattcagatgttaatttttcagtgattaaagcgaaatgcagacctaccaaaacacgacatttgtgtttaatagaaaaatattttacactgcttcagtttttttattttaatgcgtttacataaaataaattcaatttgtcaatctgcagtaacttcattgcaaatgatcagtagcatttagtgatttcctattaaataatctcatagcggacagtggcttgtggccattgtattggatagcacagttttagagaatgggattcacgagatttgagaccagagtttatctttcaccagtgaagcttaacctaagagggaattttgttatgaattggcgtccactgtgtcgctgctcaagtgggcagggtcaccactttgcagccctgaaacttgtctgtctcttgctccggggcagactttcttgcagtcttgttctgctggcaatagtcttaatgccttaatgctttaatgacattacatgagcttggcacaagttgcaaacttggagattattgtgttaaaaactgaaaactactgtagctaaaggacttgctttatttcgattaaccctgtgttttctaagcttagttgaccacaagtctcttttaaaagaataacattaagttactgcaggagaccaaaaatatgtcaaaaatatgcatgaagactctgtaggagaccaaaatatgccaccccaaaatatttgtttggcatgaagcttattttgagcggattaatttgagagactgcagacacaggggaagctccgaaaacagagtagaagttgtcctttcataagggaaatttatatttgtaaaggaaatctctattagtaaggatgtcactctatctctaccaagaaaaggaagactgaattgctggagactcatcaatgaagaaggcactgacttaaatctgcataactacccttaccctttgatatggtttggctgtgaccccacccaaatctcatcttgaattgtagctcccgcaattcccatgtgtcatgggagggaccccatgggagacaattgcatcatgggggcagatctttcccatgcagttctcacggtagtgaataagtctcacgagatctgatagttttataaatgggagttcccctgcacaagttctcttgcccactgctatgtaagaagtccctttgttcttccttcatcttctgccgtgattgtgaggtctctccagccatgtggaactgtgagtcccttaaacctctttcctttataaattacctagtctcgggtatgtctttattagcagcataagaacagattaatacacccttgtttactttgcttttctgggcatctctccataactacccttttcccacaccgtcctttctttgtttcagcagatgacggtacttaagcctgaactcaaaaccatgcctttgagatttacttatttctttgggttatctcccaggtatatatgaggtatacatgttattaaacttctgtttatttttctaattaatctgtcttttgttacagggatccatcccaactaacaactatgaagggtagagataaaattacttttcctcccctacattacatactactgaggtgttctgaaacacacactatcagaaatactgcctggttggctagagagtgcttgattctgagacctgctcttttgaccatgcttgacttcaacatgtccttgaatgtaccattctgtacttatctgtagaggacatctgttatttttgcctgaacatatctgttccctgttttctggtatcagaatcctcctttccatggggaattcattctacatgggttggatgtgacatttgtcacctcttcctagctacagagttgggtccatggtgtggagattgttattatgcatactccctttttttacctgggcacatagctagactatattttcccaattcccttgcatttagcattggccatgtgactaaggttggaccaatggacagtgagcaaaattaatgtatacaaattctaggctgaggcctgaagacaacagaaatgcttcgttggtgctctattttctttcccagaagctggagcatgaatttgctttcctccaggttcaaccacacagacactaggggctgataggaaaacaaagtagaagaaatctagatttccgaatgactccatggagcagagcccttactattatggaatataacctcaggttataatatgtgagagaagtatgcctctattttcttgaagccattgaattactatttttaaaagtttctttgctatggaagcatagccttattctggaaaatatagtacatgcactgttataatcccacttctgctggccatgatgaatgttccaggaactggacctaacccagatcaaagtcattctttgtatgtttatgccaaagctagctgaattcttcctttttgtagttaacttgtggaatgtatattcacactatctttttctttttctttttttaaccactgggagatggctggcttgagaatgaagccacttctcttagagaaacagtttcaggaaatggtgagaaacaggacctccagatccagctgtgcttcaaatgggactcatcattggacttgataattgaatgaaatagttaccagttttgcttaacttaaccttaattggattaatgttacttgccataagtctggaaaaataccctacatgtttccttcttattctaacactgtcctttgccattaggccacttgctggtgccatgctctttcttggttgccggagcaaattaaggcagagtttgctcatcctgcactgaagattcaggagacccagttgctctttgggtaaaggaggaggtgaaataaacgtaggacatgctatcatgagagctctgcccatactagaggaagagccagaaactatctacctcattggcttagagaattaagcttcttttcagccttcttcatttctcttcctctctgtagatataggaggaatgctaagatagacaagggagcttcctggaccaaaggagaaatcactacttcctagatgaacaaggtcccatttagagtagaaatgactttattagtcgaggaagcacaattaccatgagtatatggaataaaagaccttacac

SEQ ID NO: 93560 - DNA, 12777 bp, Homo sapiens
atacatccaatctgacactttgattgaagtcttatgagatcctgtgtagaagacctagaccagccgtgcccagacttctcccatgaggactttgaggtaatagatgtatgttgttttaaggcactaaatttctggtatgtaatttgttatgtagcaataaaaaattaatacagtaatctaggaacaagttttttctttttctctgagtctaattctccccatctatattatggggataataacatctacttataggtaggtttaatcatcaaataaattttagctcttcctaaaatggtagttgttttattgtattattaatattactattcttttctgggtacatgagacccagagcaccaggctaagggtttcaggagttgaagtctgatcctgggccctagcccacaggaacccagggaatgccatgcatgaataaagaagaaatacagccagctgtcctgtctcgactttccttgaggctgatacagtggtgcactaaatctttttctatgatctactctgtgcccagcaatatgctaaatatgctaggcagagacaataccaagagaagtaagaggttctccctgcccttgaaagtgtccaggctaatagccataatttagactctaagactcacattgcagttctgtgttcagaactgggattccaaaatttgagggcaaccagtgccaagctctgcatattttagggtgcagtgggaagctttgaggctgcttacatccttgggtgtccaacaccttgggtaagtaaaggctcccttaacacagggagcaggtaaggctgaagccaagggaatgatgttgccccttggcatcactgtcatgaactatcttgaatctcccaacaaggcagggcactgtgcaattgacattccaagaccaggcaggcctattttaaatcctctttaagaggattcacaatccaccctcttgctgcactagcatgggtagagcaggaaaattctccatattatcattgaagctgtaaaggtttgggagatgggtcattcaaaattttcagaagttcttgaaagccaaatgttagtggatgaggaactaaattggcttctgtttcatctttgttaggtttctacagcaatgttatcttgaatggtttgtcaacatgtttcactgagaaaacttaaagcaactctggtaattacaagtggaaccttgttacaagtggaaccttgacaacttcagaagtgaccatcacaaccaaacattccctgctctgaatcacctgacattcactgtctcattcacaccagcttcttcaggtggcccttgatgatctgcctgcctccacagaggctcagaaaattagccttttctttttttctagatttcactcttcatgatggatgtgaaagacagtaaagtatgctagttaaaacccagcctctggagacagactgatgtggggtaaatccagctttgccacttaacagttctctgctcttgcacaattttacttaacctctctgaacctgaaatcaggctagttacagcatattagtgaagcattcatcacagaacctgaacatagggagtcctcattaatgacagttattatcatcgttattaatatattataatcacatggctattgctttgtacttatcacatagtcattaatgtccctagaatagtgcagatcggatgacaccagttataagaccctgagaagcttaactcagcaaaactaagttgtttaaatctatgttctagctcagaggttggcaaactttctctgaaaagggccagatagtaaatattttaggcttgcaggccatatggtctgtgttgcaactacttaattctgctattacaactcaaaagcagccatagacaatacaaaagaaaatgagtatgtttgtgctccaattaaatgttatttacaaaaagaattggctgtttggatttaacgtgtaggtcatagtctgccaacccctgctctagccccttgtccatgtacagcaaggtactcccaaacagaatgctaatgggaagggcacgtggcacagtagacacaatagagtttgagtctcgattttgtcatgtcctgactgtagcattcagggaatattacttaactctgtagaattctgagaatattacttaattcctccatgccccagtttcttcctctgtaaatcctaggcaatagtacttcctgggcagggtttctgaggatagatgaccccaagtatataaaagataattaagtaaaagagataacatatgtaaatgagataatgtaagtgtgtatatttcaggcttttttgcatgaatttactttgtatctatctgttcaaccggattatgagtttgttgaagacgaaacatctgttatctattgcctttatttctctcatccttgtctctagatcctagaaaagtcgtctgcacagagcagggcatggcctgcattccaaattttgttattctcaaaggtcagttgttctcagtggcagacaacagaagccaagacttgctaagtaaaacagaagacaaatttgctggaaggacatgtgaaaatgggcacaaattaggaagcaaggtcatacttgcatcactgctgttaggctgctaccactgactcctctgctcctgcactcccaaaagcaccatcaagaaaaaccccacacacagttccttcatctttgccttacttgctgaagattagaagtcccaggtaggagtctttcaatgactaaggccagatcacctgcccatatcctggctacaaggaagcaaggaaagaaaatgttagccagcccttttggcttttggaatgagagcattttaccaagtcacttaatggtgtagagctccccagtaggaaaggttttaggggctgggcagctagaagaatgacaaatggctactcctctgactatctgcttacctgggccacctgtttgtagaaaactttgaggtcacaacatagtccaccaccattatgactttcaaattggttgcttgttgcataggtagtgggattttaatctaagccctccagcctcgctccgttgattccctacagtagatacaccagtgccccttccatatggcctcactttggtgcatgccagcctgccttccaacagtcagcatctacaactttgttagagggctgccctcagactgctggaacccactttgcctccatgcagggcagatccaaagtgcctaggtaactcataacccatcagtggtatcctttaaccaaaacttaataagtacaatgtataaatactccagctcccttgccccttgactggaatcataatgaagcatgcgttttgcaccattttaaaacacttctctacaggatgaaacttcaggtggacactatggtagttgccttaatagtgtccctttatagactagcttcgttatattatttctttctctctcttctgcccttctctctcaacattccaaatagactatgtgcactcaatctttgtctcagctttgcttctgagaggagccctgctaacacatctctcttatatctggtattggcatgctattttgcagacatatcaggaatactgagacaactattactacaaaactgtataattcacaagaccacttgcagatacaaactaggtacatatgagatcaagaatgtattattttctttctctattagaattacagtgctctgtgtttatattaaatctgcccctgtgatgaaaacacagatgtcagaaagaaagaaaaacagaaagaaagacagaaatgaaggagggaaggcagggaggagggagggagggaggggaagagagaaaggagagaaaggaaggaaaaaaggaagggagggagaaagataggaagcaggargaaagaagaaagaaaatagacaatcattatttaggagaatcaaaagagcataaaggagataggccttgaaattccaggagatgataagaaaaattgctttgaggcaacaggagaggttgcctcctcagagtaaaaggagagctccctatactctggaaaaaggagatatgagaagcaaatgagaagggctgtaaatcactgggtaatcaaagcaaaagttattctgcagggccctgcagaaagctttcagaagaagaaaagtcagatcaactctctgtgcctgaaaaagcacaaaactctcaagtcttgaaatggaggggactcatcttggtatttctaatggcattcagtaattgcagtggctgctgtcctcctctgggaattgggaggaggggggtgttgctggatgttcttgtacaaggaggaagataacttgaacatgattttttctcttcagtgtatcctgaaaaattgaattgtgatgataaagatcaggcaattgtgctgaagcactgaactctttatgaaataatagcccaagtgctgaactctaatcttgtttctctctttgttggaaaggggaggggtggcacttgtgctatcacctaactatgcacaggcaggacgatggagtaatagttactgtatgccctgtgaccaaagttctctttgatgcagggagccwgctaggcaatcaatctaatatggagaagccgagatgtccatttgtttccagaggagagaaaatccttgggaccaaaggagggttaagagaagtggggaaggggaattggctggttgtggagataaaattcagcaaaacaacagacaaactccaactctcaccccaaaaaaaattaggaaggaaaaaaaacctagaatgaagtttgagtgagcaaccctaaaagctgttgataacctagtatcctgtagaaagtaaactacatgaatttggatagcagaaaaaatctagttaatataggaaattctggctaaaacatatatttttgtggacttagaactgaattgtgtcatagtcatcaactgcaaagaagattctagaccacacataagggctacagagagttctcacagtggttccaatagctaacacatgctgggctggttataagtggattttccccactgataatatcagttttctttcctgaatgtcataactgaggccttgttagccccttcttcttatggaacagagagcacatagcctgtcttgagtcttggaaatgccaataggtttctgtcataatgggtgtggtccaggaagcccaaatcacaccggctcatctatggtggcaggcagtaaatacatttttttaaaaagattacctattagcagcaatgttgtaagcatggttgattccctccctggactggtcacttctttgtctgaaatgcaaggcatgatttctcccaaggtttagctgaaagtagttcatataatgattctggacgatttatgcacaggcatgcaaatgcaatgaaaacaacatgaggtcattaataactgtagacactgtcaggtgacagatgtgaaatgaatgagctcctgagtatttctttactttatctttaaaaactgagttttgaggccaggcacggtggctcaagcctataattccagcactttgagaggctgaggcaggtggattgcttgaggccaggagtttgagaccagcccggccaacatagcaaagccccgtctctactaaaaatacaaaagttagccgagcgtggtggtgcatgcctgtaatcccagctattcaggaggctgaggcaagagaattgcttgaacctgggaggcggaggctgcagtgagctgagattgcgccactgcattccagcctgggcaacggagcaagattctgtctccaaaaaccaaataagaacaacaaaacaaaacaaaaacctgagttttgaatttttttatgagtaacgctaaatagaaatgtatcttcctttttgaacttaatagtgtagttataagaatgtcatactaatctaaatgtgtcaatactcaatgattactcaaaaatatgtgtttgtataactttggagatgttttttttacttcattaaatattttaaagtttaaagagatgtcaaatgttcaaaatgttgatgtcgagagcccgcggcactggcagcttggcctgcgctgcgctgcgatgttagaggagtcagccaggagcccggggaagggaagcacgcccctggggctggtcccagagggcctgatctgcatytgcagcatgaggttctgcccgtttgctgagaggacgcatctggttctgaaggccgagggaatcagkcatgaagtaatctatatcaacctgaaagataagcctgagtggttctttragaaaaatccctttagtttggtgccagttctggaaaacagtcagggtcagctgatctacgagtctgccatcacctgtgagtacctggatgaagcatactcagggaagaagctgttgccrgatgacccctatgacaaagcttgccagaagatggtctttgagttgttttctaaggtgccatctttggtaggaagcttccttagaacccaaaataaggaagatggtgctggcctgaaagaagcattgtgtaaagaatttagcaagctagaggaggttctgattaataagaagacaaccttctttggtggcagttccatctctatgattgactacgtcatctggccctcgtttgaacggctggaagcaatgaagttaaatgagtgtgtagamcacactccagaacttaaactgtggatggcagccatgrgggaagatcccacagtctcagccctgctcactggtgtgaaggactggcaaggtttcacagagctctacttacagcctggaggcctgtgactatgggctctgaagggggctggagtcagcaataaagctatgtctgatgttttccttcacttataaaaaaaaaaagttggtatcaaaactctaataaaaccttagagaagagatcaaatagtacacaaaccacaaaggactagtaacaaggaagacaggcaaccctgaagaaaaaaatgatgcaaaagagatgaagagtgaacataaatctctctgaaattttcctgtattaaccagatagcctttgctgcccacattaatatactaatgtactctgctttctgcagattgatgggacattaacagctttttaatattacttatccaaatttgattttaggtcttttttcctttctaaatcccttttaggtgagagctagagtctacctataaataaataaatagaatgaatttgaataatcaacaaaaagtaattaacatagatgtaattaatgttagaaaatggcccaaactgggaagacttcaatgaacttggtttcttttcttacagtaccttgtagttcagtttaatgtaactacctctttcatattcagaatagaacaatgcttcattgctttagccttttcatgataattaacaaattatggaaaaaactcacattttcgattgtatatttttaaatttttctatgttatgatgttttgacatcttaaaaaaacctatctagctggggagagacagcccctttcagggttagccaattcttagagacagcaaaagactcagccaggagcatgcatgcctttgatatacaaactaaccaatccagagtcttgcctcaactatctgacttatacacccaagagacaatattcctctgccttaatcatcccagtgccaggtaccaggcaactagtaatataggagttagaaaaagctatttagccagatagtgagggcataggagctctcggtaaggcttttcttttaataaaaagcagcccccaaaccatttgttttctaacaaagagcggcctgtaaaattgagttgcagacaagccagtgggtgaatgtattctagttagttgcttggttgtcacccattgacttgcgaataacagagacttactacgacatccatttcactttattcttaccttatttttctcttaaaaacatttgttccttagtttttcatggcaattttccatacaaaagctttgtatggaaagcttttataattggtttttcagggaatccaaccttattttatctttgaaaatatcctgaagtgccaaataaaccaacaatctgaagcgggggaagactctagccccagcaatacctgcgactactaatgaaaaagacttgacggactgaaactgcccgagatttctcacataatgtcatcattacgtggatgtgcttcagtgctctgaaataatggcactttaatctcaagtccacctgccaccatctgaaaaggggggaaaaaagccaaagatataaaatactgaagaaaggtgagggtactgcttcattacccatacaatacagttttatttcagtgctacaatataattctttttccttctagtactaagagttatttagtgttatgcattcaaaattttacttcatgatttaccatgaaagaatctcattttactgaaaaattttagtttttggtcgggctcagtgactcacacctgtaatcccagcattttgggaggccgaggcaggcggattacctgaggtcaggaattcaagaccagcctgaccaacatcgtgaaaccccgtctctactgaaaatacaaaaattagccaggcatggtggcatgtgcttgtaattccaactactcaggaggttgaggcaggagaatcctctgaactcaggaggcgggggttgcagtgagccaggattgtgccactgcactccaacctgggtgacagagtgagagtctgtctcaaaaaaaaaaaaaaaaaaaaagtttttgtgaaactgttttctctgtaaataatcggtttccttactcattctgaaatgcatttattgtctataatagcaacccagtgatgtcctggtgttctgcagaggaaaatgcatatagagcagcagccaggacagatcagttaaaagctaaatagcaaacatcctgagaattgtaacgggtcagaaatgggataattagatattatcccatttctgtgtttacttgatgcctttgtaacagtctgcacaattgacatattccttctaaaacaaaaaacaaaaaaatttcttccttttagtctggaacacaataactcacttatcccatcctattgcacttaatgggtctctctctttctttttaatttgctttcatcttctaaatgtcttctggctatatctatgttctttgccagcatttaaatcctggctctgctgtatacaaactatgcaaactagctcctatgcttaacctcagtgagcttcagttgccctatctataaaatggggctaatagtagcattcacttaattatgttgtaatgattaaactaatgacacaagtaaagtacaatcctaggcagtgctgggcctatcataggctcctcatattttcttctctctatctgttatcaccctcaaagacctcatctccctcataggtttagcagtcactgcatttgaatgattcccaagttgacatatgcaatcttgatatgcctacctgggctccactcttgcatcttcaactcatggtgggcatttctctctgatagctcagcttctcctaaacatcagtgtgtctgaaatcaatcttatcatcttattctccccgaaaagactaaaaaatggttgaaagttcttcaaaaacataaacatagagttactatatgacccagcaattccaatcacaggtatataccctgtggatatattaatacatatacgtacaaatgaaaacatatgtccacactaaaacttatacctgaatatttatagctgcattattcataatagcccaaaaatggaaacaacccaaatgttaatcaattgatgaattaataaataaataaaaataaaatgtatatctatacaatgggatgatagccaaataaaggaatagaataccgaaacatgctacaacatggatgaaacctgaaaacatgctaagtgaaagaagctagacacaaagtccaagtattgtataattcaatttatatgaaataaccagaataggcaaatccatagagacagaaaatagattagagggtaccagggaaaagggagatggaggaatcaggacatgacagttaatgggtacagggttttattggggggtgctggaaacattctggagttagtgctgatagctgcacaacactgcgaatatactaaaaaccaccaaaatgtacactttaaaaaggttaaaacagtaaattttatgttatatggatttaatctcaatttttaaaaaagaagaaaaaagcaacctctgtagacagcggagtgacacttgtccatggaagcgggaggaaatggagccagagctgcagaaagggatctctgatctccaggaaaccaagatattcactaatagcatcagagcaaggccccaggggatatcgctgtgctcacttccaagaagcaatcagaatctgactcccaagactcaaccaaataggtcattatgcagctttgctgaaatatctgcaaatttagacctaaaaactagaaaaggatagagattggagggtgaaaatagccaaacgaaggacttgaagtggaaaagaagttcctcaggggggcaaatttattatattctctattgtcagattgaactggaagggcaataaatcatatgcccattcggagcctcgctcattgccagcacagcagtctgagatcgaactgcaaggcggcagtgaggctgggggagggacgcctgccattgctgaggcttgagtaggtaaacaaagaggccgggaagctcaaactgggtggagcctactgcagctcaaggaggcctgcctgcctctgtagacttcacctctgggagcagggcatagctgaacaaaagtcagcagaaacctctgtagacttaaacgtccctgtctgacagatttgaagagagtagtggttctcccagcacggagtttgacatctgagaacggtcagactgcctcctcaagtgggtccctgacacccgagtagcctaactgggaggcaccccctagtaggggcagactgacacctcacacggccgggtacccctctgagacaaagcttccagaggaacgatcaggcagcaacatttgctattcagcaatattcgctgttctgcagcctccgctgctgatacccaggcaaacagggtctggagtggacctccagcaaactccaacagacctgcagctgagggtcctgtctgttagaaggaaaactaacaaacagaaagaacatccacaccaaaaccccatctgtacgtcacaatcatcaaagaccaaaggtagataaaaccacaaagatggggaaaaaacagagcagaaaagctgaaaattctaaaaatcagagcacctctcctgctccaaaggaatgcagctcctcaccagcaacggaacaaagctggacggagaatgactttgacgagttgagagaagaaggcttcagacgatcaaacttctccgagctaaaggaggaagttcgaacccattgcaaagaagccaaaaaccttgaaaaaagattggacaaatggctaactagaataaccagtgtagagaagcccttaaatgacctggtggagctcaaaatcatggcacgagaactacatgaggaatgcacaagcttcagtagctgattcgatcaactggaagaaagagtatcagtgactgaagatcaaatgaatgaaatgaagcaagaagagaagtttagagaaaaaagagtaaaaagaaacgaacaaagcctccaagaaatgtgggactatgtgaaaagaccaaatctacatctgattggtgtacctgaaagtgacagggagaatggaaccaagttattttcaatatattttctgtttgtcattctttctccttgatatttcttctttaatcaacttttgaccaacaaggcaagtagactttataacattttacaagtaaagcaaaatcagcccttacaaggactcagtctaaagtcgggttctttgaaggtagcctgtcagatgacctgattaaaggtgatgagaatatttcagggggttttcaagacattctgtatctgcctctattgaaatttcattaaccttttgttttggaaaagtttccatgaaaaggacctaagagaaaagcattcccaaatcacccccctcagactgtagaacagatcttaatagccactaactgaagtagtccatgtgttcccacagatggctgtgaaaaatgaatcgtgcttatcaattcaagaaaatggaaagaaaagaacaaggagtatagaacttcaggatttagccatgaccaaagtaaaaaatcttgagttagtttgctcttcccaagttattttctccccaatctcaatttctataatgaagtgtttccaaaagggcagacactgccttctgatcctctgttgtacttcacatgatttgaaaatgatggagaaaagctaatgcatcctacctggttgtattaatttgctagagctgccttaacaaagtaccacaaatgatgtggcttaaacaacagaaatttattgtctcactgttctgaagctagaagtctgaaatcaaggtgtcagcagggttggttccttctgagggatgtgaaggaaggatctgttccaggtctctctccctggcttgtagatggctttcttccttgtctctcttcacatcatcttccctctatttgtttttatgtcatggtgtccaaatttgttcaaatgtctgttatctgtattcaaatttcccctttttataaggacactagtcatattggattagagtccaccccaatctcattttaacttgattacttatatggccttatatggaaataaa

SEQ ID NO: 93561 - DNA, 26922 bp, Homo sapiens
gtttagatctgtatttcctgataaagtagcaaatagatgagataatgcataagcagggatgcctatggttggtctgagataattgatgtcacctagtaatttttgaaaatcatttaaggtgtttaaattgtcagtacaaagttggacttttgggggcttaatggagtgagcttctagctgcattcctaagtacagaaaaggagtggcttgttgaattttatcaggagcaatgtggagtcctgcattggcaacagctaattttaaagaggtaaaacaytgaattaattcatctttagtgggggcagcaattagtatatcaaccatataatgaagaatgtaattatttttaaaagtctgtcagataggttgtaacacagtaccgacaaacaactgacaaatagtaggactctttatcattccttgaggtaaaactttccattgatatctagctgcaggagctgaattgttgatggaaggtatagtgaaagcaaatttttcacagtctgacttgtcaaaaggaatatgaaaaaagcagtctttaaggtcaatgataattaaaggccattccttagcaatcatggagggggagggcataccagattgtaatgcccccataggtttaataactgcattaacagctcttaaatctgttaccatcctccattttcctgacttttttttgtacaacaaacacaggcgagttccatggagacaaggacggctcaatagtgtttgcttgtagtaaatcattaacaatttaaattaaagcctccaatttgtgtttggaaagtggccactgctctacccaaacaggtgactcacacatctattgtgaaggggcaggggaaaagaaggagagtgagggcaccaggacgtggactgggggaaaacaggattctaagcctctgaaagaaggggtcccggagtgttgaaagaaacagtaggcttagaataggggagaggtccaaaaggatgatgggaatgagaaacatgccattcagatgaatgccacacatcctcctctggcagagggggcaacggcttagtagaagaagagttaacatatacaggttccaagataggaggcagagggtggggatcatcatcaggttccttctcttgggaagaaaccaaggagagatcaaattctccctcatcatcagaaggaggactagtaggggggtcagctacccaaggtaaagggagcagttcatcatccacgttaacttgtggcagttgaagaggatcaccagatggaaaaggaagtaaagcaacatgaataagagcccagtcagtccaaacagaaataggaagtaaaacaccatctctcatgagctggtggagagtggcaccaactctatcccagtctaacaggtccatagaatctttgtcagggaaccaaggacaatatttttcaatagtctgaaataaaagaataaggttagtggaatcagccttgattccaccctgtttaagaagaagtttaataaaagacagataagcctggtgtttagactgtgattgtcgcataatagccctggaataatactcatcgacaaacctgaaaagaggggagagttggaaaagcatacccagggaccttactgtcaagactgaagaccagtcgtcatgaacctgcattcggagtgcactgagccgaggaacaaagaaggccaccttgggcgccagatattgagggatctagctagcagcctgcaatgcaatgggactctctctttgttcccagacagatcggcaggttgaaaaattaaatagacacacacaagatagtgaaagctgagtccaggggggtcaccaccttctggtcctgcagtgccaccaatgcactgaatataccagcatttcttattaagtttagtgagggcgggggtaggttagtgaggaatttagggtcatttgattatgaggtgagatggtcacatggggatgaagtaattctttaacataatatctgtatgcagaagtacagtatacagagataagaatttacaatatagcgtgtgcatcagtaatttctaacagagctttaaaacagaaacacagggaggctgaggcgggtggatcgcaaggtcaggagatcaagaccatcctggctaacatggtgaaaccccgtctctactaaaaatttaaaaaattagccgggtgtggtggcgggcgcctgtagtcccagctactcgggaggctgaggcaggagaatggcgtgaacccgggaggcagagcttgcactgagccgagatcgcaccactgcattccagcctgggcgacacagtgagactccctctcaaacaacaataacaacaacaacaacaacaacaaaaaccagaaacacagtctttccataacctatgattagcaagatattaatcagcagtaacagttgaagcaaaagctggttacaaacaatccatagaaacaggatgtgaagctagacaactggttagaccagaaatcttcagaagggagtatgccttaaccctaaagaggcctagaagagctgtgcaagatgagggcattacagccctatcttatccatayggacaggtgcccctcatgcatccgtttataggctctccacaacggtcgcattcctttcccagagctatgaatatctgcttttctgggataggaatcttggtgacgtgaaacctccctgaatgcatgtcccttcataggctctctgcaggggaagcacatcacgtgctgttggctcattctggcagtccaacctggcattgtctttacacaatcctgcatgcaattttgtatttacaataatcaggagcatttcatcttttgttccatagcaatagtttcagggggtctgcctacaggtgtgtgcttgtaatcccagctactcaggaggctgagacaggagaattgcttgaacctgggaggtggaggttgcagtgagccaagatcatgccactgcactccaacctgggcaacagagcgagactgtgtcaaaaataataataataataaattaataataaataaaataagctagagtattggactttagagatggcataagtgaaaaacaagtaaatgttagaagaaagagtgtaaggaggataattttctgggcaaactgaatcatgaaactaatcatatttgtttctctttatgttagaaagtttagtgtcaaaagtggactctcacctgctgcaagtacaattgattctcattgtggtagttattttcaataaaataccagacactgacttagtcaatactgaaacattgttccaagtagaaatacagttaggttcctgtcagcctctggttatggtattttcatcagcaggtcaatagtaaccttgttttatatgtgttttgttgaaagacacattaatatatattgttgattcaagagcattgtaactcatgtccaaacgaaacttacctaacacgtgtatttcctccattattcacatcacagcatttttgcacttagaaacaccagtacaaccaataagtgctatgcttttggtccatttttaaacagcaaaatcaacacaaagcacaaaaacttgaaaaacttagcactaaacagaccatgaaaagggcacttgtttacaatatgagaacaaacaagaagacagagcattccctgttcaaccttagctggaaacatgtgagttaggaaacccagttctttttgctgctctatgcatgactgcaaatgactgtaaaagtgccacgagtattgaattgggaattacaaataaattttagcaagcaggtaaattttcaaatatgaaattcatgattaaggatgatcaattgtatacataggattatgttccatgctccatactttgcatattaacctcacttttgactccatattactttgtccctctatttctcctttgccaaattttaatttaaacttaattatttttcttgatatattttacgtattttctttcttctttctttctttctttctttctttctttctttctttctttctttctttctttctctttctttccttccttcctttatttcatttatttatttatttatttttttgacggagttttgcacttgttgcccaggctggagtgcaatggcatgatcttggctcaccacaacctcgcaacctccgcctcccaggttcaagcgattctcctacctcagcctccctagtagctgggattacaggcatgtgccaccacacctggctaattttgtatttttagtagagacagggtttctccatgttggtcaggctggtctcgaactcctgacctcaggtgatccacccgcctcggccttccaaagtgctgggattacaggcatgagacaccacgcccagcctaagtattttcataaatggctttagatccttcagggaacaaaccaggtaataaaggagcaaattatcaacaaatattctaattcgtactcttttcatttgctacttcagtattcaggcataaaaagatctctagacatcaaacctaattaagaggttcacattccactgccctttgaaataattttgtttcgttttctatcaggatatattgaattcgaataaataaatgtatttcaaataagtatctattacaaagttaaaattgtatttagagatgacacaaatgagtgaaaagttaagcagatgaaaaagtgaagagatgatggctgtacttctttctttgccatcctgaagtctggaaactagatcttttcaaagtttctaatattggtccagactgggattcaaaagcctcttaatgttcgggtgctgccctggcccctgcaatctcttctgactcctgcagagagcacagacacctcaagtgtaccactcagtgaactagagcccacagggcttgatcatatgctttccagaggttcaggctcacataaacctcatgatagaattttacaggagattttaggtagattacaattgaatattcagggtatcttgtaatcacaggggtatgccacatagagaaattgagtagaattttctttacctggaaaatacgttgtaaaggaataatcccagctctccaccacaaccccagaggcaccatgttctcctgtctagctgagttctctttgccatcctagtgcctgtctgccagatgtaagttgataagctctgctacattgaatgtaggaaatattttttttctttaattcagtccatccctgattggaatgccagaaaaagttttcttgggaacaaagcaggcgaggtgaagcccccaaatctaaaaaaaatctaattgcatgagaacagatgactttgcatacattacatttaggcccttcttttttctttaattttatcaggctaaaatgagtgtcagcctttgaccacttctgattcttcatcttcaatctaggtatttctctccagtttttcctcataacgacccgacccactcaagtctttctctagtctttgccccacattgtgaaaaagatgttttccaacttagctcgaggttcttaccctgagcttcatattttccattcatcaactatttagaatgtccctactgtgtgccaggtcctttggcaggtgctgtggatacagtggagcacaaagaaggcatcggtcctaccttcatacagcttataggttactcaggatggatttagatcaaataaaacacaaataaatacaaaattacaactgttatacatgctctgaagacagagtttagagtacaatcaatgtatataatagacttaaccaaggatagatactcacatctgtttgggattaggtcattaacacttcccatgtattctccggtttacccatcccagtgcctccccatcttcccttttccctcttcagggggagcaatggcagtcagaattatacccaatgaaaatagaattacaagaaaactcctaaatagatccaaatattaacaggcaaaaattraatgcctaccttcaagtttctaattaggtgtggagttgcaagagctctggaaaagatgttggtgctaaactgttctaccaaattactgatactggagaaaaygttgaagagttgctttcctgaatcwctcaaggtaccataaaattaataattttattttatttctttattgtgttaatctgtaaaataatgtcaaacttgtggctattttcctttttttctgataataagactctctaggagcacttgttaaacatacagcttcccagctccctcctgctrgagacagattgaatagactgtggataaggcccagggaattayacttttctttttttttttttctttcttttttttttttttttaactttaagttctgggatgcatgtgctgaatgtgcagatttgttacataagtatacatgtgccatggtggtttgctgcacctatcaacccatcatctaggttttaagccctacatgcattaggtatttgtcctaatgctctccctcccctttcctctcaccccctggaaactacacttttcatagtcacctggatgactcctaaggaaatttaggtaatttctagattatttctaaataaatttgagttctaaagtattttaaatagcagaagggtatggactaggtggcactgcagttaagaacataatctagttaaaataatagaactgaggtttagatcttgttataaatgcagtgaaattgcctttaagagctgaatttcttgagcaaggagactgccctatgcctggttttcaaatgtgagtggcatgcaaatcacccatgagatacataacaaataagaatttgtgaacacagagacttgcatttttaccaaagaccctatttaatccttatgtacattaaaatttgaacaaaagtgatctagaaggagtcctctaatgcactatactgtgtgaattaaatctggccatcttgccttattgatcatgcttaaactgtatgtggtaacgaaaatatgaataagaatttggaatcatttggctaaaaaataaaatgtaccaaattgacaatccaacccaaattttcccaagatcaatgctgacactgaagtgaattaatggaatgaaatggtaggctactttgctttaataatatgtccaaataattatttttccagagataatgaaaaaaatttcagtgacctttacaggataataaaaggtgttagagaattaaaatattaaagaaaatacagtttcrtttatttaaacttcctccattttttggagtttttggctatggattttgtaacctcagcttagtttttaagtgattaaatatccttccaaagttccttcataagttctcatctcattcccccagcacattgatatccttctagccacaccccctcaactcaacattcaccctttgaataaatagctattggaagagtttgtatttaaccagtgtcaaatatttcagttggttccaaatcctatacaaataagttatgttttttctttctgaatctgaatattgaaagggtttttgccttttaagatgctgagcattccaatcatatttaggttacattcttgagtaagaatgtatagtttcctcatgtgaaacttattaataaacattactctgtatatgcaagatgagcagccacataatttaatgattaacagaacaaacatgacccttccaggttactttagatcttgaattttcactaagggtgatccatgttacacaataatataagccraacccaatttggaaagactccttctatgaggatatgtgaatgaggtccagattgggtaatatagaagaaagttgtacaattctaggcattgaagaaaatgagtgatttagattacaatagtgataaagtcaggtgcagtagcaagcttgtagtcccatctactcggaaagcagaggcagtaggttcatttgagcccaggagttcaaggccagcaaggtcccctttctttaaaaaagttgtttttaattaaacaaaaaagtgataagggaggtaaatgtaggttccaatgtccttataaacaaaacaaagcaaaacaaagtccattgaaatctaacacatgctagctacaaagtgcacacaatttaattatgaaatttaattaatgaattttcataaagcaaatgcctacataacatccactactacagagaaagaaaattacttttgacgtcactccttcccacctgcaatgcccctttccaaccgctacctctccctgttccctaaaagtgaccactatcctgacttccaaagccataatttagttgtgcctgttttgaatgtaacataaattggatcacacagtaagtatctttttcgtatctaacttcttttgctcaacattatgtttgtgaaattaatttcattgctgttttgtaatctacagtaccaatgtgcgacaatgtacttattcatttcactgttgatgaacatgaatggtggtaaaaaggattcctatagttcagcagtctttgttaccaccaactttgtccagcttctacaagcatacatgtgacatatgcaagctattttgtaggacagtcatctttcttagtagataaaaatatgtggctgcatatggtggctcatgcctgtaatttcaatactttggaaggccaaggtgggaggatcacttgaacccaggagttcragacctgcctgggcaacataatgagaccscatctctacaaaaaaaatttttttaattatccaggtgtggtggtgcttgccttagttccagctactcaggaggctggggtgggagaattgtttgaacccaggaggcggaggttgcagtgagcagagatagcgccactgaactccagcctgggtgacagagcgagactgaggagttcaaggctgcagtgatctgtgattgccccataacactccagcctggatgacagagtgagatactgtcgcaaaataataataataataaaagaagggcaaactttaaagaaagaaaataaaaaatgtgaaaggccacagaaaraattataatattattccagtttggttgagtcaccaagcattcaatcatctatgtcaggctccgtggacataataatgaatgagacatcattatagccctcagggaatgcttatagagccttgctccatcaaatctaaagtacagtttttgtttgtttgtttgttttaatttgagttggtgtcaccctctaatgaygtctaattgtaatttagggttgaagaagtagtcgcatttcacaggttattttcaagtagtatactgggcttgaaaagaagctgagcatcaraattatttgcagaaatttttaaatatgcatgaaccctaagagcatatgttatcctgattcattcagcaagtatttactgctgacctatgtgccaagtacccacctagtaagcctatgaatttggtacctctcactgctatcctataaaaaastaggtttggaaagagtttttataggatttcatagactttttacaagttttcaagtgcactgataaaataatagaaaaattaatatacgtgtctattatgtgtctgaatgtatgtatatatatatttataatttcccctcttgtggacatgattacacagtagaacaagaggtaaagacgataatatgtgagtgaaacagctaatagtatgattggcttgtctctgggttatctgactcaggtttacggagcggtgatgaacataaatcgtgggaacccctttcaaaaggaagtggtgttggattcatggccggatttcaaagctgttatcacccgacgacaaagagaggtacagttttgaaaggtaaaaagtttaaaaataataagaattggaaagaaaaagtaggtaatggtattttataatcatagtagccatttacattagcttacaacactgtttcaccattcatttcttttctttctttctttcccttctttccttccctccctccctccctcccctccctctctccctccctctctctctctctctcattctgtcacccagactagagtgcagtggcatgatctcagctcattgtaatctccacttcccaggttgaaccgattctcctgcctccgcctcctgagtagttgggattataggcacccaccaccatgcctggctaatttttgtatttttagtagacactttagtagagatgggatttcaccatgttggccaggctgatctcgaactcctgacctcaggtgatccgtctacctcgggctcccaaagtgctgggattacaggcatgagtcactatgcccagcctcagcattagtttctaatttgactggcttcagagtgtcaggaacttgaaaaacctctagtccaaacatgttcaataaagtggttccttagtgtttcatgatctctagaaggatsaagcacaaatggctgacttacagatactagctttttccctgggtgaatgattccttatgactgatgactttggtcatgtgggtatttggaagaagagtgaagacaacatctgccccgagaccaaggaaaagctcatgtggccaaagaggtaccgtcctgaccacattaggaagattctgagagttgtaattcttggaggtgaatccactgagttatataccctctttatttttataaataaacaaaatcctagaaaaatgtgaaatagatgtcttaaaaccttcctagccagatgtggtggcttgtgcctgtagtcccacctacttgagaggctgaggcagggggtttgcttgagccccrgagtccgagactacagtcagctatgatttcaccactgcactccagcctgggcaacaaagcaagaccctgttgctaaaaaataaaaaataatttttaaaatttttaaacaaaacaaaacctttcctaatcccagaagaaagaatcaagaaaaaatcagctgagcrcggtggctcatgcctgtaatgccaacactttgggaggcctaggcgggcrgatcatgaggtcaggagatcaagaccatcctggccaacacggtgaaaccccatctctactaaaaatacaaaaaatagctgggtgtggtggcgtgcacctgtaatctcagctacttaggaggctgaagcaggagaatcacttgaactggctcactgcaatctccgcctccccagttcaagtgattctcctgcactccagccttgcaacagagtgagactctgtctaaaaaaaaaaaaaaagaaaagaaagaaagacaaagaaaaactctttcctaatcccagaagaaagaatcaagcaaaagctacacaacttcattttcccctcactacagcatattagccccattcccatttagccattgctttataggggtctaattttgttagccacctataaaaattagctagacatgtccagctaacggtatctaatctacctaagatttggattatccagataatacgtttatgtttttgtgattatgtcttctgtcctaggctgagacagataaccttgatcattatactaatgcctatgctgtgttctacaaggatgtcagggcttatcgacagctattggaagaatgtgatgtttttaactgggaccaagtttttcaaatamaaggtgaggtcaagtgcaagacttatattacacagtcttttttttcctccttagcatrtatccagrtagttatagatatttcatatatatgaaaatatatagattatctatacacacmtgtatgtataaatacatacacayacattttatgcatttaccatttctatattctagtgttgtaagaacactcatttgtcacttctaatgaggcatgcatggccttcagggtaaaaagagaccatttaaatggagctgttcttaggtgacatgttttttctactattactgtaatatggatggatatcagtgagaatcagagaatatttttccttattggttttaatccttttctatcacatttttaaaataactataatttaggtcttagccaataggtaggccttttattttttctgaagcagatgattctggaaagaaataatcgattgatctgcataaaatgtcctcaaatgactgttttttttctgagtcaaggtcttgctctgcaacctaggctggatgcagtggtgtgatcatacctcactgcagccttgaactcctgggctcaaggatcctctctcctcagcttcctgagtagctaggactacaggtggcaccattcagggcccttttttgttgttgttgttgttgttgagacaggatctcaccatattgactaagctgctaaagtgattttatacagaaagagtttatatgagctgtgaggagataacggcatggccatcagggcttggggcagaactttatgccaggagagaagaagattaagggtttctgatagtttagatgaatagtttccgcgtcagtgtacacttactcttccagcttttcataatgattaggtgttggcacaggcaataatgttgttgtttatgattgttccagtgaaatgagttccttgatcatttaacaggaaagtagggaacctcatattggaaatctaaagtctagtattttttttcaactacagaaagctgaggtcctccaataaggaaaagcttctatccacctggaaaatttacaagtaatgattaacacatggtcataacccaaagacttcagatgtcatataaaatttattcgtagtcaggtgcggtggctcacacctgtaatcccagcactttaggaggccgaggtgggtagatcgtgaggtcaggagattgagaccattctggctaacacggtgaaaccccgtctctactaaaaatacaaaaaaattagccgggcatggtggcgggcgcctgtagtcccagctactcaggaggctgaggcaggagaatrgcgtgaacccaggaggtggagcttgcagtgagccgagatcgcgccactgcactccagcctgggcgacagagcgagactccatctcaaaaaaaaaagaaaaaaattattcgtaaatgcgcaaaaagaccttatgcargaagctctaaactatctctcaccttyacagatttgccccagtcacgctggttagaaatgagacatgattctatcacttccacagccaatttagaaaaaaatgttctgaccggtattactttaacatggaaatgaataaatttcctcattggtgtgaaaaatcatggtaataattggatggatcttggtgctagaggcctattatcactaaatcacctcaatccatcattatatagaaaaaagttatataayttccaatatctttttcagaaggctgagctgatagttdtaagttatagtcatctaaattgacccaatcattctttctgaaggtttggtggggacaaatgtgaattagtatcacctaatatagctggagtagtaacggtccctcatttagcacataagtcagcctggacatwaccttcggcttctcctgtggtattttgactacagacttctgtggtaatagctgtaatgttcttggaatactgaataccttctaagaagtcattggtatgtttactattcttaattggagtatccaaaaaggtcataaatcctctctgtttccataacacaattcaaaaagcctacctactggccatatacatgatcaacatttgccacagtgcaggctccagtcacagatactagtttggctactgggtagatcaagcattaggtggtggagctgcttcaggacttgatgtccagaggaatgacatatcctgcataggaatgcctttgtcatttttaatctgagagccattaatgaacaatattaaatcatgtttaacccaacaagctacccagagtagctaaacccctttagtttgccatatgaaagcaggaagtgaaaaagtatacagctacccacacaggccaggctcttctgctcactactggttgcactgacgtgaaaaagatwatctacatgtgtactaacctgagagtttcagaatcctgcttattggtaactagtctaataaatgtcctgaattctggcttatccagttagccactcttctcatagaaggtaggtagaaagaggcagagcaagatgggaagttcctttcatttgtgggaaaggagaaaatcatttgttaaaagtcgtaacttgtaaagaagacaaaaggacatgatcaagaacaccatgaagaggcaatcaacaaaatccaagactgtgaaaactgcacagcaaacacctcggtgttttaaacaaataaactgaaagaatcaaagagtgggggtagggattgaaggaaaacaggtagattaaaaaatttgagaccaaaattaaactatagtgtgtttaagaacacacacttgaaaagtaggcactgcctccttttttctcatagtcttttgaatcacttagatggaattcagtgttataatatgagatactagccacagcatctgtaattttaataacattaactcaaaagcctacttatcttttctgaggcttaactccctgagggaggagccaaggctccgataccacactgtgttcaatacaccttcccactcatgcattcttcaagaagtcccaggcccacactgaagagccttaccagwggggaagaaacaagccattagtcrtgggaagaggggaagtcagtttgcagagaattcaatccaacaggacacaggctggaaaggatggagtagatggggatttggaaaggtggagaaaggaatcatactataacctctctaagaacaaagaccaggaagggccaggcatggtggattatgcctgtaatccaagcgctttgggagaccaaggcaggaggatcacttgaggccaggagtttgagaccaacctggacttatagggagaccccatctctacaaaaacaaaacaaaacaaaacttaaaaaataaatcagccaagtggtggcatgcactcaggaggctgaaagagggggatcatttgagcccaggagttcatggttatagtaagctatgatcattccactgcactctaacctgggcaagagagcaagaccctgtttctaaataaaataaagaawagaaaccataccatttttgtgtaccactatgaacattgtctagtacagtactttatatatatacaacacctactgaatcaagatttatcaaataactatgacaagtggaatctgggtgaggtaagttcagggtaaatctcaccaacactgagttacaccttgmgttctgtaatggcgaggtgtaatagagagtctttgaagttggtttgccacgccaaacaaatctaagctcttgtatacttcatagacttttagagctctaaaatgtcatcctttatttcgtggagcttaaggttagtccgagagtccaaagtatcaatattctcccaagaaattctaaagtcccgtgagatattcccatcataagtttctatgaagatcgtgatgagtggtcccaatgggcaacatcatgggaatttgaaacgcctacaaaaatttgaaacttagacaatagctgtaataatttagatgtaagtatacagtggttaggataatacaaggtggcaaactgctagtattgatgattctcagtataaaattactgcaacaaatttcctttttgctttttcaactaaaatgcccacatattaaattatgtctttctatacacagggctgcagagtgagttatatgatgtttccaaagcggttgmcaattcaaagcagttgaatataaagctaacttccttcaaggctgttcatttttctcctgtttcatctctgccagataccagtttcctgtatgtaaaccaagtttttgcatttggggcaggacttactgctatagaagtacacgtagcagtaactggggtacttagtatcactatggaatatccaggcactctggatttcaaccattgagcacaaacgggagtatgtgtgtgagtgtgtgtgtgtgtttactcttctcctctctcctgtgcttgactgctcataatttcattgaaaatcaaatcagtatatttgtccatagttataaatgaactcagaattcctgtgttttcatagtatccatggaaaaagcattccttggtgtccttatccctcaaataattctaaataatatatactgtctgagtccaaagttgttattgattttgctgtttcagggatgggggtatatagctgacttatgttgcgctcttatgtgtcagggactacatatcttaaatatattatcccattagttctttccacaaccctgtgaagtaggactattattattgcccctcccacccccacacacctttttaaacagagatgaagtaacacacaagggcaaattatagagccaagaaagaatcccaagtccaactccagatgcaatctttcaaaacactgattagtttrtatctgcatttattcttcttttggagtccctgctctgtcatttactaattacctttctgagtctcaatttcttctgaattcgttcctttaagtgttttttaaattaatatcattttaaatcaacaaataataattgtacacattcatggggtacaatgtgatgtcttgataaatgtatatactgtagaatgattaaaccaagccagttaatattaaaaaaagttgtaatattttcctgacacgttgttttgcaagagactgaagcaagatagttaaaaatcacccacctcaacgaatgttaattttctttactcctacagtgaatgttgaagaaattgttgagcaaaacagcactaaaccttaagaatgtacattttaagtcataggaaagcaactggattttcttttattgtatttctaattatgaaaatttcaaacacacataaatgtttaaaggatagtataaagaacctcccaccaatacatagctgaccttatttaattcatacaactatatattctttccacttcctggattattttgaagaaaatgtcccagacattatccttaaatattttaatatgtaactctaaaaaatgagtcttaaaaaaaaaacacccactatacggatattactcctgtgtccgaggtccccaagaacacccacaggttctatggttcactatattgacatacaggactcagcaaatatactcacggctatgattgattacaatgaagagataaaatgcaaaatcaacaaagggaaagggagcattgtgtaaagtccagaggaagccaggcacaagcttccaagagttctctctcagtggagtcacacagaatgtgctcagtccctaagcaatgacctgtaatgatatgtgtaaaacgtttcaaactcctggcctcaagcaatcctcctgtcagggcctccccaaatgatgggattacaggcatgagccaccgtgctctgctaaaagttgtctaccacggaaacttattattagacactcagtgcccaggattttattggcagcatcctctgcctagcacagactgatttcctagactcgcagaaggaaagccaatgttcagcaaaacccacactgtttgcacaacttaatcacagtgagccatttatgtgagtcctggaaatggtagcccccctccagatccatgttctcagacaccaaccaagggtcaaccttgcaattcggcctttttaagggcgatggcctcaagccttctatgttagtcttttctgcacattcccttaaaatactgttaacatatttccttaaagtaaaataacattattcatatttccgatattgtcgtaatatttttaagcttgttttgaatcaacatctaaacaaggttcatacatagacctctttaatacatctgaagtttcctttgacttataagttccccttcatctttattttttgcattacttttctgttgaagaaaccaagttatttgttctttgaagtatcccataatctgtttactattgtatgcctgaggtattattttaaaatttcctctgtccagtcaagccttttgaaatggggttttaacttgaactcttytgcatacagttagacattttgtcttttttttttttttcttaacttcccacacaacactgatgcaaacaatttgcctttaacacctaagtcattactcaactgcgtgaactctattttgaacacccagccctttggaaacaaggtcagagtctctaacacaactactcctgaaacacttgccttagcaatgattttatttgcagtgatatttctgcctgctttaaagttcattttcaaaaactcaattgaaaattccattaggccagctaattttttccccctgcttagtggatagatgactggcccagttccatagctgataatatgcctgaaatgtgcaataacactacacacctctaattaaaagaaaacacaaatttttactttataaaaatgatgacaagaacattatctcttaccggtcactggggatagtcttatgatattaatagctttaagactgagagcaaattctgaggcactgtcagcctcataggctttcaactaagtaatccatttcagttttgagaaattgcagcaattctttttctttatcttaatatcaggggctttatatagtaaactaataaaaactttcataccattagaataaatacagtgaaagctagtggcctatacaaatactgccaatggaaaagttgaaggttggtactatttaacctagaaaacagcaggccgaggagacagttttaaagaacaaatatggccaggtgcagtggctcacacctgtaatcccagcacttgccgaggcgggtagatcaccctgaggtcaggaattcgagaccagcctggccaacatggcaaaactccatatctactgaaaataaaaaaattagctgggcatgttggcacgcgcctgtcatcccagctgcttgggaggctaaggcaggagaatcgcttgaactcagggggcagaggttgcagtgagccactgcactccagcctgggcaacaatgcgagactccctctcaaaaaaaaaaaaaaaaaaaaaaagaacaaacatttctaaagcatgcacatatgcttggcatattaagagattttatttcttttttggccatggatgcataaccacagaagttctattctaaaacattttttttttttttttattgagcaaaagattagggcttcaagaatctggacttaccaaggcctcagagaggatttcagcagagtcaggactaaataaaagcaattctgagggtttttgttgttgttgttgttgtttacagaaagtgttaaaagaaaaactttagacagattaaatttagcaacgttggtctgggtgcagtggctcacacctgtaataatcccaacactttgggaggtctaggatgttggatcactggagtgcagcagttggaggccagcctagccaaaatggtgaaaccttgtctctactaaaaatacaaaaattagccaggcgtggtggcacacctgtaatcccacacgcacgtgaggctgagatacgagaatcgcttgaaccggggaggtggaggttgcagtgagccgagattgcmccmccgcaactccaaactgagagacagagcaaggctctcaaaaaaaaaaaaaaaaaaaaaaaaaaaaaaaaaaattcagcaacgtttatttgagcaaagaacagttcatgaatctggcagcactcagaatgagaagttcagagttatacccaccagtgggagattttatacgccagacacagaagcaaagtaggtaaatcctctgattggcaacagttaggtatatttgggcatggtctgctcacttacctgcctgtgattgacttgtataacaaactcagctgtgcattatagttctagggttggttttgtgtcaagttaggttgcagttcaacacrcggggactcaaggtatggagggagctgcaggccaaacttaatttatttaacaacagaaacactttccttaacctgtgctgaaggcaaaagcaagtgaacataaaattagaagcaacgacttaaatttgatgtaataagtgttttgtcttctcagaaatgaaacccggaaaggtgttggtaaatcgggaatggtggattctaactcactgaaaatcttaggtgccctctcagggatggtttctcagtttgaaccaatatgaaaagagtagttataggtcgggcatggtggctcacgcctataatctcagctctttgggaggccgggaggggtgaatcacgaggtcaggagttcgagaacagcctggccaacatygtgaaatcccgtctctactaaaaatacaaaaattagctgggatggtgacgggtgcctgtaatcccagctacttgggaggctgaggcaggagaattgcttgaacccgggaggcagaggttgcagtgagcagagatcacgccactgcactccagcctgggcgacagagcaagactgtgtctcgaaaaaaaaaatgtgtagttatgtataaccacatgagtctgaggtcctatttgtttttgtgtcattctggtctagcaaggggccttccccacgactaacctacctgagtgttgccratgcggatctactcaaccggacttggtcccggggaggcaatgaacaatgtctccggtacatcgccaacctcatctcctgcttccctagtgtgtgtgtccgggatgagaagggaaacccggtctcctggtccatcacagaccagtttgccaccatgtgccatggctacaccctgccagaacatcgcaggaaaggttacagccggctggtggccctcacgctggccaggaagttgcaaagccggggattcccctctcaggggaacgtcctggatgacaacacggcgtctataagcctcctgaagagtctccatgctgagttcttgccttgtcgcttccacaggcttattctcacccctgcgactttctctggcctgcctcacctctagcccagtaaaaaactgcagtggttttattactttccctgagcatacacacactcttggctgccaacgaggggagagttaaaatgggaatcaggggactcttgagttgttggaaagggtctggagaatatatacaggatccacttgagaagccttaatttttcgtatctcaggtttctccagtaaatagctgtgggggtgaagagtagctgtggctgaagactgaggacgattgtcctcctgtaggatccactgtaggagaataggttctaaagccagcagttttagtgtactaggagaaattactgcatgagaacaaatgatttaacagaggaccacgtggctactgctttttgattgctgcttggacctctgctctgtattcttaaagccacaccgcttccctactgccatcatattcccctgtccccactgctatgtctcatcaacctctgttcctaacacctctgccaccaagttctctgtagagtaacctcctttttcccctttaattacttgctctttacttctgcctaggactctagcctatagttcactgccctgggaatgttcaaatatagtggttcttacattttagtgtttatcagaatcacccagagggcaggttgcaacacacatcactaggcctctccttctacgaggtagggcccaaaatttgcatttctaacagcttcccactgcttatttgccttggatgaatgacaatatggccattttgatgctataaacaaatgctgtcaccatagaactagactttacctataacctatttcagcccccttatttatagtctactttcccatataaaactaagatttatatataggggtgtttgggggtatgcaaatgaatatataacatatatgcatacacatatatatacattctcttcatttcttttatatgtataggtatatactcatagaattttgataagataataaattttaaccctttgattacatatgaaaaatttgaggaccagagaaaataaatgactttttcaagattatattctttataatcagtactggaggcaaagccagaatgctgccattttaattccaatctgttattttcactaaatcatgtatccttttttataatgaaaattaaaatgcttacataattaaaatattaattttagttttctcttattcttgtcattatttcttaatttgggttctgattgcttgtgtatgtatacctttcaaggtcagtaaagaaagagataagcatcaccagctctgttctctatttataataaaagcaggcactaacacaatagttagatttgccttgtcttgataatgttgacttagctatatagaaaatattggtttcttatccccaaggaggtcacaaaattctgactacaaagataagggaaaatccaactttcaggcattcattctgagaaaaggaagcaaactggctgaagtaaaacacattttaattaaaaaaataggactcagtaagagtaaatatatgcttagttcatcctgagcccacggttacctggaaacttacctagccttggatccagaggggaaagcaccaagtaaccagagtccataaacctcttaggagaatatgccctaaggacgctaattatgtttagcatcgcttaagcatgagttaatcctgcttgatatatagcaatattattatagccttattttcttcctaatgataatttgcctgacatttaatgtttaactatgtgctaataattgtaccaaatatgagatgtatataacttaatcctggtgagggataaggtattgctttgttgtgggaattcttgcttagaggtgttatgagtcaccaaagtcatgcaggctctaagtggccaaatcatgatcagaacatgggtttgttggattgcaaagcctatactactagtcattatgctaattggcctcttaagcagcttggaacagtttgtaaataattattcccttatctcgttacattctgaattttctaccttcacccgcacctccaaaacagaccccatatttgaaagatttttgttcctaccaaattgctcttatactattttcttactttcatcttccagctaactatgttggatataattgctcaacttttaacactgtttctgacccttttaaggcatgtgcagagaaagtctggagtaaggagaggacaaggagaagagaaaaactcaagaagtagaaacggggccaggcgtcggggctcacacctgtaattccagcactttggaaggccaaggcagatggatcacttgagaccaggagttagagaacatcctggccaacatggcaaaaacccatctctattaaaaatacaaaaattagctgggcatggtggcacatgcctgtaagcccagctgcttgggtggctgaggcatgagaatcacttgaatccaggaagcagaggttgcagtgagccaagatagcgccactgcactccagcctgggcaacagagccagactgtgtctcaacaaaaagaagtaggaagaggcttgattaacataggttttatttgttaattcaaggaaattcttcaatgtaatataaaaaccaaaaaaaaagccttaagcagcgcattaatctgtttggaaattagttgggaggctataagctaagcaaaaggtggtggtagcttggatctgaatgctagcaatgataatggtgaaaagtgaacagttacttaaactatttaaaaggaagagttgtcagaacttaataatttagtggctgtagggtatgctgagagagaaatgtcaaggatgactactgggcttctacgttgtgaaagccacaggtggtgatagttttcactgagatcagaaaccctggaaaaatctcagatctggagcaatttgtagcagggaaaattgtttgttcagttttgggatgttgagttttgaaacatgcaagtgatgggaccaagttggatatttgagtctaaatctcagagaatttatttgggatagatgtattgacttagatgataacagatatagatatagatatagatatagataacagataactgatatagatgataacagaagccatgaatttagctgaggttgtctaggactgaaccttaaatgcatcaactatttaaggcaagggaaaagaaaggctctggaataggagaaggagcagccagaagataggaggaaagccaggagatgactcccatggaagagaaagaagaaaaatttaaaaatggagggatggtcaatggtgtcaaattatgctgagaggtcaagaatacattaggaatgaaacatcttcattccatatttcactctcaaatattttaaacatatgtaccaaaaagaagccagaaactgcatattgcataatcctgtttctataaagtttaaaaccaggcaaaatgaatctatatctgtagaagtcaggaagtaattacccttcagaaggatagtaagtaaaactggacatgaaatggcttctggatttccagtaatattctgattcttgacttgggtgggttacaaaggtgtgttcactttgtaacactttgttacacagctgtgttccacttggtaacacaagtatgttccctccagccctgacttagccaggcccttccctgctgggctcagtctttccataggcaaatctgcatgactaaccacctcctcctcgccccctgtgagtcagggcctagagcatatgattatcaagctatataattatgatatatctacttttctgtatgcaagttgtactgcaataaggaatattcgttaataaaaaacaggcctgaaatctggaaaaaaaatgcatatttccattacataaaaatcccactttttaaaatttatattggtataatataaaagtatgcaaagatttgtataaaaggatgtttattacagcattgtgtgtaaaggtgaaaaaacctaaatattttaagtaattcactggttaaatatagtacaagcattcgatgaaattttatggagtactagaaaactaggtttggtgatacagaaaagatgtacataataacactaaatgcaaaaacaattacagaaaatatgtgtaatccatttgaaattcaactgtgaaggtaaagagggggcaagtatgtaggtaaatagttttgaagacagtttaataggttttattaaaggtaaaagttggtaaatggtggcacgtattttatggtgtggctatggttagatataatgataaagggagtcagtacaggcaacatgctcagcttcctgagacgtgtgtttctctgtttgggataaatcttgactaggttttgtaagcatctgtatattttagcaagaatgagtattcagtctgcctaagaatcactgaagagacatagaggggaataactgaaaattcaactgctcaaactttgggagcaagagagggaagtgcaattgtggggaacatttatacagcctctaaaatagaatctcatttaataatacaagatttgattctgttaattttgcatttttttagtcactaagttttgttcagtgatttgaattttcagaaagaacatgagataaatatatattaaatttccttaagctgtccttgatacacctcaaattttgtatcctttttctaacctcaataaatactaggggcaaggaaaaaatgacaatgaaagtaaaaggtagcagatggagtaacaaaacatggagtacaaatattatttcttccttcttgcctgaaatggttggattaaaattatttgtttcagtggggaaaatgaagatagtagaaacataaaatacatatttttttttctacatcagtgtggctagttaacatttcctaagcttctcatagcccagggttctcaatccaagctccaacaataaaacctaatcattaataacactttgctttttctgatcttggccctgaaggatggaataaaagaaggaagatagtcattcctagtgtctccttttttccttaccccctcccacctcagtagttctagtgtcatatgtgttcccaggactgtcccaattttgttcaccacttgaggaaattttttccttgagacaacttgttcacttcttaatcttgctctagtgacttaaaaaattacaaaacgcatagctaatgtctgaattttcctcttactaatttatgtgcaattttcccttccaccaacaggtgtatgtgtttccaaggcaaaatatgctttaggttttaaacactgtttgttacaagacattgcttatgataggactatgagacattcagttaatactatgtagttattgcagtgaacactagatgtcagattttacttctagattatttcccaatagagggcgcacttgaattgtttctaaacatttcattagaatttttgccgcattttgaactatttcctttcagcagattcctaaaagcttaactactatatcaaaggatatgaacatttttaaatctaaacatataatgtgtaacatttgtttcaaatgattgtgccaacctatcccatttgacctcactgtcccagagctgagtagttcttttttctttttctttcttttctttttttttttttttgttgttgttgttgttgttggtttgtttcttttttaaggcagaatctcgctctgtcgccaggctggagtacagtggcgcgatcttggctcactgcaatctccacctcccgggttcaagcaattctcctgcctcagcctcccaagtagctgggattacaggcatggaccaccacacccagctgatttttgtagttttagtaaagacggggtttcaccatgttggtcaggatagtctcgatctcctgacctcgtgatccactcgccttggcctcccaaagtgctgggattacaggcgtgagccaccacacctggccaagcaattgttttacattgtaagtgatggataacaagatcttgctaatttgattgggaggggagcacttatgtttact

SEQ ID NO: 93562 - DNA, 13484 bp, Homo sapiens
ctggagtgcagtgatgagaccatagttcactgtaacctcaacttgtaggctcaagtgatccttctgcctcagcctccaatgtagctgggactataggtagacatcaccacaactggctaatttaaaaaaaaaaatttttttttgagacagagttttactctttttgtccagactggagtgcaatggtgcgatcttggctcactgcaacctccgcctcccgggtgcaagcaattgtcctgcctcagcctccctagtagctgggattacaggcacctgccaccaagcccagcttatttttttgtatttttagtagagatgaggtttcactatattggccaggctggtctcgaacttctgacctcaggcaatctacccacctcagcctccaaaacggctaattaaaaatttttttttatagagatagggtctcactgtgttgcccaggctggtctcaaactcctgagctcaagtggtccacccactttgggtgctgggattacaggcaagaaccaccacacctggcctcagtgcctttcaacaggcaaatgaagaggagccctatcatcatcttaatctcttgggagagacaaggtcaggggagagctaccaaatgatggccattactctggtgaccttgcacattaaggaggtgcttggacatgtgaccactccctatcattctgaaggcttttagattgctggttgtgagagaattctgaaatctattcgacgacagcaggagcctcttcctggcttgttttgttttctttacatccctagggtgtgatcaattaaaggaactagagattaagggttgtgatcattcgagacttccactctgaatatttaatatcccggattagttttcctagcagtagaactttatgtctaaaacagcagccacaaccaaaacaataacagagactttccatgagaaagagaagagactaggttgcagtgctcttacatcttctttcaacattagtgctagaacagaatctgacataactttttcaaatgccaataagatcattaatatttggacaataagatcatgtaatattttgtcatgtcagtaagtcaatttaatgcacaggggtactgataaacagaggagaaaaaaagtgtatgaatctactatgatcggcattgggttatatgctttcctgttatcaaatgtaagcctcaaaacagtctcccatattctcatcttacagatgaagacaccaatgctttatgagacttgcccaagagacattgccacactgagtgtgctgatgaatactgaaagccccttctccaaatcctttaattcccattctagacactggcaaactagttgaacacactcttccttggtgatggtaagaaggtacctctaaaaaggtaggaacccccaggtccctggcagggaagtggaagaaggctttgtggttaagatcattcacacagaaccaccaggtttccaacagcatatcccggttgcaaagtcctatctcttccaagtgttatctaacttgaagggaaacactagtcctccttgctctgcatgaggtcaatttgtaaaatgcgccaagtcagccaacagccttccaggcgagttcccactgaacagagggtgaataccaggcccaagcaacagggaaaattaacttgaatgactgctctgtgtttttaaggttgccggagctaatgttctgtgtatctgtctgtagcatgattttaaatatttacagaagttagagaaaggaaaaaagtatcagttcacaagtctactttttcactttattctatggtcattatctattgaacagatagaaagttacaattttcccctctagttacttctgagggagcttcttcctgaatctgataagagccaggcctatattctaagcagcaatgtacatctcaatctcagcaaagtaaattccctctggatcagacacccagctgcttaatgtctcaggcttactcacaagagatctgagagtggcgtgtgagtatttcccttagaaccagagaccctacgcacacactgttggttttgtacactagaacattgctttaaaaaacaacaattaataggccgggcgcggtggctcatgcctgtaatcccagcactttgggaagccaaggtggatctcttgagcccaggagaccagtctgggcaatacagtgagaccccatctcattaaataaataaataaattgaaaaacaaaaaacaacaataataaaaggcaagcttattctgtttaatgcaaagaacatgccctcctggtgatgcattcaatcaccaactcttaaaaacataacttgatgttttgatctttttaaaattttttaattttttaggtttttaaaaaattatttcaacttttattttagatccgggggtacatatgaaagtttgttacctggataattttttttaagggtaattgttggcaagggttcatctattaattgtgagggtcatgattttaatgtgtggcccacacagaaagggtgctacaaatacacttcatatgcattttccctagatacagggcatgagcactcttagcagagacaagtagaatctgatattagggggagtgttaataaaaaatattcttaatattttgaaggggttgtggcagtggaacactgagctgcttattttcattctggccccttgttctgatatttcccctttttgatcattcttcctccatgtctcctacacatttccaggcccttctgtttttcctgccatcataactgtgcatctggaccactgcaaagagacttcaaggtacctcatctgctgtgtcagcccctctgactgtcctgctggccactgcctgttcctcttcccggagtggagccttgatcctgtcattcccttttctaaagagcccccacggcttccatggcttccagcacacagtccatgctctcagcctgctacccagcctcctttccctgtcttcccctccacttttctccttgtaagctccatgttgcagcaaaatcaaatgactgttctctgggtgcacccgcagaattccatgcctccgtgtcttcactcacaaagttcccctctcaacctgactcagctctatggcacctcttctggaaaatctttcccctttgacttccctaagctggaactaatttttacttcctctcaaccatcacaattcatctgtatagatatatttatttgaaatcatattagagaccacatcatattcatctttgtatctatgggtagacaaagaaatagatgctgtgataaatttctgtttccagatgcccaggggaataacactggaaaactaaacatcactcttcactgaaccagtgtgtctcaaagtgttttccaaaagccacaccagagctcaggtggagctctgaggtcctctgaggcccagggcttgctgccttcttcccacaagagcacagccaacacagtacacagaacactctctcgacacagcctccgccactcccctcacctcagggaattgtccactctgagttcagaactttcccagagttacaatcataccctgacagagaaccaaatgcacatgatatataagacatttaaactcaatcctgaagagactaatttcttccccagagtaaatctctaatgaagaagaaaaaagatagctattgcagaggacacaggttctttctccccaaatacatttttctgaaagtcactgaactctgtcagaaccaacctctacagagttacactgataaaaaatggcactgacataatatttaactgttgcttccaaactcagttatcaagtgtttcataaatttgactaactcattaaaaataaaaaatgtaggaagacagtttggtctggtggagggctgttttggaagtccaagccagtctctccacctcactgagtgttcttggattagtccttaacttctgtatgcctcagttcccgcctctgtaaaattaggataatattagtacccacctcataagactgaataagactgaatggataatgtctgtgaaacacttagcacagagcctgcacttaataagaactaaacaattatagcaatgataataatagctatgacaatgaaactactgagaacagaggctctgtttatggaaagaggtagattagttggtacttaaacactaagatattcagactagcttctctttgggaaagaacagaagcagtttataccagtcccctatgtaagtgttagatgttatgtaaagactattgcaaacagcactaaaaaggccaagaatggctggacaagagtgcacgcacaggtacggtttactgcatgtgcacacacacactcctggcactgtgcaagttagagcctgagatgcttctaggggcttttaaagattctgtgctgctctaattgtttagttagctacaactgagtgaccatgtgtcccagattgccccagacattcaaggcttaagctacctgccccagcatcattattaatagtgtgccctctcattctcaagggggttctgattttggacaataatgtacataattaccctataaaacaaaaccatccctgtttatatgaacttccctgttttcgaatccagtggatgttctcaaaaaacaatactgccatttctaaagctcttggtcacagtctgcaaaggagcctgaggactatggacaactggacatatgtttgtaaacagcttcaaaggggaatggatgtggtttaacatggagaacagtaccagcaattaagggtttgtatttaatttttacaagtaaaagtaaacgttgaagaaagagagcaagccctaacaatctgagatcatttttcctttatctttcacaacatggaggcacaagaagtcaacaacttttaacttctcagaaggctccctgtggatcaactcaatcaatgtatctgggcctcactccagtaagccccaacattggctttatttattagagagataaatagctctgtgagttcacaacatggtgaaaattttcttaacaaaaaccacagtctttaattggcttcgaagttagatgaagaaataagttttaatattggcattacattggatacttttcaagagttcagaaatattagtctgcttaatctccccttaagatctcagaagcactgcaaagggagttatgtttatgaaaacattaaaactgatttttccctagtgtaacaataaccatgtatccttatgcatttgtagtgtcgccactttttttctttatccttcgtcagaacttgtgtttatacaaatcagacagaaaccagattcaaccaacagctaaaaattatttactcacatgcttagtttaaaacattctggtatcataccacaccacactgaaaaacatcacgacgtactgtatggagtggaaccaaataaatacgctaaagagtattttccagtattcgctgttacaaaatcataacatcctatgatacaaacaacgagattgtataacgtccccacatcgttttttcagaactaacaaaaaaaaaaaaaaaaaggtggagaaactcagcaaaacaaagtggcgagaaaagtcgggggaggggcggtagaagagaaggggcggagaaacacgacactgaggcggtgatatcacccacagccaacggcatggaattcagaaagttaagtgtcacccagcaatctcggtgcrgactcgcggcgcgcctgcacagcgtggcggctgcatcccagccaagcaggaagggggagggggaggcctgactgagttcgcttgggggcagctgaggggagggctgcccgcctcccggacggcgcacgttcgagtcccgggtcgggagacttgtccgtcgcccgacaatgatttcatcttttcggaagagctgccgcctgggccgcggctgccacgtgcctggtctggccccgtgcgctgcgccgggggacctacccggacggggccgcggccgccgcggggcgcagaggcagcagaagggaagggctggcggccgggaggggatcggggtggccaaaactgggctaggggattgctccgcggagtccgccggcctcaaggggctgccctgcggagtgcacccaccctccgcgcccaaaggcggaaaggccagagcgcggggcaggtttcgcaactccgagggtggatgcaggctgtggccgggcgggatggagcggccgtgcgtttccagcgcccccggcctggcggagccccattctcggcctgcgccccgccgcgcagtgcgcgctcccggcggcgtgaccgtggctgtcgggcccccgcccgagccgggcaaccggccacccgtgtaggggacagtggcggccgcggggcccggcgccgcgctgttcgcagcccgccactccttccgcgctccaggccctctgcgcctcctcccccggccccggagaaatgcttgtaccttccaccgcctcctccaccatctcgtcgtcgctatccatggcggctggggacactgcccagctcggggctgcgcggctgcctcccgtccctctgggtgctcccggcggctgagcgagctctggggctcgcgagtttggaggaggaggaggaagaggaggagcagtcggggctggctcgcactgcctccccctacagccctttcaattccttggccttcagctgctgcggcagcagccgtcgtcccccctcccttcgcccacttgcccctcgcctcggaggctccggtgtgccgccttggccgctgccgctgctgcaactttctcctgtaataccctctctttgttatcgagcagctgatccgctgacatcacccagcgccggtgcgctccctccctcgctgattgacagttccctgtccctttccagaagtaaggctccttaaaacgaaaggcgctccggggccgcgcgtattccgcgtcccagccaacccgcctccggcccgtcagcgtttctcttttgcttaggtgcggcttggcgcgccccgagcgctcaacgcggtcctgggcgctgcgggcttctcgcggacacttggaccgcccgtaggggctccgagctcccgacctcccgttgtgccgggagcaacttgaaagtccgtcgtgcactgtccgtgttccctcgagacaacctccaaagtgccagggaagctaaggaagcgtttctgacgctctggcgcctggacttcctctcaccctcgcccccacatcaccccgtcgccaccgggagctgcacgagtgcgacacgcaagggagcgcaggtgtcctcgcggtcccgcatcacatccgcaagccgatttccccagctcgggggctgttatctggcccggattccgcaggatggcgggtccaccccagcgcccccactccccgccctccttcgggtcgccaggccctcgggtgattcagaaattcrtcaaatccaaatggcagcgggctctctgtcaggcaggaaacaagccgcaccgaaggctmggcaggttcctccttgctgctgtggtaatggaaaaggagccgccgagtggagctaacgaggaaggaaggaccctccgtctggcgcgcctctttcccgcgcctcccgccctgtacgtgtgatgtccccagctgtctctctgtttctccaagtgccaaccacttcacagattcaggcgtcctcaagtggagaaaaccattgggcacccggcttccggcccggccacttagtgtcgttatggcgctgcctcttacaggtggcggtaaagggcgactgtaaatagccgattaaacagatgtaaatgtacacaatgtaccgtggaattaccgggtgccgctctgggcacccgccaagaacagctactgcatggaggggaggagggagcaaaaaaaaagtaattccattttgttttctgatcaatgaatgagactttggggatttcaaaatacttccagcgcccaggagactactccttgcttttggctctgtgcttaaatggtagatatttttgtcaagtattgccggcttgtttcttaaagtcagcttttcctctatgaaaaagagaacaatgctagggacattagccccacacacttccaggaatttcagcccctttgactgttttagaaaggggagggtcctggaccagaagttaggagacttgagtcctggtgctgctcacctgcagaggtgtcttgggagcccagccagccagcctgaattcctccagattagaggcttagtctacattgacataaggtccttggggcttaggctagagcactctgaggttctttggctcaagcaagacaccctctagcttagtctatacctctctgaagtctcttggcttaggtttgacctccttaaagtcctccagtgcagatactgggagtccaaggctaaacagagaaggtgtacgtgcagtggaagatgaaagagccactttaggttacatcattttcaaacatgaaccacagaaacaggattttatatctgatttttaaaaagccatcatttactgagctcggtcactcactggttttgaattatatgatattttttctcatttaacctttttacatatcaccccctcccttgcatattatactggtgcactaaaacataccagatactcgtcttccccagtttccagttgattttcagggtgaaaaacaatgctgaaagctgaaggaagcagcaaaaagactttattctcttactcaaaggcagtgaggcagggctgggaggctggaagaaatctctcaagacgtacagaagacacagtttcatggtgggtgggtacgtgtgggagtgaaggagaggggaggaatcatgttgcaagtgtccaactgtccccttggtgctgtgaggttttcccagcctgtactaagcacccaaactgtcaagcgctccctttctacctactaccttgagaacacctgaaaccctgcctacggcaccccccaaccccggcccccgccgtcggtgaagcaggggtcctctggacctacaagaggcagggacaggaagggagcagggtctttctagcaaagtcagtagtgatgcggggtcaaactacagagaaccttcaccagatctgcacatgaggcaggcagcagcagggacacagtcccatccctcttcccccaccattcattcctgctggctctgggcccaaagctggggcaaaatgtttttatgactctcttaagatccacttgtatctttacaaatcatgttgtgtatgtttcgagtctccttctctagacggactgattcttatttatggtcctagaacacaacacagtgcctggtacagaatgtgggttaagcattgtcagcaatgattttgcagataggaatattctgttttatataaacagtgctgaggctttctcacagactggattctcctcctatgttttggcaaagtgctttgtttcagttcaaatctgaagagcatttttgagttgttctactttcccacatcgactggccccaaatctgcttccatcgcattctttcccacagttttcttcattgagagctgatttcataaactctctttctacttggctttccaccagtttcccctgtcgtactctgtccccaccaatgtggtcatgggctagaaaatcaataaaactcttaatcacaaacaatgtgcagcagcaacagcagcagcagaagtagtgtggctcagctcctaacttggcagatcccagtgagacagaacaagctctaccagggaggaacgggaccgcacaggacatccaacatctaggctgggtgagacttgctttcatgttcacactgagagtgacttttttttccctgtctttggtcttgaatcaggaggaggggtgacttttctaagctgctctggcttagtttccattgcctccaaggctatattccttctcttcatacccagcttgggaaacataattccctcttccattgcagcaagcagtcaaaatactgagttaattttattcattctaccacccctgtctttccctggagaaggctggtgcttacatacaagactgatataacttttgcaataaatatatttttacaagcttcttgtattttatgcaccttcctacatttaggggaaacaattctgtcaattcgctgctatgcatgctaagcgaattgtgaaacaagtagtgaatgtggaacttatgtgggattcactactgttggctgttactgactcctcatcctgcccgctggcagggagtggaggggcccaagcagtcttctgggtctccatgtatttgggagggaggagcctctgagacctcagcggtaggaagtcgcatcagagcctctccagaagccctggtggctttatggttgctggcctggctctggtttccatcacttgcttacaccgccagcaggatgacaaggataaaattagtgaaagaccttttaaataatcatcaagtctcgttttggcactgctcactccttcacaagattttttcccaccaaattagccagtttgattgagtttttgctttgtctgttttggttccaccaagaactagccaagcaactgggcaattcagttctgcgggggccsgggggggggccttcgttttcccatctgtaaatgaagagttgggctacataaattcgaagctcaaaccttctctgtccaccttttctggagaaaaggtaaatagagcctgagaagccccaggaaaaggcacataaaaaggaaatgggaagaagccagggcaactccaacaaactgaatactcaagtcctctcacgttaatggctctatctgggcaggcaggtgaggggagaacctttatcttgactctagggagggaagcatggaagttttaggagaaccaaggttcctgggttctgaatcactgagtcactaatcaagtggctaactgtgttagtgacaactgcagaagctggagggaggggctgggagaggagcagcgaggaggagacgggtgggggaggagatggggatgaaagggaagcgtttgcagcttgtggagcactgggaagagcagggacatcaagggcaccaaataaaggtccagggagcaaagaaagaaatggagaaaattcattctgctggaaatagacatgagtgcagtcaggaagaagacttacagattcagggtgacctgatttgattacagcaacaggaagtgcaagagagagagggcagaataacctgacctaaggaagtgaattaaataatagagaagacaccacagttgccatggtattaaaatacctcatgccacattaagcttcctctttctcttttgcttgattcttgtttttgcaacatgttaatgttgcaatgacatgttaatgtcattgcagggtatccagtaaactaaatttagactttctggggcggggaggggagggaagatgcagcccagatctccctgtttgggtcgactctgggccaatattgttccttcacagagttcttggggttttttgcattatgggatatgaaaactcttatgtcaggcttgggcctagtgaagctgctgagtgaaatgattgaaaaaaaaaaaatgaggccaggcacggtgggtcacgcctgtaattccagcgctttgggagacagaggcaggtggatcacctgaggtcaggagttcatgaccagcctggccaacatggtgaaaccctgtctctactaaaaatacaaaaattacaaaaatacaaaaactggtggtgcatgcctgtagtcccagctacttgggaggctgaggaaggagaatcacttgaacctgggaggcggaggctgcaatgagccgagatggcatcactgcactgcactccagcctgggccacggagtgagactccatctcaaaaaaacaaacaacaacaaaaaaaaccctcacacacacacacacacacacaaagaaaaattggaaatagttttcaaaggggcatctgttttagaaattactttagaaaaacaataggattgcagaaacttgaaaaataaagacaaaccgccaccaaaaccaaatgtgttttcatagatattattttctctaattgtttttgaaaaattactttactaggctaaaattaagattattgagtcctgcaattggtcctctgcaaaagtagacattgcagagggcaggtacatggtatactcttttgacactacaatatccaggatgggcagaggagtatttccagctgacctatttaccacaaatgtcataacattcatcaagggtcagctcttgaccttcctcaagtggactcacattaactagaccccgagagactgagatgtatgcctgaattatgatggacagatcagaatactcacactgtcagggcaaaagatctctctatataaataaatgcacttgagaagacaaattccatccaaaagtttgcttagttatctggagtagaatgaaggacattagttgtgtggtccacaagacaaatactctgatacagtgttctgaaagaatgaggctgcccacccatcccactcacctctgcttagatgggccctatggcttctgaggcttcaagcttctttctccgtgctctagtttctccaaacctgattctccacacagcgtcctatacagcccattaggcagatttacactttctaagtcataatgacattctctatcttcctggcattacagccaagtcactttaatgggaatttgaggtaatcctcaaacttctcagtcacaaattgagtcactctcttggtttatgcccactgaattctagtcaaaaccattgagtgtgcagattttggtagtcaaactttctgagagcaacctggttctcaagttcttgggaaagcacctcatttctgcttcacaagccatcaacagtgggccaaccttcttaggctaccatgatttctgagaaagagaccagagacatattaagacccacgtggcctgtcctgtgatacagtcatccaagttttcctgggcactcagctcaaagatatttctattctgtgcaggagtggagaggttggctctttgctatgatagcttaggcaacggaacgccaccttgaggatgcagattccatctactataacatagatggagggcaaagtgtcctcttcattttccaaatgggactgtctggctttgaatccaatatccagaaatgaaaatacccatgtggtcctcttcactcagtcacaaacaaagacaggttgattagagtgtttctgggacctggcactgaaatgacaaccctcgatctacaggcagccctcacccggaggtgcttgatgctaagccagcccttcctgtatgtatttgctggagacctgtcttgcagcctctttggatctggcgtgtcctttcaggtcatttaaggtcttattgatcctccttgctgagtccatagatcaattcttgggaaaagatgctgtggccaacttttggaatgtctttcagacaaatttaaagagccctgctcaaatgctcctgt

SEQ ID NO: 93563 - DNA, 16741 bp, Homo sapiens
agccagccaagccaaccaagccagccaagccagccagccagacaagccagccaagccagccaaccagccaagccagccagccaccaaagatggccggccagccaaggtggccaagccacccagccagccaagccggcctagccacccggccagcgaagccagccaagccaccaggccagccaagccagccaaccagccaagccagccaagccatccaagccatccaagccagccaagccagccagccagccacaccagccaagccacccagccagccaagtcacccaagacagccagccagccatgccagccaaaccagccaggcagccaagccaccgaagcaaaccaagccacccagccagccaagccagccagacagctagccagccagcccaccgagccacccagtcaactaagccagccaagccaaccagccagccatgccagccaagccacccacccagccaagccagccagccacccagccagccaggccagccagccacccagccagccaagccagacaagccagccaagccagccagccacccagccaggcaggccagccagccacccagcaagccaagccagccaagccggccagccagccaagccagccagtcagcccagacagtcaagccagccagccagccagccaagccagccaagcaagcgagcaagccagccagccaagccagccaagccagccagccagccaagacaaccaggctagccagccacccaagccagccaagccagcgagccacccaagccagccaagccggccaaacacctaagacagccaagccacccagccagccagccagccaagccagccaagccagccaagccaggaaagccagcctgccaagccagccaagccagcaagccacccaagccagccaagccggccagccacctaagccagccaagccacccagacagccagccagccaagccagccaggaaagccagcctgccaagccagccaagccagccagccacccaagccagccaagtcagcgagccaaccaagccagccaactcaccagccacctaagccagccaagccagccagccagccagccaagccagccaaaacagccaagcccggcagccagccaggccagccaagccagccagccagcccagacagccaagccagccagccagccaagccagcgaagcaagccagcaagccagccagccaagccagccagccaaatcagccagccaagccggccaagcaagccagcaagccagccagccaagccagccagccaaaatagccaagccacccagccagccaagccacccaagacagccagccagccatgccagccaaaccagccagccagccaagccaccgaagcaagccaagccacccagccagccaagcctgccaagccacccagccagccaagccagccagccaaaccagccaagccacccagccagctaagccaccaaagacacccagccagccagccagccaagctagccaaccagccaagccagccaagccagccaccagccaagccagccaagccagccaagcctgccagccagccaagccagccaagccagccagccagccaagccagccaagccacccagccagccatgccagccaagccacccagccatccaagccagccaagccacccagccagccaaggcagccaagacagccaagccatccagcctgccaagccagccggccagccaagctagccaatctactcggccatcgaagccggccaagccacccggccagccaacccagccaagccacctgggcagccaaaccaaccaagccacccggccagccagccagccaagccagccaagcctgccagccagccaagccagccaacgagccaagccagccagccagccaagccagccaagccagccaagccacccagccagccaagccatccaagcaacccagccagccaagacagccaagccagccaaaccagcctgccagccaagccagccaagccatccagcctgccaagccagccggccagccaagttaaccagtccactcggtcagccaagccaaccaagccagccaagccaactgggcagccagaccagccaagccacccggccaaccagccagccaagccagccaagcctgccagacagcaaatccagccaagacagccaagaagccaagccacccagctagccaagccagccaagccacccagccagccaaaccaggcaagccagccaagccagcctgccggccaagccagccaagccacccagccagccaagccagccagccaggcaagccagccatgtcagccaagccatccagacagccaagccaggcggccagccaagccagccaagccacccggccagccaagccacttaagccacccggccagccaggcagccaagccacctgggcagccagaccagccaagccacccggccagccagcctgccaagccagccaagcctgccagacagcaaatccagccaagccagccaagccacccagctagccaagccagccaagccacccagccagccaaaccaggcaagccagccagccagccaagccagccaagacagccaagacagccagccagccacgcaagccaagccagccagccaggcaagccaggcatgccagccaagccatccagccagccaagccaggcggccagccaagccagccaagccacccggccagccaagccacccaagccacccggccagccaggcatccaagccagccaagtcagccagccagccaagccagccaagccagccagctagccaagccacccagccagccagccagccaaaccagccaagccagccagccagccagccaagccagccaagcagccagccagccagccaagccacgcaagccagccagccagccatgccagccaagccagccagccggccaagccagccaagccagccaagcctcccagccagccaagccagccaagccagccaagtcacccagccagccaagccagccaagccacccagccagccaggccagccagccagccagcgagccaagccagccaagccagccagccagccaagccaggcaggccagccaagccagccaggcagccaagccagcaaagccagccagccagcaaagccaggcatgccagccaagccagccaggcagccaagccagccaagccagccagtcagccaagccagccaagccagccaaccagccaagccagtcatctagccaagccagccaaccagctagccagccaagccagccggcctgccagccagccaagccggccagacagccaaggcagccaagccagccaggcagccaagccagccaagccacccagccagccaagccagccaagccacccagccagccaagacagccaagccagccaaatcagcctgccagccaagccagccaagccacccagccagccaagacagccaagccagccaaatcagcctgccagccaagctggccaagccacccagccagccaagacagccaagccagccaaatcagcctgccagccaagctggccaagccatccagcctgccaagccagccagccagccaagctagccaatccactcggccacccaagccagccaagtcacccggccagccaagccacccagccagccatgccagccaagccacccagccatccaagccagccaagccacccagccagccaaggcagccaagccagccaagccatccagcctgccaagccagccggccagccaagctagccacactcgtccatcgaagccggccaagccacccagccagcaaagccacccggccagccaagccagccaagccacccggccagccaagccatccaagccacctgggcagccaaaccagccaagccacccggccagccagccagccaagccagccaagtctgccagccagccaagccagccaagacagacagccagccaagccagccaagcctgccagccagccaaccagccaagccacccagccagccaagccagccaagctacccagccagccaagccatccaagcaacccagccagccaagacagccaagtcagccaaaccagcctgccagccaagccagccaagccatccagactgccaagccagccggccagccaagttagccaatccactcggccagccaagccagccaagccacctggccagccaagccagccaagccacctgggcagccagaccagacaagccacccggccagccagccagccaagccagccaagcctgccagacagcaaatccagcgaagccagccaagccacccagctagccaagccagccaagccacccagccagccaaaccaggcaagccagccagccggccaagccagccaagccagcctgccggccaagccagccaagccacccagccagccaagccagccatccagccaagccagccaagccagccaagccagccagccagccatgcaagccaagccagccagccaggcaaaccagccatgccagccaagccatcctgccggccaagccttcagtttgttggaaatgcactatctgtgaggtatgataaagcaaagcacagtaatacagggtacgcctgcataaatataccattagttgagcttggaagccgagaaaacagcaggtctttaccacgttatcccaggttccccaggaaagagcgtatgtaagatggaatttaaatattgatctagttgtctaatcttggccatagctttcgaaccacagtataattatctaggttcaagaaccattaactctccctgatttctcaagggcaaagatgtcaatgccaagagaagatgtttgtgttcattggtatttccaaatatattactttttctttgggcttgttggctatagataaaccagccaatgaattttgggctaagaagtccaaaacacccctatcccattaacagtaacagcagcatcaagaggcagcctggtatattgcacttaggaaatttattgattcatagctgtgttctcagtaaggtgtttaccactacttttcggaaaacraattatcttttctgcatgtatatttttctgcatttaaaagatacgagtctcttttttgagcagttctctttgtaaggattgatatttgatgactgtattctttcttaaaagaaattttatttcaaagaaaagaaatttgcttattttatagtagaataaaacttctatttttcagttacaatttgtatctattggaaacttttgtaaatctaagatacgacatgggatcttagtttttctgtatcttaaatattttactatttcatcatcctagaaattactttatccatattcattatttccaactatgctaaaaaagactaaaataatatgaaaatataaaagaaggatagaatagcctagaaggataataaaatagtgaagtaaatcatgatgttacatcatccttcagttttcttattgcattgcccagtgtcttgcatcatctttccagaagtatagaagaagtctgcagacactgtctttgtaatttttttgtttggttggttggtttctttcaggctttcattggacacttgagaattcagaatttttcacttttcacccagaatgatgacagatgaaaactgaccaaggaagatatttcacaagcattagacaaatcataatatgaatgtagatagatagtagcagcctagagcagagtttcccaacctcagcactattgacattttgcgccaaataattctttgttgtaggagccatcctgtgtgtgcaatccaggatgtttagcatccctgtcctctaccctactgcaggccagtagtgccatcctgctaagttatggctatcaaaaatgtctccagacattagccaaggttcctgggtggtcaaggggacacaaaatcaccctagttgagaaccactactctaaactctaatcatggtgaagtttattatataaatgaaatgtcagatgacaacacctaaactgtctctcagttatcttaagtcttctcaaactcaggataatgatgagtaaagaatatatttctaacaacaaaaaggaaatttgatagtatttctaaagacaaaaaggaaatttgtattcacattcagttagtcattccaccagaatgacttcatcacacaatattttgtgacaagaacctgaacagcctgttttacagtattcttttcatcttttattatatgcaccaaaatttttttttaaattttcttgaacctctaaatctacgttaaaaatttacctgatacactttctaaatggacaaatgccgaaggtagctgtgtatacaaatgtgactagaaggaaaaagatgatatagaaataaaataactccttgagttgatcattctgattggcatttatagagtagaaatgttttgtaattacagaggaaaaaagatggcctttccttcaacagttatgagccgtcagaattttcaaaaatactgcattttgacaatgtagtttctagtttgacaatgatatatttatcttcaaaaccaggaaaatgtagataagaatttggttttataatatttaaattcttattaaaatgtctaataaaattgttttccccatcactttattcttctgtaagttattttatatttaaaatgtaaacaaataaaaataagtaaataaacagtagcagcttcttttcctgataaatcgaggattgagtatgtattatctctttcctggactactggaataacctctccctccttccacagagaagccataataatctttatgaaatacaaatcaaatcatggtattcattctttaaatagttatcaataaaaataaaatcccaactttataccctgttctgcaaattttaacgtggtctgaattcagcttacatttcttctttcccttgtctattgcccatcaggctcactggccttattccttcacaccaaactagttatttccggggtgggaggaaggcttgcagtgttttctccatctgcaatagtctttcccaaatcttagtgtggataaagtttccttcttgttacttgaatcacaaatactatgttcttagtcattctctgttacatcatccagagtacattatatcaattttccaatatttttatttatttgatttcccactataacagaggctctgttagtgcagggtcttttactcttttgtaatcccaacagcaagaacaaaacaaggtacatagtacatatttaataaatacctrttgaacaaatatgtgccggtaatatttcttcatgctgctgaataagttaacagcatataaacacatacaaaccaagtggcatggatgtctgctttcatttttagccwtttaaaaatatatgtaacccatcctaaggggtttatatttgttttgcataatacattaatatgtactcattattcattacacagttaatatatctatatttgcagggaatatacattgcttggaattatacaaaaaaatattatttttcgttttctaatattcaggatacagtgttttaatgggggtgtttcttcattctttttttcttactggtttttactttttaaatttgaaagccttgcagtgatcataaggatctgttcaggcaaagaacatgaaagagtttaaatttttatcattttagtgtttcttattctctatatcaaaaacattcacaggtaagttaacaagatcctcatcaggaggaaaagtaaattgttcactaccatcctctagtatcctaatctggtcttgttgttggctaacttcagcagttactattctgtgattggtgtaatattaaccaaataaattactggatttgttcyacaaatattatatcttagattggttctttcctgtctctgaaaataaagtcttgcaatgagaataaattattttacaacagttaattagcaatgtaaagtttattgaaaatgtatttgctttttttgtaaatcatctgtgaatccagaggggaaaaatatgacaaagaaagctatataagatattattttattttacagagtaacagactagctagagacaatgaattaagggaaaatgacaaagaacagctcaaagcaatttctacacgagatcctctctctgaaatcactgcgcaggagaaagattttctatggaccacaggtaagtgctaaaatggagattctctgtttctttttctttattacagaaaaaataactgactttggctgatctcagcatgtttttaccatacctattagaataaatgaagcagaatttacatgatttttaaactataaacattgcctttttaaaaacaatggctgtaaattgatatttgtagaaaatcatactacatttgtagttggcacattaaatgctttttcttactctgaattcctgatatgactttctttaggattgtttaaaatattctagtagttttaggtcaatttagatgtgatttagttgctctagatattataatttttaggggttccctttcatttttttcttacgtttcttcaaatagtataatgccttattttcatttatgaagaaattaccctgctgttggtgatacgggtatatttaaataaaccagttgcagtgcatttctgcagaaagtccattaagacataaattttgtccagtaaccacagtagaagtggtgactctatgattcattcatgttgcataagtaggtgaaaaatatgagctatattctgtctgttaaatggaattctagagatgaagtagcccaggtaaatgtatgtttgagattactagataactgttgtacaaattggtatgtcacttaaattgttttctctcagaaagtccacataaataaatgaaatagactaataatagtaatatggtgtagaaaaaactcccttaacattatttccatagataaaactaattagaactgtaaattctaaggagattatttatctaaactaattttaaaatcagaagttaaggcagtgttttagatggctcattcacaactatctttcccctttaaatatgatttattgtctttctcatacacagatgtattgcttggtaaaagattggcctccaatcaaacctgaacaggctatggaacttctggactgtaattacccagatcctatggttcgaagttttgctgttcagtgcttggaaaaatatttaacagataacaaactttctcagtatttaattcagctagtacaggtaaaataatgtaaaatagtgaataatgtttaattacaataataatttattctagatccatacaacttccttttaaaaaacctactgcactaactagttttatgcttaaaaaaaattattaccagtaatatccactttctttctgaaaaaattttctttagatcggccatgcagaaactgaacctgatttgttttttttgaatcacctaggtcctaaaatatgaacaatatttggataacttgcttgtgagatttttactgaagaaagcattgactaatcaaaggattgggcactttttcttttggcatttaaagtaagtctaattattttcccattaaattcttaaggtacatattacttgctttcttaatagatttataaatatgtattacttatatacttttgtttatgtttggctggaagagttttccatactaaaactattttgtaccagtgatgagcttctcaacttttgctctttgaaatttaaaaagtaataaattcaaaactaaatttcagtcatgaatgagagcttaaatatttttaaagatttttgttctacttaagtaaaattttctaggtccagatgaatattgctgtaggtttcactgtgtgtatggattaaaatatccccaaaaaaagaaaaaaaatgttttaccttgagattcagaacaataatgtcaaactcccgtggttcttactgaaaaacaagctaattaagaataaaaaatgttttgtagaatgtgatatatgcagtactcaaaagttacaggtcataaaccatataacttttcataaatttagaaacagatttatatctaatatgatattttaagtgttaaaatttaaaaatggaacccagaagttaagttgaaaacaagaagcgtagacgtgtgtcagaagagtcaaacagcattcactgagcgctttgttccctccctcttcatttgattatttttgtgctcaatttccttttttcatgcttttatatcttgtactgagattagtcaatgaaaactagttgaaataaacctaaaaactagatgtttatttaatcacatattcaggaactacctgaaactcatggtggttttgcttctaaattacaggttttgaataatgttattattagtatgattgtaacatttattggatttcaaaaatgagtgtttaaattgtttagcaaagattatttgtatactgatttaagactatatatatatttttctaattttgcatgattcttttagatctgagatgcacaataaaacacttagccagaggtttggcctgcttttggagtcctattgtcgtgcatgtgggatgtatttgaagcacctgaataggcaagtcraggcaatggaaaagctcattaacttaactgacattgtcaaacaggagaagaaggatgaaacacaaaagttgtgtgactctagtctgtgtttgagactcttttcactgcagkggggcagagttgtttagaagcccagtgtatatacagatcatggtccttggaatcaagcagattaggatttggaaccaagttccactgcctctcatctgtgtagtgttagacacgttatgcaggctctcaagactcattttctttgtctgtaaaatgggaataatacctgcttcgtaaggccattgtgagaattaaattacatgagatatgcaaagaacctatcacaatccttggaacacagaaggtgcccaataaatgttagatccctttattttcccttcctttctcttattcaggtccctaagtatttacagtgattatttccttattctgtcatttattatctctcagtaatgaccctgaaaatgagtggaaagaagttagtttttacatttccaagtttaaaatggattttgagtcactcagtaaatatatcacaccctctagtcatctgctgtctagcttagtgtaactaagagtaggaaatacaatgtaaacttttttttttttgagacagggtctggctcttttgcccggcctggaatgcagtggtgcaatttcggctcactgcagccttgacctcctgggttcaagccatcctcccacctcagcctcctgagtagctaggactataggagcatgccaccactcccagctaatttttgtatttttagtagagacagtgttctattctgctttatattaaaagcccattagaaaatgggaacctggtgaatatataatgaattgtaaaatattttaatgtgtaactttttcaactgtgaaactgactactgattttttgatgaaaacagctgctgataaagtattttgtgtaaagtgtagttcttattaatcaggaaaatgatgacttgattagactgtatatgccctcttggattttattttaaatggattggtgactttcacataggtaaaacacagtccatctgtattcttttttccatcaaaaagcgagtgatttagaattataaaaaaatttgtgagcagcctatttgaaaggcatcatggaaatttcacagcacaataacatggatttgtttttttcttaatgatgtaaatccgtttaattcatattttgatcaatagcccatgcttgccaactctgaagaaatttaatttccagcagtattttaaagctagcctgttaactttttctgaatatttaaagttcctcttttttctatgtctgcacaaactgcagacctgggctggacccacatactcaagagtccaccttaagaaattattttgatgtccaagacatcactaaaatatttcagtttaaagataacatgtggtgttaatagattgtggtgcttttactatttaaagacaactttcatacttcagatgtttttgagaagaggggaatgtgaggggagggggcagaacagggaggagtttgaatgaattacattctttatatccatcctgctcatttggggcatgtctttaagagaaggctgaaagttgtgagagtatattgtataccgtaagagaatcaactcttcatcatggatgggattgtgaaggctgaactgtaaaattcagcattgacagcatcctcaattaataattcttggtgacagaataatacagctgggctgttttataaatataaacaataccatttttaattattacattaaaaattttaaatatatctatgtgccatggcctgggaagcctgttttctattttcataaaaattatttttactgtatgaaaagattatggggtttagctcaaaatatctgtggtcctgataaaattggattggtaactctacctcagaaggaaaatgggaaaaaaaaatagatgagtcacaattcaatacttcaagctcagaaactgtgcagatcactgaattttagatttataaagtcagagttggcatgcgttgtttttaatgatatggaagaccttaagaaaaaaacttggctgaagtttaatcgttggtccagccatttgaaaaaggcaatagttcgaggaggtttccgaattcggcatttgaaattcattttgttctctcttcttcattattagtgcatttggtgtgtgtatacttgcacacaattctgtttgtgtacacactgcttgctaagccctagtcaagaggcatcttttataaaaggtgtaaagaaatatcaaggttctaaaattcggaagagtttagaatttattaggagtttcccaagttgggatgttagtctttaaataaacttcatgcacctattccacttaaggttttgcacctcctttttattagtgcagtgccatttcttctgcttgattttaggtatgttaatattccagccttgctagttagcataaagtgacaggtgtgagccatgaggaaattttctgacttaatttttatacaactacatatgagttttagtggagaaaaaaaattagtcccttgtgcatatatagtagttaggtaaatgatttttctaccaacagtgtactccattcctcatgtaggtaagtacagaaaaggtttttaaatgtattttgttagccagttaaagtctatgaatctatctgcaaccttatttaatctgtcactacaataattttgtggttatgctaagaaccatgtatacttttaggtattcttatttttgtcaatttttctaggttagcaaggaggcagaaaagcttcactgtttcatattaaaatataattagactaaacttaattctagtatgaatttccaaaatcattatctatttatttcatttttatttaattttgtttttagttcatttttaaaagtcccttgttcaatttaatttatgttcctaagagtggttggagaacttggccttcatctgatttcaaaaacattttgagtttcaaatgaagttaatggtttcagtgtgattcagtcctcagacctaattgggttgaataaaatctaaaagaatatacccttttggagcataacattttaataccttggggaatgtggcactaccaaaagaagactactaacacgtcagatgttcacctggaagctttaacaagaaattcgaaccacccttttggccccattaattgtagcaagtttatttctctatattttgtcattcagtgaattgaagtcctgtggtatactgcattcattagaagaaaaacgtttttaatgtccttttaatgatggcccagaaagcatttgacacagcaagatgcatgtattattatattgagaatacagaataataacagtatcactaaatttaagacctcttcccagtcttgctgttcctagcaagaagtttggcccgtgactgcacttactgtttatgctcatcagaaactgtcaatgtctgcttttctttaactctgcagtctgtaacatcatgctgtttattaaaaaaaaaagaaaaattactttgacttgtgtccaaacaatccttagtgtactacataagcaaaaaactgtgataattctcttttgccattccttttgaaaagcaagccagtgttgctaaaatcaaaatttagctgaatttgagttcttttcagtaatgactaagaatacttgattgaaaatctgaaactattataccttaaaagccaatttttctgccccagtaaagtgatgaatattaaagaaatgtatgtttaaatatttacttcctttaagcataaagaattatatgcttgtattttaagaaatatatgtatgtatacatacatatgaatgtatgtatatgcaataggtaagtggacttttttccaagtcatttgaagatcagaacctagaaatgaagttaggctacaagcaaactggttttgctttcagttctcataaacattgcaaaaggtaagtgtgggcttttctttgaccattaatgcacataggcattaacaacttagtatttctgagcaattaagcaaataattacttacattttatttatttgccaaatggtttaaataattttgaattgactttgttctccagggataatatctctctttgctggaatgattcaggtagctcctatctaaatggaaaactgtggtaattgaaacacacactttacattttaaattagcagttttgaatttgttagggaaaaaaatcccagcaattgcatattgttaggtagaagtcaaatttacaaagaaacggaatagagatgtgcccttgagaaaagtgtagaatctcaatgtgcagatgatttaaaatgtgcgtgcatataaaatgttcatgtgtacttacatactttattacagagaagtctttggtatacaaaatagtttaccacaaccttttaaacagcaggttctgggccttaaatgcgtatcacatttagccaagagaactcgggtaggggcatggaaaatgaactgcagctccctatccctagcctctataccagctgttcaatgaaaagtaccaaggctcactgaatgttataacctagcagattgttacataaatgatctaacatttttgagcaccgctwctggatgctagaagctaagctaaagtgtttcacatgccctactttgcttattctataaaataactgcgtgaaagaacaggttatccccattttatagatgagaaaagaaaggtttacacaggttagcttatttgcccaaagttgtgattatggcctacaaagtcaaataaatcctactctgagacacatgttctttccaccattgcacactagaaaggaaaacaccaagattattcattactgatcaagtcaatattgctgtattcagctaatttagtaatatgtgtcttgaaattaattgctaaaagggattaaactgacttagaatcagttttttgtttgattacatctacatacaaaagtagcttcaaatgtctcattctactgtccataatttaagatttttgagtataatacaattttaaagatactttgaggcactttggaaaatcagaccaaaatctcttttccactcacagattcggcttaatcaatctggaaagcatttgttgagagccttatgacatcatttaataaccacggttgattcattaattaaagtacagacaattgttgactatccatgtgggacttttctattaggttgacgcaaaaataattgcggtttttcgccattaaaggttaacagcgaaaactggaattacttttgcaccagcctaatacgatgtggatcatctgagatgaatgttgaaatccagtatagcttcttcatatttctggcccatttttcccaccagaaagtgcacaaagtgaaatgagcttatgaaaagcttaattaactagaaaaatgttactgaaagaaaaattacatggtacatgacaaggctaaatactagtaactctaaacttagtgaattttctaggcagcagctttcctctgctgtctagactggtaaagaacaaactaaggccaggcgcagtggctcatgcctgtaatcccagcactttgggaggctgaggcggccaaatcacctgaggtcaggagttcaagaccagcctgatcaacatggtgaaaccctgtctacactaaaaatataaaaattagctgggcgtggtggtgcacacctgtaatcccagctacttaggaagctgaagcaggagaattgcttgaacccaggaggcagaggttgcagtgagccaagatcacgccactgtgctccagcctgggctacaagagcaaaactccatctcaaaaaggaaaaaaaagaaaaaaactataataaatatgttaggtccatgttttcttaagttttctaccggatttttatcttcgtatagtgaacgaactgttaagaacttttttatgagaaatattttagtatgactatattgcatagagttaggctgatggttcagtgttcagtaggttagataccctcattgtttatttccatattgactggttctagctagagctgaaattaggcaaagaatatcttgaactcattttgctatacaggaaaaaagtgcttccttagctcattt

SEQ ID NO: 93564 - DNA, 14177 bp, Homo sapiens
ttaaaaaaaatttgaaagaccagatctggccgggcgcaatggctcacacctgtaatcccaacactttgggaggccaaggtgagtggataacctgaggtcaggagttggagaccagcctggccaacatggcaaaacccaatctctactaaaaacacaaaaaatagccaggcacggtggtggacacctgtaatcccagctactcaggaggctgaggcaggagaatcacttgagcctgggaggtggaggttgcagtgagccaagattacgccactgcactccagcctgagcaacgacagagtgacattccgtgaaaaacaaacaaacaaaaaacccagacccttgcctaagtaagttaaatcagaaccttggggaggggactattactattttttaaaagctactgatggggttcaggacatgctacctcggcaaatatgccgaggcacatggcaccttggcatttgagaaaaaggcagaagcaggaaggtctctctgaccttcttccatcattctccccggaggcaggtcataacacctaggaaggtcattctctgaccttctcccttcctccttccctatagactcgcatgtgacaggtgtcctgccctatacccagaggaaaggagtgtcacataaggatgaagaataaaaatcggaacaaacaaatcttgctattataagttccccccagtttattaccattagatcatatccttttgtcctccagtcacagttctacatgactgtccataaaaatagtttttcctgtttctttggatcatttctgaaggctccatgtctcctgaagctttcattaaataaatttgtgtgcttttctcttgttaatctgtcttttgttatagaggtctcagccatgaactttgagataggcaagtacaagatccttctttttctttcctactctccccaggtaattctgaaacatagccagagtttagaaccagtgagcaatgattcaaacaaaagcttttaaggccgggcgcagtagctcacgcctgtaatcccagcactttggaaggccaaggcgggcagatcacctgaggtcaggagttcaagtccagcctggccaacatggtgaaaccccgtctctactaaaaatacaaaaaaattagctgggcctggtggtgcatgcctgtaatcccagctactcaggaggctgaggcaggagaattgcttgaacacaggaggcagaggttgcagtgagccatgatcgtgccactgcactccagcctgggcgaaagaatgagactgcctcaaaacaataaacaaaaggttttgaaaaagcaaaaatttgtcataagaaaaacagaaagcaaaaaagatagtaaggatatataaatttgaaagaagaaaaacaactgcaataaataaatccaaggactttttaaataaataaaatagataagattttagaaagctcatcaagaaaaatataaataaaatgagaaatgatacagtgcatgacagagatgcaattataagatataaaccataagataaattatcttataataatcatgcaaacatatgaaaatgaattttaaaattgcaattaaataagtgatattctgtaagaaccgtgacttatcaaaaacacaatgaataagctaataaccaagtaagcagtgaaaaaaattaccaaagaattgccccaataaagtctccaaccaggatgatttactaatgaatttgttccaactttcaaggaaaagaaaattaccaaattatataactctccaggataccaaaaatgatggaaagctacaaaggtgaattcctatgcctaatagacgtaccatgaaaaaaaagtaactgtaaaacaatagttctcaccctggctacacattagaatcacctatagagcttttaaaaatcctgatgcattggccacactgtccaccaccagccccccaacccccgccacagacatccaccatcccccatacacacacacacacacacacacacacacacacacacagaaatcagattctctcagggtgggcctaggcatcagtaatttttaaagctccccaagtgattacaaactgcaagccaaggttgagaactactgctacagaacaatttcactacttatgatttacagaagatcctaagtaaaatacaagcaaacagaatttaatagtctgtaacagttacaagccacctacacaaaaaaaaaacagcattttactcacagatgccaacatgtttcccaattaggaaatatgagcaaatatataatgatctcacaccatttcctaccacatacatttttaaatgcaagggtagttccttaacaagattacaaaaagatctgctttaaaacaacagcctaaatatctaacataatacttaattaaactatgtgcctaccaaaatcaggaatagaacaataatgcccctactagcatcattatttaatattgtttttaaaagctctggacaacgtagaaagatatgaagtaaaaatattagcaagaaagagacaaaaattatcattatgggtagataaaataatgacctaggcaaaggctgaaaaactaacaaagatttcagtacaaccatacctgaatttaaaatattcttatgtgttagcaataaccagctagaccatacaatggggggaaagtatgttcataatacaaaattacaaaatacttaaaaatagttttaataaaaactctgtgacccagataaaactctaaaaatatttactagaagatatattaatagaagagcttgactaaaaggataggcgaagtatattctggataagcagactaaaataacttttcaagtgggtatttcaatgtcattctggagggacttagaattattattttttttttagatgaagtctcactctgtcacccaggctggagtgcagtggtgtgatctggactcactgcaacctctgcctcccgggttcaagtgattctcctgcctcagcctcccgagtagctgggactacaggggcacacctccacgcctggctaatttttgtatttttagtagagacagagtttcaccatgttggccaggctggtctcaaactcctgacctcaggtgatccacccgcctcagcctcccaaagtgctgggattacaggcgtgagccaccgggcctggcctagaattatttttttaagtctacctgataaatagttcagcctattaaagatagttgtaaaatttaagtgtaatgaaggaaatctagctctcccagactttataccttaatataatagttcatttattaaagtagtacaataccacagtaacaagagacatagtaggtgtaaaagaacagatgccctggaaatagactctgttaacaggaatttaacacataatgaaagaggagtcacatatcaataagcaaaaaaagtaccaacttggaaaagcatcagtgtatagcctccttcctgtaaaatccaacccaaatatcagatgaagtattggcttaaatataataaatcaattcctttcaccttccaaaaaaataaatatgtgtcaagcctcagaaggaggaatgacattgcaggcttgggagaaaaagagaaagaaaacatttttaaaaattaagatttaactacataagttataactccgatatactaaaatataaacaaaaacatgctaacaaaacattttagaaaatatggctaaactttaattttataaaaatgtttaattttttaaagaccctaaaagagaaatgggaaaacagcataaacaaaattcatgagagggtcaacaaataaaaagaagttcactctaagaaactgtcagattaagtgcaaattaaaataacaacgaggcatagggtttatgtgtgtgtttctcctattaaatggaccactcattacggatgagattttaagttagtacaattttctgcggcaatgtaatgttatgaggaaccaatttaaaattcctacctcctctcaggaactccatttccccgcacgtagtccaaagaaacaacccaaaatacagaagaaacttgtatgtgcaaagatgttctttgcagctttttatcatagaaaaaaaaaggtagaataaggggacctgaaaagttaacaaaaagggaagggcttggtgaattacggcacatctacgttctccatggagtattataaaggcaccagcatgatatttttgaaaaacatgaggcaataagaaaaatactgaggctatacagtaatgttaagtgactaaaacacaggactgggccgggcacggtggctcacacctgtaatcccagcactttgggaggccgaggcaggtggaacacctgagattaggagttggagaccagcctggccaacatggtgaaaccccgtctctactaaaaaaaaaaaaaaaaatacaaaatttagcctggcatggtggcacgagcctgtagtcccagctacttgggaggcacaggcaggagaatcacttgaacccaggaggtggaggttgcaacgagccgagatcgcactactgcaatccagcctgggcgacagagtgagactccctctcggggcggggggggggggggggtgggggggggtgggggggtgggagaggaggacaaagaaaaaaacaaaaacaaaaaaaaaacaccacaagactgaaaattgttatataccacagtcataactatgttttttaaaactatgtttttaaactatgctctaaaaaccatgactacgcttttggaagaaactgagggtggaggggaggaacaaaaagcatgtaatggctgcagctcgggtagacacgtggctgggcagtgagaagaggcgtggtaaaggaggggctggatggccgtggggaggtgagtgttgctcttagatggagcgggctgctggcctgacccaggctggcaggcgaggtgatgggggctgggcaggcttcccgactcggcttctacagtatgttctgccctgtcctccagctggccgttggggatcagggcatctaggccagaagcccacccaggggcaccctgtgtctgatccctaaggtgtcttgtagtcatttcatggactctgacatctccaaagggccttgtattccaaaccaaaagtaagagttttgatcggaagcactttgtttgtttttgagacagagtctggctctgtcccccaggctggagtgcagtggtacgatctcagctcactgcaagctctgcctcccaggttcacgccattctcctggctcagcctcccgagtagctgggactacaggtgcccgccaccacacccagctaattttttgtatttttagtagagacggggtttcaccgtgttagccaggatggtctctatctcctgacctcgtgatccgcccacctcggcctcccaaagtgctgggattacaggcgtaagccacggcgcacggccgatcggaagcactttgactccccggaagcactttgactccacggaagtacctttttttttttttttttacatccgggaagttgcacagcgcaaaatcagaccatttgggacagtcttaggagtgcgttccgggctcggacgccataccaggccactttgactccccggaaacactttgactccacggaagtaccttttttttttttttttttttacatccgggaagttgcacagcgcaaaatcagaccatttgggacagtcttaggagtacgttccgggctcggacgccataccaggcctggatccttaggacttctccagagcactttgaaataattgtggaagggctttggcatctctagaacaccgagaactgtgatagacagttgaaaaaaggaggcgccggagtggcgtgagggccctccagctctggggcccgtcggcacgcagaaaagtaccaccggagcggcacttaggtaggatcccccagcaaacacaggtgccccgcagagctcagtaacgtggtttgcagcaaacacaggtgccccgcggagctcagtaacgtggtttggaaggggagagaggccccaaaggcctgaaaggcctaaaggctactttgtggcctgcacaccgtgtttttctcaaggttcatcctgccacagaaattctttctcctccttctcctcccattcctcagccactggcctgattagggccggctccaaagactgcctcatttggagcatttggagttcctttcgtccttgtgatccccagtgcactctgccagccccgtttttaaagaaatggcttctctggaggagggtatctacagccttaaaattaattccaaacgtagctcctataattccatgaaccctcaatttacagctggaagtgagggtcaaaatgaaactgaggaaccaaacaagttccagagcaggaagggtagacctcaagatagtggctcttcattgtctctgagtgttctccaggagatcctgggagatgacattccaaaagtaaaggaagaggctgtcattagttcacaatcagacctaggagagtgtccctactgtggagaaagaccagccaggaatgccactatctttgctcctcaaaaagagaaagagtcagccccagaaatgagcagctcctgtgacaagagggtgactgttaatcctcctgagaaattcagtgaggggcgacctaaaamacaaaatacactcatttgtgaaaaatgctctcagccttcaaattttctggatgactataacccccatgtaataatccaaaagcgamttagcaaccaaagtagagtcatttgtgaaaaaagctctccacctttaaatgttccggataactataactcccattcagtaattcaaaagcrcaaagaaaagatggcaattgagcgcccctcttcagggagtgactggtctgatgtaggtggaaccacagtcatattctctgaaragaagccattctcactgtgtcttcctgtagtgtcagagcctccatactacgccactgactacaccacttttccacctcattatagtccttggcatgactacaccagctcttggttcagcagtaccaagtcttcttgctrtccctccttgggcagcagcagtaacacattgcaggctgggaagagcagctgtagcagcagcagcagaagcaacaacaacatattccagggtgagaggagcagccaccagagcttcctgagtgattattccaccagttttccagygagctccgaaaacacatccagagatctgaagatgacagaggaaggcagatccaagaattcttccttattttactactccagaaatgtggaagcagaggcgaaggaggagagagtatatcaagaggagacattaggacatccttatggaggacgtgcatctagctttccgccaaggaccatctggcagccagagcaaccgggtttcattgatacccactgtcatttagacttgctatattccaggctgcctttcaaaggcacctttaccaaattcagaaaaatttatagcaacaccttccccaaggagtttcagggctgcatttcttgcttctgcaatcctcaaaacctaagtgataacctgtgggaggatcagttgaaagatgatctggtttggggggtctttggctgtcgccctcattttgcccattattataacaactatcaagaaagaagtattttaaaagccttacgacaccccaaggctgtggcattcggcgaaatgggcttggattactccagtaagtgcaccacgcatatcccagagcagcagaaagtatttaagagactgctgcggctggccgtctctctaaagaagcccatgatgatccactgccgagaagccgatgaagacctactgcacatcttgaaaaattacgtgccctctgaccacaagatacatcgccattgcttcactgggagttactcagtcatcgagcccctgttgaaccactttcccaacctgtatgtgggcttcacggcaattctgacttactcttctgctgggcaagcccgagaaactgtgagaaagatcccgctagagagaattattgtagaaaccgatgctcccttcttcctccctcgctgggttcccaaaagctattgccagtatgcccacccaggcctggccctgcatactgtgcgagagattgccagaatcaaaggtgtgtcgctctcccacaccttgaccgtcttgcgggagaacacccatcgcctctaccatctttaaacagaaaaggcacagtcaggagtcttcccaagaaaggagaccggtagcctaacaaaacatacagactagatttgaactctgcgtatgtcctgggtcaaggatgtgtttgaagaattcgttggaacggagtaaactaggacaggatattttcctcaaaaccttttcgtaagacttctgtttctggctggtagggtggggtacaatgggatggcaggagggttaaggtaaactgcccttgatgttattaaggtttttcttcccagcaaaaatgccttaaggtagccagtaaagaagacagcttgatagaatacaaagagtttcccaatctaaatccctgtcctctgcagcctgcttttgatcgcttggtgaataaagtcaccctcctacttgtctttaaaaaaatgtagaattttaaaagtgaggtaggtgatttgtgtattatatttgtatattataggaattctatttaaaaaaatttaaaaatcggccgggcatggtggctcacgcctgtcattccagcactttgggaggccgaggcgagcggatcacttgagcccaggaattcaagaccagcctgggcaacatagtgaaacctcgtctctacaaaaaaaaaataaaaacaacaaaacaacagccgggtgtggtggcacacacctgtaattccagctacttgggaggctgaggtgggaggatcacttgaatccaggagtctcaggctgcagtgagctataatcacaccactgcactccagcctggcaacagagtgaaactcccatctctaaaaaaaaaaaaaaaaaaaaaaaaaaaagttttttaatgaaaaataggccgggcgcagtggctcacgcctgtaatcccagcactttgggaggccgaagtgagtggatcacttgagcccaggagtttgaaactagcctaggcaacatagtgaaacctcgtttctaaaaaaaaattttttaaataaaaaatgtaagtatacactcaacaaggtaagcaagatatacacacaatgagttttcctttcaaaaaaaatttttctatcaaaaaaattttttttaattttagatgagaaaactacttttccaacctgctcctctctccctgcatttctgtgtggcaaatgcaagtattatactctgcagtgtttctaacatgcaggagagaaccttgttgcaattcacctttatttctttaggaaggggagtgagcaatgtagttctgagtgtagtatatcaagagtggcctaaatcaaaaagcacaaccttcatttacttattccatgagtgaggtaaagaacagttcacttactcatgttactagtaaaatcttgcaatgcaaatgtgcaaaatttgggacacttagtaaatagtttgctacttaagtgatagatattccattgaacctcgaagaattattatttagcatttatttttctggcatttggtgtgtctactctcccatcctggaggcatcagagagctgtgaaagtagccagtaatctagaaattcaatttactcttagtggtccctgggccattagtccagagtcacagagcctctcaaggcccattaacaggctccctgaaccttggcagtcctttcagggcatgtcaacatttcgcttcacttaaattttagaaaggcagctatttctacctttaaagctcaaaagaaacaaactgcccactttgtcttgggagacagagggatttgctttttcagttggtttttattcatatctaacttcaaaattcatacctgcttattaaaaatttttgagacaagcaaaaaaataaacgtgattttttaaaaacccaaacaaaataaaagcaacagaaggaaaaatgcacatggtaaaattgattttttaaaaatcaatagaagagtcaaatatttacaaaatctggatatacaaaatttgacttaggaaaattgattttggtagaaatgtgatcatcaaaaaaaactcagattgtcaaaagccatgatggacagcattcatatagacaaaaattaatgaaccaaatgtttccagtaaaatttattgtagaaaaaaaatctattgaaaatatttcttaataggaaaatatggtaacagtttacccgcatggaaaaattgttcaaagaattaaagtagcttgtagtggggaaaaaagtaaaaagtaaaaattaaaaaaaaaaacacacaaagagggagtaaaatagcccataatgctacccacttagagacaatcactaacatttggagtagctctttggcagttttctctaatatttccatatattggccaattccagcattgtacttaagtcaattttgctaattaatactattcacttcatagttagcatagctatacattttactttctctgagtttatgatttaaatacattgttttctgtattttttgtttaggtttaattctgtttgttttaaatactcaactcagacggcatgtgctttttcaaaactattgtttactgatacaaaaaattgtgctttgaaatttatttttctttttgttctctgatgtctgttttattgtgtattttttaatgtcttaagctaaatgcttagtttatttttaatttggagagcaataacaaagcagtcaatactacaaatgtgtctgtaattataactctgctgtatacatagatttaatttgataaagtttacacactataaaaatacaaacgtattacaaaaatatggaaatagagagtagcaggaaaaagtatatggcatttctattacctagaaccccactgttgttgatgtctttccttgacatagttgtgaccatatagcctgttaaattgcatattcttctaaataattcatattttttttctatccctatcttggatttggggctcattttatgattgttattcttttatctttcaataaatactcaaaatgtttatgttatgttttgaattttatttatatttcacgacctattatatatgtttctttctactactcaccactaatcattttatttcatgacctccccatggttgaactgtttaatttgctttatctcttaattgactagcaattaagcaactttttcaggaaaagtatgtggatagcatattagtgataaattatataactgagatcttactgctgttttcactaatgataacaccttggctgagtttagattttctgagtcacattttcccctaaaagttatagacatggcttcattgtcttctggcatttagtattgctgagaattccaatgtcaactttgcctttgagggttaaattactttttctatcctgatgcttggtaatttccttgctttatccttgaaaatttgtcagggtagatctaattattgatctcttttttattttctctggtacagaataagtattttatctgccggtctacatctttcttttctttcttttttttttttttttttttttgagacagagactcactctgtcgccagggctggagtgcaatggcgcaatctcggctcactgcaacctccaccttccaggttcaagcgattctcctgcctcagcctcccgaatagctgggattacaggcacccaccactacacccagctaattttttgtattttttgtagagatggggtttcaccatgttggccaggctggtctcgaactcctgacctcgtgatccgcccgcctcggcctcccaaagtgctgggattacaggcgtgagcctcggcacccggcccggtctacgtctttctgtaatccagaaagttgcttttgtttgtattgttttcttatggtatgcttaatcaatttggttgcttttaatctagactttaattctttaggaacaattgtctgcatgttagagctcaatcctctgtccaacctgccatcatctcattgctctgttatctttttccattgcatttcaggagaatttctcaagtttaccttttccatcactcatcccattctccccagttttaatacttttctttactacatataatgcatttttagattcctcacatttcatccttcttcagcaatctccctttgactttttgcctgcagtctcattcaataatatttttaatttgcttttacttctcactttgtattatatacttccttacacaaagcacattgttatcaaaaatacttatttttttctgtagaaaacatacttttaaaataagtatttttcttcctctgcctcttgaatactatgttctccatttatgttgtagaatcttttcagaaaccttaagtttctttgttcattcctgaacaaagagcagtctatctaggctggtgttttccacaaaatagggtgggtgggtgggttttctttcactcccttcaccatctatcctaatgttcttagatacctcctctctggttaatataaattcatgtagagtggtcaagagaagtaggaagggagctggaaccatgggtagtccccagcaggaaaaacttctaattttccatataaacattttatgagttgacccaacctccactccaggaagagtggccagtcctttgtatgccgttgcctgttccatcagagaaaagcccgaatgcagggcctgctttgacttcagtgtgactatatttctgggtctcctagtgacactcttaagccatcaatagttgtgaaagtaaaccatgtggaaacccctacaggttgtcctaacccccaactcgattcttgtcactttctcgggaagtgaaattgcaagttcgtttgggtatattctttcagtatcatcccatctgcactatatcaggtggaaactcttcaaagtttgcaacatgaaggtggaacacctccctggcctccagcatgaatttagtttctccacattttaaaattttgcagtgatttcaattgggattgtggaggtgggggtacatctaaataccaatgctcaagttataatctcactccaaattcttatttttttcctctcacttcattttttgataaatttatgttcctatggatactgtgtttatataggcgtatcttattttaagaaaactcaagttatacaaacctgaatctcatttagcatgttgaacataagagatggtcaataaaggtaagttgcataaatgaataacaaaaaagataaattacagagggatgacttccaaagaatttttttgtattacaaaaatatcataaacctatttataatcgatactcaagttttcatgactaaatctatggtttaagataaaatgcacctgtatgggcaatataagcattcataaaatttagttttacttgtctgcataagacatgattttatgatgcatgaaaatggaaagggaagtggctagaatgctagaatgttcacgtagctttatcactaattaactacatcactggtacaaaccacttaagctctttgttcactgattaacctttcagcaaaaattagaaaatcaacacttgctaaccacagtgataaccacagcactatttaaagaattaagaaaattatgtatatataacagctttggagagaaaatgaatgtataaaaatactgaataatatataaatcagtgtaggatgcaaagctggaagcttgaaaatactgtcaaaaccatatctaaaatagtcttcacatccttatggagtctattgcgcaagcaattaaaaaacacttgatattactaagagaagagattccaaaccactgtttaaaatcagacttcctggaaaaatgatactaggactagaagaaagggggtcaccctatcctgcagaaatcacattgctaatcatggagttttataaactgaatcaagaaaactgacattcaatatgaaaaatacaaaagaaaaacacctaccatataaaaaattatatatatgtgtgtttttttgtgtgtatatatatacatatatgattgttcctttatcttttataatatttttcatttatcacatacacacacacacacagaaacacatatgtatgta

SEQ ID NO: 93565 - DNA, 12651 bp, Homo sapiens
agtaagtgtgtgtttaagagcacgtggaccaccagaagataaccatttttcttcagactagcagccagggcactgctcacgaagaaggaaaccctgggagggaagaacttggggaacgagaggacacaagaatctctgcagctgcttatgcatgtacgtaagtcacagaggtgttgggtgcctcaaggaacaacatggaagtcctctctcttttttaaaataaataattttttaataaattttcgagcactttgggaggccgaggcgggcgggtcacgaggtcgggagatcgagaccattctggctaacacggtgaaaccccgtctctactaaaaaatacaaaaaattagccgggcgcggtggcgggcgcctgtagtcccagctacttgggaggctgaggcaggagaatggcgtgaacctgggaggcggagcttgcagtgagccgagatcgcgccaccgcactccagcctgggcgacagagagagactccgtctcaaaaaaaaaaaaaaaaaaaggaatctgtcattacaaccttctctcacaaagaactccaggcgcagacagcatcaccacagcattctaccaaccatttacagggaaagtaatgcacgtccacaaaactcttccagaaagacaagggagcactcaccagctcctgaggccaacgtagcctcagtccctaacccagcaaggacagcagcggagaggagctcacaggccagcccccgccacacgtacacaccactgcgaggctccaaagctcaagcagcgtgtatccagcgaatacaacaagaataatgaaaaagcgttatctgatcaattgctagaggagcagaagtaactctggcaaacctcactgaatgtgaatcctgaaagtgccttgatctgcggttctacaagttatggtgctggaggtctcagccaatgctgtagggtaggacaaagaaagagctccagtgccagacaagaaaaagtaaaactctgattgattcacccatgaaacagtgtctgtgtttagaaaccccaaaagaatatatagacaaatcataaggatgaaaaagtgagtttgctccctctccctctccctctccctctccctctccctctccctctccctctccctctccctctccctccacggtctccttccacggtctccctctgatgccgagccaaagctggacggtactgctgccatctcggctcactgcaacctccctgcctgattctcctgcctcagcctgccgagggcctgcgattgcaggcgcgcgccaccacgcctgactggttttcgtacttttttggtggagacggggtttcactgtgttggccgggctggtctccagctcctaaccgcgagtgatccgccagccttggcctcccaaggtgccgggattgcagacggagtctggttcactcagtgctcaatggtgcccaggctggagtgcagtggcgtgatctcagctcgctacaacctccatctcccagccgcctgccttggcctcccaaagtgccgagattgcagcctctgcctggccgccaccccgtctgggaagtgaggagcgtctctgcctggccgcccatcgtctgggatacgaggagcctctctgcctggctgcccagtctggaaagtgaggagcgtctctgcccggccgccatcccatctaggaagcgaggagcgcctcttccccgccgccatcccatctaggaagtgaggagcgtctctgcccggccgcccatcgtctgagatgtggggagcacctctgccccgccgccctgtctgggatgtgaggagcgcctctgctgggccgcaaccctgtctgggaggtgaggagcgtctctgcccggccgccccgtctgagaagtgaggaaaccctctgcctggcaaccgccccgtctgagaagtgaggagcccctccgtccggcagccaccccgtctgggaagtgaggagcgtctccgcccggcagccaccccgtccgggagggaggtgggggggggtcagccccccgcccggccagccgccccgtccgggaggtgaggggctcctctgcccggccgcccctactgggaagtgaggagcccatctgcccggccagccgccccgtccgggagggaggtggggggggtcagccccccgcccggccagccgcccagtccgggaggtgaggggcgcctctgcccggccgcccctactgggaagtgaggagcccctctgcccggccagccgtcccgtccgggaggggggagggggggtcagccccctgcccggccagccgccccgtccgggagggaggtggtgggggtcagccccccgcccggccagccgccccgtccgggagggaggtggggggatcagccccccgcctggccagccgccccgtccgggaggtgaggggcgcctctgcccggccgcccctactgggaagtgaggagcccctctgcctggccagccgccccgtccgggaggggggagggggggtcagccccccgcccggccagccgccccgtccgggagggaggtgggggggtcagccccccgcccggccagccgccctgtccgggaggtgaggggcgcctctgcccggccgcccctactgggaagtgaggagcccctctgcccggccaggaccccgtctgggaggtgtgcccagcggctcattggggatgggccatgatgacaatggcggttttgtggaatagaaaggcgggaagggtggggaaaaaattgagaaatcggatggttgccgggtctgtgtggatagaagtagacatgggagacttttcattttgttctgtactaagaaaaattcttctgccttgggatcctgttgatctgtgaccttatccccaaccctgtgctctctgaaacatgtgctgtgtccactcagggttaaatggattaagggcggtgcaagatgtgctttgttaaacagatgcttgaaggcagcatgctcgttaagagtcatcaccactccctaatcttaagtacccagggacacaaacactgcggaaggctgcagggtcctctgcctaggaaaaccagagacctttgttcacttgtttatctgctgaccttccctccactattgtcctatgaccctgccaaatccccctctgcgagaaacacccaagaatgatcaattaaaaaaaataaataaataaataaaaaaattttcaactttacaaacaaatgtgataataattcatggaactcatgaatattctttatccaggtacattatttttttaaacttcccttatttatttatttatttatttatttaattatttagagatagattctcactccggttgcccaggctggggtgtagcagttggatcatggctcactgcagcctcaacttcctgggctccaaccatcctcccacctcagcctgcctggtagctggaactgaagacacacgccaccaagccaggctaattttttcatattttttgtagagatggggtttcaccatgttgcccaggctggtctcaaactccgggactcaagtgatccacctgcctcggtctcccaaagcactggaattgcaggcatgagccactgcgcccaggccccctatttattttttatcattttctctctctctctgtaaacacacacatgtatacatatccatatatctatattccgaagcatttgagagtatattgcatatgttgtgctcttttcctgcttaatatttcagtgtgcatctcctaagaagaaggatattttcttaaacaatcagggtacagttttacattcagtatatcaaatacatatatacagtgattctccctacccaaagtttcagttacccatggtcaacgacggtctgaaactattaaatggcaaattccagaaataaacaattcataatttaatgttgcatgctgttctgagtaatgtgatgaaatctctcaccgtctcactccatcctgcctgggatgtgaaccatccctttgtccagcgtgtccatgttgtagacaccacccacccattagctacttagtggccaatatcagatgcaccgtcacagtatctcagcgcctgtgttcacataacccttattttacctagtaatagccgcaaagtgcaagaatgatgatgctggcaattcagacacgtcaaaaagaacccgtaaagtgctccgtttgagtgaaaaggtgaaagtgtctcaacttaataaggaaaggggggaaaaacatgctgcaattggtaaaatctacagtaagaaagaatcttttatctgcaaattttgaacagtatattgttataattattctattttattagttgttgttaatatatattactaatttataaattaaacttatgtagatatgtatgtataggaagagaacagtacatatagggccttagacattcactggggtcttggaacatattccctgtggataagggggactgccataatactcttatctactacagagatcatacttttatcaattgcctcaataatgttcttcatagcaattttttttttttctggcagggaatgtgtctctttgttaaggggatgagactggcctagcaagacaaagatgcatgctcagctctccttaggatcttctttttttgagacagaatctcactccgtcacacaggctgtagtgcagtggcaccatcttggccttctcacgggttcaagcaattctcgtgtctcagcttccccagtggctgggactactggtgcgtggcaccatgccggctaatttttgtatttttagtagagatggggtttcaccatgttggccaggctgatcttgaactcctacctcaggtgatccacctgccttggcctcccaaagtgctgggattataggcagaagccaccaagcctggcctccttagaatctttatgagtaggggaacccccagcaggtcaattgtttgattttctttggtttcattcttattccatttcttccctgagagtataaacctaatcagcaagactactcagatgttaagagatctttaatagtagaaggaatctggcttaacaagatgtagctttagcaggggcctgagatgtaaagttggacatcttccctccagcctcagcttaggagtaagaatggactgtggtactttttctattcctttttatcttttgtggggaaggtgggtaacaagaagagtaatagatatttgaataagcaaaagcaaatttgggttaaaaataaagagatggtcttctgtggtaaatctagtcctatattgacaataaggctttctacaagaatttccctaaaggagagtgtgacactgtacacgcttgtcttctcaatcattctctggttatttggcacaaatttctgtttaagaatcaattgatgtcaggggcatggtggctcacacttgtaatcccagcactttggccaaagtgggatgattaattgaccgcaggagtttgagaccagcctgggcaacatagcgagactcgtctcaaaaaaaaaaaaaaaaaagagctgggcatggtagtgtgtgcctgtgatcccagctacttgggaggctgaagcagaaggatcacttgaccctgggagattgaggcttcagtgagctatgatggtgccactgtactccaatctgggtgacagagcaagatcctgtctcaaaaggaaaaaaaaaaaaaaaagaatcaattgatgtcaactttcctcactgatttcccatatgtaaattacctcagaactgcttcccttggtcatctccctactcttcaagagaagaaacatgaggaaacttccacattttattacacagcaacagggaatgtggtggggaggaacaagagaaatgggaatggaaagagaaatcgctgccttgaagagggtagagtaatgtgcagaagacacaggagaccccaaatacaatgctgtagggcttagtgagattacagtctctactagagccaattttgatctcaaagtcacgttcttccatttcccgcttcctctccaggcaaaatgaagctgaatctggtgcagatctttttcatgttgctgatgctgctgctgggcctggggatgggcctggggttgggacttcatatggctrcagcagtcttggaggakagtgatcaaccgctcaatgaattttggtccagtgactcacaggacaaagctgaggccactgaggagggagacggcacccaaaccacagaaacgctggtgcttagcaacaaagaagtggtgcaacctggctggccagaagatcccatcctcggtgaagatgaggttgggggtaacaagatgctcagagcctcagctctctttcagagcaacaaagactatcttaggcttgascagacagatagagaatgcaatgatatgatggcacacaagatgaaggagcccartcagagttgcatagcccagtatgcattcatccatgaggatctaaacacagtcaaagctgtctgtaacagtcctgtcattgcctgtgagctcaaggggggaaaatgtcacaaaagctcccgaccttttgatttgacattgtgcgagctgtcccaaccagaccaggtcactcctaactgcaattacctaacttctgttataaaaaagcacattattataacctgtaatgacatgaagcgccagttaccaactggacaatgaagcaactcatcatcttttttctcttcaccttctcctgttcctcttccttttttacttcttctttctcatatagttctcctgatcttaggtatcatgcagatggaattcttccttgccctatgggtcacccaacttgcattttgttcctaggattagagatggtaggataaggtgatgatgcctagtttctctaagctctctgcctctcctttcccttaccctggaaaggagtaagtgaagagctgctgtagtccgtactgtagtcctggccatccatttgtttcctgctctgctctgagtttgtctctggatgtggactggaagagtttagtgtatcctttacccatgttcttccctgctgcccaccctgagcctctacaacaatcacataagactcttgggttttgcacaactgcacttctctattgcggatgaagttaaagtgattctatctgtaatggcttctggaggaccatgtggaacaggcttccttttccgagcttggaaaaatttagggcctaggtatgggggtctgctggggaggtggtgtggtgctgtagagcaagatagaagatgggctggagcaagaatagaactcttttttcttgacccttcactgcccttttctctttcttcccaccttttactagcagcctccttgcttggcttcttgttttcatctcttacctttgcttttgtcctttgcttctttttctccttactttctctgttctccttttcctcttctttttctttttgggcccgctcttctctttatctggatccttttagagattcagtcagccgatactgatcacttatgctatgttggtcctatagtcagtcatgcaagcagatgttcgtcctatagtcagagtctggcacagggagttagaggggggtgggtcaagagaatgagaaaaagagagaggaaaagagagaaagagaaagagagagtgagaaatcttttttgaattatgtccagaagcagaatagtgctcatatgaggtgcccagtagatgtgggatgaatgggatgggagacagtctttttctcatttagcatcgtttccgctttattgctctaaagaacaagaaagttagtgaaagaataatttcagcagagaaggtatcaaacttaatcaaggagaagagaagctgtgtggctggatacacagaagatgcaagtggctgccctcagcctatttcctctaaattcaaatgagaaatagtgtagttagtcatgcatagggagaagaggaatctgagaacatagctgtaaggattcaccgtgtgactgaattttgagatttccttcccctagagtttttctctgcttcacattcctagactattatagacccaagtcagggacatacataaatgggagactgaagggaagaacggtttgctttactctgacctggcttgcattttcctgttctttctttctttattctctttatccttcctgttttcacagacaggcaaccactttagtatcctcctagacgtccctgattcaatatatcccttatacctctgactcacttccagcaataacctcttaggaacagtgttgtctcccagggaattctaataatagtggacaggaggtatgtctccatctgtgggctggcctgatgttttagaggtggtaatgaagtggtgaaaggtgatgacccagccaaggcagattcctatgcttcctgagggcgaatccctctccggggaaagagacaaaagattatctaaggtaagggggaaaaaatgagaaataggatgggaagaggggaaagaagaataggtgtcagagaaaatcggccacgttagcaatctgtctggtaggtaaaccaaggatttaggaatgaaatgtgaaagatctccattgtatggagtgaattattaagagaatggaattagccagggattaaagcctatattctctagtattcagatgtggctccatcctcttcagcttccgtccagcttctctccctaagcgttccggcactgtttgatgggcatactcatctcctccgggtcttcactttgggcaaatctcagtgggtcatgtttttcttttgttttgttttgttttgtttttgttttttttgtttaatctgaccacgtagactatcgcaggaaagcaatttacaaaatactccacaggcgcctagtggctcaagcaggaaaatatagcttccatggctgataacagggtgacaaggcattgtggggacctcacctcccaggggcagaaaattaactcactgtagctcaaattctgcctcattcacaagactttcaccgagtcttctaattccaatgtagcttcctctctacacttccaggatctgtgttgagcccatatgacagatcccagtcccttatctacagtacccaaatctctgaagctctgaaaatggaaagtttttttcaaagtggccccaaaactcatttagatatgacacctgactagattgacaatgtgaggctatttatcttgtttatttatgctatgtgaccattacatatttcactgtggaaatatcactgtgttttgttatgagtaggtccttctaagagtgtgttagtcatatatgatataaacatacacacattaacatacaatagtgctttttaaaatctgaaaatgttggccaaaatgcattggccccaaaagtttcaagtaagaaattgtgggatctatatatactatttaattagccttaattaatttgagtatactggatatgatcctagttaggccactagcacctttgtggaaggatctgtattataagtttcttctatattcttcattgacacatttattaatcaatgactatctacctatgggccaagggatgtctcctctactgtttggaagacactcaaatattgtcttcaaaacactctgtacaagtttttggccaggtgtggtggcttatgcctgtaatcctaacactttgggaggctgaggtgggaagaacactagagcccaggagttcaagaccagcctgggcaacgtagggagacctcatctctacaaaaaatagaaaaattagccaggcgtggtggcacatgcctgtaatcctagctatttgggttaggctaaggtgtgaggattgcatgagccccagagattaaggatgtagtgagctatgattgcaccactgcactccagcctaggtgacagagtgagaccctgtctcaaaaaaaaattttttttaagttgttctgagctttgctgcttattaacattactgtccaggaatggtggctcacgcctgtaatcccagtactttgggaggctgaggcaggtggatcacctgaggtcaagagttcaagactagcctggccaacatggcaaaaccccatctctaccaaaaatacaaaaattagcccggcatggtggtgcaagcctatagtcccaactacttgggaagctgagaaaggagaatcacttgaacctgggaggtggaggttgcagtgagccaagatcatgccattacactccagcctgggcgacagagcaagactctgtctcaaaacaagcaaacaaacaaacaacaacaacaaaacattaccttggggagtttaaaaattttttaattaaaaaaaagttacagggccctcttctagcaatattggtttaattagtctgagttggagcctagacatcaggtggggtccagcatcttggagcctaccagttttcctgtgaattaatgtttcaaaactgttaataaagatgttgaactgctcaggttattaactaatatgatgtggtgtgatgtaggagaaaagaaccaattcttgggataaatgtgagaatatctcagctctgccattcaaaaaaaaagcagctgtgactatgggaattgccctcagctctcagaatctgaggtttcttatcagtaaaatgagaaaatgatcatacctactttatagggtggcagtgaggattagatgagattgaacagcccatggtagggttcaatgaatggcagctgcatttggtggtgatgctgcagggctcactgcccacagagaacacataatattttgacggagtccttctggaagcagcactatgacacgaagtgcaataccatcagcacaggtttgagtttcaggtgtgttggcagtatgtggacatgtgggatcttataggatttttaaaatttcattccttggatggccacaaaatttatattctagggccagtagagtccttagacttgagcgagcagggccactgccctcaagggtccctttggagtgccttccatacaggaagttaccccactacagtatctgggactggctgaggccagcagtgccatgtgggtagggtgctctgagcttagactaggactggtgtgggcccgggtcccatttctcccctttggagcactgtctccccactgccatgtgtggggtcaactaggtgctgcaaaagagttctgggacttggtcaggcgtggtggcttatgcctgtaatcccaacactttgggaggccgaggcaggtggatcacctgaggtcagaagttcgagaccaggctggctaacatggtgaaaccctatctctactaaaaatacaaaaaaaaaaaaaaaaaaaaaaaaagctgggcatggtggcaggcacatgtaatcccagctacttgggaggctgaggcaggagatttgcttggacctgggagagggaggttacagtgagcagagattacaggcatgagccactgctcctagccccaatggggcatttcctgtcaatgttctctcttgcctccaactggtgggtgataacatgctttcttgggttggtcttaatctgtgcaagatgaaggataatcactccttgcatgaacaggatgcttttttcactctgcccacgggtctcttgctagtagcaatgtgtggaaggtaggaatgtggttagttgtaaaagaggtcacgttctaggaatgcagtaattacggcttaaagagttcaagagaaaatatgattggaagatatgttttatgtttatactacaaaactccaaatggcaaattctacatggcctgaaaattaattatcattctcattttctggcatattctggataagacttgcatttgtgatcatcaccaacaacataaagtaataaagtaacctttgagagagtcattggaagttggtatttaggccataaactggataattccctgtcatgagtaacactataactgacattaaatggcattaggaaactacagaggcaagaagatacaaattgtttcaatttaaataggtttcgaagagctgtagcagtgtgatacccttttttcttgtggttggagacatgaaatattcaagaatggtgcatttgacagtaaggagtgtgaagaaatgattcctagatctaacaggaagagatgatatctggacagtccgaagaatctccatatacattgatgggacaataaagaaatatatagtatctctttcttttctcattattctaaaacttcattgacaaatcatgatacttcacttgggctcataaattttgtaatatatttaaacatgaaactgtttatatagatagggccctcttcctcacccttaccccccaaaaaatttagccagggccacacacagtagaggcagctctggttgtggctgtatccaaggtaatgtctcatgtgttatgtccttattaggctctcgacaagaagtcatctcctcgccttcctcaagtgctcagtctaccaagcagggtagcctcagttggttcttttcaagcctctctttcccatgaaatgaagttacgttatccagcagagattcattgctggtggggtcaaaaggaactccagggcacagagtttctgtcattttcagcaatgctttgatttagcgtggaatttgttgatgttcctgcctccatttcctgtatcctacgcagagacctgcctttctctcctcttcacatttttgcaatgggc

SEQ ID NO: 93566 - DNA, 13973 bp, Homo sapiens
gcggggttccagcttcctatgtgcacagcagcacttcaccttcaaggtctgcagagaaagagctgccgcaggaacaataccttgctccccaaaccaggcagtttgagagagagagtgttttctccacagagtcccagctaccacctgggaaaaccacaaaacccaaataaggaactgtgtgcccagcccaggggtgtgtctggttatctgatggcccttcacagggaaagacaggctctacttgggcgttttaccgggaggggacacaaattctcctgcctgctctgaagggtaaatacacagcactcgggggcagagccactgtttccacaggcccaggaagtgagtgttggtgagtgtaggtgtgcagcgtggaatgactcaggctattctctggctgtaagaacaaagggctgggccagagagcccttgtaggcaagtggttcagggcctgggctttgagtcctgtctccactctgtaacagccatgtgaccctgaagatgtgttaatctctgtacctcagtctcctcatctggggaggcgatggggatgacaataacagtattgatctcagagctggtatgacggctgcattagagatgtaaaacgtagaacaggcgctggttctgtacacagtgcttgggttttggggaaatggcgtcagctactggcccgtcatattagaactggaaggaacctcttttcacagaacattcaccaagtttccccagccccaaagagaagttacttgtttagtgtcactcagcaaggttggggcactgcttgggttctgaatttgtaatttgtgccccacactggactgtgtccattatatacattatctttaaatcctcactgccactcaacatgacatacgttatgccctttaacaaatggagaaattggctgggtgcagtggctcaggcctgtaatcccagcactttggtaggctgaggcagacagatcacttgaggccaggagtttgagaccagtctggccaatatggcaaaaccctgtctctacttaaaaaaaaaaaaaacaaatagaaatggggaaattgaggttcactgaggtcaggcaacctgcccagggtcacacagtgtgtgtttgggcctggattcaaattaggtctctgggattcaaagcctatactttcccccatgtcctcagggcctttcctcacctccagcatcactgatcattggagtgtgacttgtgaacctggacaggagacatggggtccccgtcctggggagatccttcctgaggctcctgtgggaggcaaactggcagcaggcccagggtctctgtgtcagagcaagagggctgtaactggcctgggggtgggggcagggagacagcattttccacctatagcgggctaggggaggaaggcaaggcctggcaggcctgggtctgtcaggaagcatctaagtgagatcacactttaaacatgtgcgtgccaggcacaggcatgaacatatgcacatgtgcctgcagctgcgcacatctgtacacatccctggtggtgtgcacatacatgttggtgtgtattcagactcacgtgagacatcgttctgggcctgtgtgcaggtaaggcaatctcacccactcttctcaaacttctaccctcttcccgcccttaggttggggctggtcctttggcagctgagttctttctcttggaaggggttaaaggaaaatgtagcgctatggaactaagtttagcagaagttgctgacctggtgccctgcttcctggttagatttttttttttttttttttgagatgggagtttcgctcttatcgcccaggctggagtgcaatggcgcgatcttggctcactgcaacctccacctcccaggttcaagatattctcctgcctcagcctcccaagtagctgggattacaggtgcctgccaccacgcccggctaatttttttttttttttgtatttttagtacagaggggtttcaccacgttggctaggctggccttgaactcctgatctcaggtgatccacccgcctcagcctcacaaagtgctgggattacaggcgtgagccactgtgcctggcccctggttagattattgaaaggatctctagtggatgtcatgtcactgcatgtagacaatgatgccttaaagaaggaagaagggaaaaagggatgagctggtagctagtggggaacccagggtcaagagaggtcattttgaagatgagaattaatcaagctaactgtgtggggggggcgggcccagcacctaggagggataattgatggggccgagaactggggcggatggaccctgaggccttctgggtgcaagatggatacagatgtagataaaggtaaaaagagggccagaggtaagggagctttgcccaatgacttcattttttgccctggctaaaatgggaggaaatttacctggagtggaagggccaggtaatgaagggccaaatgaagactgagagtagagatcaggtggtctagataagagtgtcggccgggcgcggtggctcacgcctgtaatcccagcactttgggaggccgaggcgggcggatcacgaggtcaggagatcgagaccatcctggctaacacggtgaaaccccgtctctactaaaaatacaaaaaattagccgggcgtggtagcgggcgcctgtagtcccagctactcgggaggctgaggcaggagaatggcgtgaacccgggaggcggagcttgcagtgagccgagatcgcgccactgcactccagcctgggcgacagagcgagactccgtctcaaaaaaaaaaaaaaagagtgtcatggacaaggtcccctctctggaagggcaagagggtctgagctgtggagtagaggagacatcgtgggtatgaagctggcaggatggggtggaggactggaggtggcttactggagtccacagttgccaaggtggagcagttctcagtgacagccagggccagaggatcttcgttggcgggtggaggtttcagtaaggattgctgaaggccaggccaggggctggtgagagggagcctggcccaaaagtctgggcaatgagggacatcactgacagctttaggagcataggggctggcggtggggaagatgtgtgtggacaagtccagatctgagtcttcttcatttactgtgtctgtgcccttagtgggtaggatgtcactctttttccccagcttgtccagtttaatatgttcagggtaaatgctatcatcaaggtcaaatctctctttccatattaagtaaggaaacaaagcacagaatagtaaatagaaaaaaaaaaacagatttgtggtctggatagtaacacaatacttgcatttgtgtaacttttgtttgtttgtttgttttgagatggagtctcactcttgtcgcccaggctggagtgcagtggtgccacctcggatcactgtaacctccgccacccgggttcaagtggttctcctgcctcagcatcctgagtagctgggatgacaggcacccgccactacgcccggctaatttttgtatttttagtacagacggtgtttcaccatgttggccaagctggtcttgaatttctgacctcaggtgatccaccagcctctgcctcctaaagtgttgggattacaggcatgagccactgagcctggccaataactttgatgttacctcctaagactctgcagccagaaccatttgtgatttctgatgttccaggaaattaccctctttcacaccaggtaatgcctctgatctttggagatcctgctcggcaagagctggagggctgcatatctgcccccaaggacctcgcactcagctgttactctgctctccctcctgcccagtggccagcatcacctctcaaatgggggcaggacaacctcaagaactcaacataccttcctttttaagctacacttttatggctcatgccttccctagggcagtggggatgagagtaaatagctttattttcaaatgtcttctcccactgatgtcaggtcacagtcacctgaagtagagagcatcaacaggggtggggtgctgtcaacaagctgctgctaggaaggccagctgtggagaactgagaagccaccgggttatcttcagcttcctcttcgactatatacacccactttcaaagctctggtgacccaacatttcttggtgttctctatggactcgaagtatatggatggttatgtaggttgtccacaagcctttccaacagggcacaattcacaattccagtgcagcagacaccagatttatgagctttccagaaggtggcagtaaagtcccttgaggaagggaatacggtacgtgagctagcgcagccctggctttctgaaggcactgtgccctgcacctttgaaggtgttgttcttgtgatctgggatgccctgctcactttagcctgtctggtcgacttgatccctcacttttcatggtccagcaaaggcaccacctccttgggaagttgccctgagccccagtgcccttggcacatacctgttttctcacttcacagaggccattgtctacctgtcttctccacccgactgacccatcctattcacctttcaatctttccccatgcctagcaaaacacttggaatgtgctccataaaaatccgttgaagaaagaatactgaacctatgagaatacgtgaacctgttaacttgtcttatcaaaagtttagctttgagaaatcatcatcggcatcgactgttgctgggtgtgccatgggcctcttagtctttgagatattttatcaggctggcccacaggagccctgtgcctgggtagaaccattccccaagccccagatccccttaccagagtgtttggctcacgctgggaggtgctaagggggtgtcaggaacagccaaggaacatctccgctgtgtttacagcatggatggcaagaaggacgttgtttattacatctcacaggtctgcttcctgaggaccacgaaaaaaagttctatgatctctaagacaggaacatttttgctttgagtaatggtgtttttttactttgcagtgagtctgatgacctctccctatttggctactgggaagctcagagacaaatttgtggtccacatcctatgatgtgcattgttgtatattaactttccgcggtcttctccagcatatgacctatttattctacatatttttgtattgtggtgagacctattgggaataaagcaggtggcagcacctgccccaggcatacagccattacatgcagctgggtctggaatccaggtgctctgacttcatcaggtagaagccaaaaccaagtgggaaggaaatgaatgctctgggtcagccactgaggtttcccatggataaggcagtcccatacacgccagcatctctgacctcaggcccacacggggccttggaatctcagaatctcaggaagggctgaggtgaacagagcatttaggaataacaaacttctgggtcactaggccagggactctgggcaggcctcatacaactctttacataaccctggtgcctctgtagtggccagcacacggtaggtgacaaacatctcttactgagcgagcttcacttgagtttgactattccgagggctgggatgtcccgcccattgtccgatccttcatagaaagtaaggatcacgtgtcctgcaaaggacatggctggagtggccaggacaaaaataataaccattgcctacaaggtgaagttagggccaaccacatcatttccagacccctttgggcgctgaggaaaatattttcagacaactttaatcctgggacataagaagtgtatttggtgcctggagggagggccccaagagagtggggcggtaggtggtggatgccggaagcccagcctgtccaagccgcagtctaggcggactggcctatggctagcagtggcccactgggtcctcggtggctagacctcaccagacctcctgtctcttgcccgcagytctgttgaagatgcactggacaccagaacacgcccagcccctcaaccagtggccagagcagcacctggacgtctcctccaccaccccgtcgccggcccacaagttggagttgccccctgggggtcgccaacgctgccactacgcttgggcacacgacgacatctcagccctcactgcctccaacctcctaaagcgctatgcagagaagtactctggggtcttggattctccctacgagcgtccggccctgggcgggtacagcgacgcctccttcctcaacggcgccaaaggggatcccgagccctggccagggccggagccaccctaccccttggcctcactccacgaaggcctcccaggaaccaaatcgggcggtggcggcggttccggggccctggggggctccccagttttagccgggaacctccctgaacccctctacgccggcaatgcgtgcgggggcccatcggcggcgcccgagtacgcggccggctacggcggggggtacctggcgccgggttactgcgcgcagacgggcgccgcgctgcccccgccgcccccggccgcgctcctgcagcccccaccgcctccggggtacgggccctcagcgccgctgtacaactatcccgcagggggctacgcagcgcagcccggmtatggcgcgctcccgccgcccccaggcccacccccggccccctacctgaccccgggcctgcccgcgcccacgcccctgcccgcgccggcaccgcccaccgcmtatggcttccccacggccgcgccgggtgccgaatccgggctgtcgctgaagcgcaaggccgccgacgaggggcccgagggccgctaccgcaagtacgcgtacgagcccgccaaggcccccgtggctgacggagcctcctaccccgccgcggacaacggcgaatgtcggggcaacgggttccgggccaagccgccaggagccgcggaggaggcgtcgggcaagtacggtggcggcgtccccctcaaggtcctgggctcccccgtctacggcccgcaactggagccctttgaaaagttcccggagcgggccccggctcctcgtggggggttcgccgtgccgtcgggggagmctcccaaaggcgtggaccctggggccctggagctggtgacgagcaagatggtggactgcgggcccccggtgcagtgggcggatgtggcgggccagggcgcgctcaaggcggcgctggaggaggagctggtgtggcccctgctcaggccgcccgcctacccgggcagcctgcgcccgccgcggaccgtcctgctctttgggccgcggggcgcgggcaaagcgctgctgggccgctgcctcgccacgcagctgggcgccacgctgttgcgcctgcgcggcgcgaccctggctgcgcccggcgccgccgagggcgcgcgcctcctccaggccgccttcgcggccgcgcgctgccgcccaccctccgtactcctcatcagcgagctagaggcgctgctccccgcccgggacgacggcgcggcggcagggggcgcgctgcaggtgccgctcctggcctgcctggacgggggctgcggcgcgggggctgacggcgtgctggttgtgggcaccacctcgcggcccgcggctctggacgaggcgacccgccggcgcttctctctccgcttctacgtggcgctgcccgacagcccggcccgcgggcagatcctgcagcgggcgctggcccagcagggctgcgcgctcagtgagcgggaactggcggcgctggtgcagggcacgcagggcttctctgggggcgagctggggcagctgtgccagcaggcggcggccggggcgggcctcccggggctgcagcgccccctctcctacaaggacctggaggcggcgctggccaaggtgggccctagggcctctgccaaggaactggactcgttcgtggagtgggacaaaatgtacggctccggacactgacggcgcgcgggggaggccgcgggagccgcagtccctccgtccccgccgcctccgcgtgggagggatgtcactgactaaacccggctggcaggggctggagtggtgaatgtgggatcggggacaggaggggtctgccggtggatattttttttttcgtgggaaggaaaatgcttctgccaggcagatgccatatgcgccgtgtactcaggtttttcctatttattgtggactggaagctcgccatctccgcccggcagaccgggcagatccggcatgggctggcacccggggccttaagaactcctgctctcttgccacaacgcttttgtctcctcgctatctgaatggcaccctccttctccctcactctctccatcccattctctgcattctcttggttttctctcccttttgctttgtcgctgacacccctgcccaccccatgctggccctgtttctctcctgcccctccctccccagctctccatccctcaccctctgtgcttctgtctccatccctggctctccagcgtccctggccttttggtccctgagctttaatgcctttccctgccttctgttcttatttggactgcagtggccctttgcaggagctctggaggcccaggggctgaggaggagggttacccctctacccatctgaaacctagggtctagggggatcaaggaaaaaaagtccccaaagaaggggaattttttgtttgtttttgaggggagatcccagaaatgtagcttgtttcatattttagtcttcttatttttgtaaaatgtgtagaatttgctgtttttctttttcttttgacaactcaggaagaaactgacctcagaaagaatgttagactttggctgctctcctgtgtgcccctcacacctgccccctcccccccactccatccaggggaccaaattctcccagacactcaaaaaatgagacttacggggaaggggagaggaagacccagaggcctcagtgaaaccccagctattcctggtcagaagcagaatgtattcctaagggcttcctccccagggccgaggcctaggcatgaatgtggggagtgggctgtggggtttgagagaagggaggccttattcctctcctgctgctccccaccccctgccccacccaacccctccgctgagtgttttctgtgaagggctatccagagttaggatgcccttgcccaattccttcctgagacccagaaggtagggtgggagggcccaaatgggaaggtgacctaagcagaaagtctccagaaaggtcatgtcccctggccctgccttggcagaggtccccagtgacttatgctaggaggattccatctgggtagacagtctggccacaaaatcagctactggacctcagccatctctgctggaggctctgaggaggagtgagcatccctcacttgtgggggctctgtgaggaaatgtgccttccccattcccccggagtcctaggtctggagctccagggctgggagagggtgagggagatgggcaggggtgttttctctgaccttgggggcttagtctcagtcctgcctgaactttccactaggcttggaacccttccaagaaccatatttctctccttcccaccaattttcccttgatgaggctttagcagtttgctcccaccacccccagcccatttcacaactctgatcttagtccaaagcaggggacacgcccccccaccaccactttttctctctcccacctcagcctcctgtgcagttccttgcctgcccgtgcatttcctagagtctactgcctccccgctggctgggagggtgtctgggggggatctttcaggggccctggcacccagggcctgtgctggcctaggagtgctgaccagaaggctgctctgttcccccccacccccgttgctttctggccccctctttggagccagccrcccacagggctttggtgcctcagaagcagtgggctgccgggtcacagccgcaggctgcaaaagaccctcggagggagcatggagtgaggggttctctctcaggtgtgtatgtattggggggtgggggtgggtggagggtgtcagggaagttggggtgggatcccagccttcccttcaagaggcagggagctctgggaggtggagtccccaccgctttctctactaggctcctcctgttccccaggcttggggagctttgcacaaggagactgcccccagcctagtggcacctacctcatgggctctggggcaggtaggggaagggccagtccagctctggtaatgytggggggaggcataccaaagaatccaggggcagggagtggggagggtgacttccgagctggcctctccccttcctctacccagactggggctgggatcctctcctcccgctgtaaccatttctacctcattttgctgcgtgttgtacatggacgtatttatctcctgtctgacgatgctctgcagttgtggtctgtctacctcagaagagactgtattttaaaagaaagtattacacagtattaaagcgatgacatgtggtttgcagaagatttctcgggggcagtgggatgtgggagtcctctgggagatgtctggacacctgtgtatgctggtgccctgggcggggtgttcctaatcccctagtaacaaggagcaaggactcctgtgactcactgtgatacagtgagtacctacaggaatgggcactgaggctatggggaagaagccatgggtaaggggccttcctgccgttctgagctctgacattcagcactggggcaggctcattgtatccccagagccacaaaataggggggcaaggaagggctcacatgtttgttgaatgagtgaagaaatgaatgcatggaggaagggggttgctgaagagagggaggagccatccagaacctgcagcagccttcattgaatagagctagggttatacttgtattccattctcagtggagataaagtggatagagggcggggtgtggagacggccaagttccaatgtctcaggtgacgtggtgtcctttgtctaccatccccccatccatcagtcccctaactctatctgtgacagctcatcgtaaactgggagactgaacaacctaggaacacttgctgaacaagctctgtagagatgtcagtgagagatttggacccacagctcctaggtccttgaatactctaggcaagattgctgagcatgcgcaagagcacaggggagtagtgcacccaggctccctgctatggctcactgcacacatacaggaggcagcgtgagcatcagggagaccctgcaaagcaaagaggacacaaatgtgagtgtgcctggaggtgggggctctaaggcactgccccagagtccattaccacaagcctctcagcccttggaggtccagacccacctgcccccactcctctattttgcaccttactgtgtgcagacattgggcctggcactgaggatacagaaggggtcaagcacagctgctattcctggagcccatgtctaggtgggaaaagctcagaaattgatcatttaaaaatacaactggataaagctgctggggatgggggaccacatcaaagtagtctttatattcatacacctagtgcaattatctggtacatacaagacattgaatacatgtttcttgaataaatcctctaatttccagatgagtgccctggtggaggatgcacaggttatcttaagaatgccaagaaatggctgggggcgcggtggctcacgtctgtaatcccagcactttgggaggccaaggtggacggatcacttgaggtcaggagtttgagaccagcctggtcaacatggtgaaacctagtctctactaaaaatacaaaaattagctgggcatggtggtgcacacctgtagtccaagctacttgggaggttgaggcacgagaatcacttggacctgggagacagaggttgcagtgagccgagatcatgccgctgcactccaacttgggtgacagagggagattctgatacaaaacaaaacaaaacaaacaaacaatgcccagaaaagatcctgacttgtggtggtcttggtggggtgtcaggaaaacttcctacccaggaggggagggggatagctgggcmaagtatggaggctggaaactgcatcttacgtgctgtgccacgagtcttgttgtgttacaagatagtgagggcaggaattggaggagtgaggctggaggagtcagyggggacctcactatggagggccttccatgccctgctaggagctggggctctatgatgaagcctttgtgggagtttagggggccgaggacaggactgatttgcaagttaagaattcacacaatggccctgccttgtggctcatgcctgtaatccttgcgctttgggaggctgaggcaggaggatcccttgagcccaggagttccgagaccagcctgggcagcagcaggagaccctgtctcttaaaaaaacaaaaaattcacacattgactcaacaaatctttactgaacacttattatgctctagttgccatggggacaatgtatggaccttgcagtctagttggcggagacagtaaaaaggccgagctgcagtgtgctgtggggcagataggaggagtccctaatggggacaccactaaggggtgtgactcggagtcagggagggcttcccaaaggcgcctgacagcaggaggagtgcaggccgcgatcagaaggagagccagagccaagcttccttgggggaaatggaataagtgcaggtaggcagggccccagtgttggggggcaaggatgggggctggaggaccagcaagagaggaggagggtctggacttgcactggagtgggagaatgggatgatggattcatttaataaatactaaactttagtatttggtagacaagaggagaatttaggaattgaggccaggcatggtggctcattcctgtcatcacagcactttgggaggtggtggcagaggcggaggctggagctggagaccagcctgcgcaacacagcaagacccctatctgcacaaaagaaaataaaaaaagagaatgtaggaattgattgaatatcgaagttaatggagagcaaggggtctagggcttttcgtaaaggggaacggttggggagtacatgaattagaagagatgttggtaacttgttcagtttgaggtattagtggctattaggaggcctagggcaggagctacaatgtaaaagcccagaatcctagcctcctggggggctgagaacccccttcctgggtgttgcaagccctcttacccctgttcctgagtttcgtgagaccctccaacaagtgccatgtcggagtccccgtctccgtcgctgggtgttggcagcccccttgtccccagtcccctcctccactaggcttcccgactgttcggagcctcctccctcccacaatccgcgggcgttcggaacccctcccccatcaccggcgcggagcccgtccacgtccccgtccccgcacagtcctcggtccctggttcccgccagggatggcggcgcggactctggcgagcgccttggtcctggcgctctgggtttgggcgctggctccggcgggggccgtggacgctatgggccctcacgcagccgtccgtctggccgagctgctgaccccggaggagtgcggccatttccggtcgctcctggaggcgcccgagcccgacgtggaggccgagttgtcccggctttctgaagaccggctggcgcggcctgagccgctcaacaccacgtcggggtctccgagccggcggcggcggcgagaggcggccgaggacccggcgggcagggtagccgggcctggagaggtgtccgacggctgccgggaggcgctggcggcctggctggccccccaggccgcgtccctgtcctgggaccgcctggctcgggccctgcggcgcagcggccgcccggacgtggccagggagctgggc

SEQ ID NO: 93567 - DNA, 14268 bp, Homo sapiens
ataataccattattgtccacatatcacagctgagtgagtatgatgtgcttaagcaacttaaccaagattagaataaataagtgatgatgtaagcaatgctgccagtggtcttattctacaggctggaattttcaccgtgaaacaaaattcttgaaccttctttatgttccttcagtccctttctatcccaacaatctatcaatggctccaaataaaatactatattatgcaaaatagtatccaatcctataagacatcattataagtgaaacatcaatcgaaaagtgaggatgtctggaatggttaggtcattttaaagttctgttaatctctaaaatcaaagagtctaattttggagaatttagactgtgaaattgtgaaaaagagagttgaaaaggtttcatcaccttatagaaaatggatcctcctttttagcattgaaccacaatgctttgtacatagttcatcttttattgactaaatttaaaatttgacagcccctctgttacattcagcttataaaatcttctaattttggtcctctaaagatggaacaaaattaggtaaaaatgatacgtaatttcagtgcttcttcctcacttttttccctttctgttacttgtagattttatgccatattttaaagccaagaatgatcggggaatgggctgaagaaatttccagatcaaatgagttagtactagtaatactagataatgctgtgttggcctcttggcttatgaggatgagtagacaaggctgcattagtctcctcaaacatttcatttggtcatcactcccattgaagaatgataataagtagatattgcacagggccagtttgcagtgccaggaggtgtacaatccttctctcagaaggttcttcactgcatagacctgtatttttagccaatgaattttctactttctactggaaattttgaatgctctgtatgttagttctgccatttccaacccaagagatgataaatctgttgcatcagaaagaagaggctgtaaagtattataattactttacagtatttaccccagtagtgattgtttttcagagaaacccttgctaatattatattaatttttttaatgttaaaaaataatgaaaggttcagaggtgcaatagctcaaagaaatgtaataggtgtagtaatgttgtcatgcaggcctgtgtgagtgctatgcatctgttttagagcaggcaaacctgccatgcctgcaggtgtttgcctcaggtccctgcccttaggaagtctgagaaaacctacaaatgaaggcagagcccctagcagccaaaattaccctatgggaacattgtaaaagggagtaactattttagacctgatgaactgttgaatagtacacgtatataaggagtgggttgggtagtgagtgcctcacattgatatttctatgaatatatgctaaaaacagattctagaagacctaaccttttatttccaattttcctctcattttgaaagttgcttttatacccttcatttttctatattactgtttaaaattttatagctgtggcagaacttcagaggatgctatagttgttttgtttcgaaactagttaaagagcaaaatggaaaaagtaaagcaacaaggcagtaactggttagtaattaaacctaagttatcaaatggtcagtaatggtaagaatggcaaatgttatccgtactatccagttatataggaaatatggatttgttcatttatatatcatggagtcatcccataacaataaaataagaacaatgctcagatgttttactctagtacctgtcattcctatgtaacacttaaattatcttaaaagcaattttctattagattgtgtattttcaaaaaacacgttgcatgatgaaatttgccagctgtattaagatttttctgatcctttcaaaagtaaaaattgatgttttgcaacaattcttcaattatctttaaaaactatttttcttactttccactgttttctgaatttttactgtacctatttaaactatttccaaacaacagtaggagttattgttctaaagtcatgcttctaataatgttaaaatagtattgtttctgagatccatctccatgttctgaagagaaaccatataaaagctgtttttaaaactcaacccattatttgagtgccaagttaagtgacacaggtgtattgcttctgactcgcacataattgcaatacagtcaaacaaagcaggatgtttttgttgttcagaaaacatttggctctgtggttttgttccatttcatatcagaaatagcaccaccaataaacacaataacaataacaacaaaaaaataaatttggttaccaatttccagttagtgttaaaattcaaggaaccaaccaaaaggctctgtacttcgaaggccaagacaatctcctgaacactgatttcctcagctcctgctaatatcaagaattagtttgtggttagattagcttatgcttttaaataacattaatgattttaaagcactggataaattctcgtttcaggggatatgaacaagtccattgccttgtatttaaacaaaatacaattttgccttttgcagctctgcaaaggttattgttatttactatgcatcaataaataatctttcaattatcttgtaagcacatccaaaaatagcatgacaatcaaaaggcaatggtgtatccagtaattgttccaaatagataattttgataaatatgatctttgcttaatttcaggtaaaaaagaaatcttacgaaatttagttttgctagacttaaaccatgcaaaaataccctatgaaatggacactctatttaaactgtatactactgtcttttacagtgattataacttattaaaatcattttttcatctcttgtatgaataatatatttacaagaaaacattacttaagctaatacaggtggggggttcccacctcctgtgtttttttaaaaaaataagcagtttcatttgagttaaaaagtatatttctttataatatttgttatgtatgtttattaacttatgctaacaatggcttagctcagcaaactgaaaggaagccgtcctttaacttatgtgtgcgtacgtatgtgtgtgtgttgtgctaaattccattgcctgtacttctaaattatttgttgagccctttaagactttttttttcacgtttttctgtatcaaactaatcacatttatactcacagcatatgtgtgttcttattttctctactctgtattttgataatattttaaagaaaagaaccataatagaaattccctagaaataatttacagkactaatkamtttgtaggtctcttagacagttctacattacagtcacattaatattctctcctttttataaggcttgaagtaaatcccacgacactagaagcatttagatactgattacttgcgattggttcctggtgatttgctcttaataatttccagttgaatttaatgaaagtatgattcctgaaatgctgcttcattaaaattgcagcttttcccctttaagtgtggtttcggwcatttcacccattttgcggtgtgttttcctcccccttaaaaagtaatgattgagaaagcagaaataattaagaataccactttagttctccctggaactcatcctcagagtttctctgagtgaaatgatgcaagctgcatttcatcaggattttataatactattttcccattcaatgagattatttaataatatataaagttttaaaacataaatatgaattttgggggtagttgagggaaattgaagaaagaatctgttgcatgtacaagagaactgaggtctttagaatttttactaatatgtatatacatatatttaggttgattaagttacactgtgcagcattcagacttaatttaactgagttgtgatttgcaaatgaatatctacatggatcctttttaaaaatcaaaatgcaaatgagtacaattgcagtaaaatatatttgcaaatgaatcctgttgctttattcatttattgtgtaattactgcaatccttcccaccttgttttcagtatttcttaatcattaagtcggaagcatgacagcagtgccagccctggcatgattctctttgactaaaaccttgtaaattaacacaattagcacagcatcatcctgctaattaacttccagtgtctggtgcagtggttttgcaaacaaggaagagggagtcagaagggaatcaacatgccattctrttaccaaactgtgtgttatgttcagtttatcgcagtaagtcagagccggccatgtcagaagccagagtcaggcaatgaagagccacagagcttggaggaagagcacagaagggggtagaaactgacaaaatagactgtagtaattcagaagggggttgatgccacagatgcttcatgtagaccaggcctcctccttatcaaggcatctctgccagagggcacaagacagtttgcaaaattcactttgggtaatacaaaaaagatgaaggagagatgcttaatatagctgtaccagaataggaagtgttaaaccaagcagagattagactgagatgagccagcaatgggaaaaaggagaacagggtaccagtcctcttctgtaactaactgtatgtgagacctcgagggtacattataaatcgctttgggccctggtttcctaatctgtgaaataaagtaatttctaaagtctctttacaatttaaaattcaaattattctgactgcttagtatttttttcttaaatgagaaaatgctcattttgtagtttgctacatagtcaactttgcttcacttagtaacccagcagatgatagaattacccagaccatctcattatctacttgtactcctctagcgtatgccctacgtggtttcctatagaaattgaaagagttagaatccagaatctctctccattcttatcttccctttcccctcagtttcctttctctctctctctctctctttctctctcatatataatatatatatatatatatatgaagatgtataagacaggatgtgtataaatacacacacacacacacacacacacacattctcccctcttagtaccttgcaggctgtaaggggaggagggattataagagaaggagggagaacgctagaagaccgacagacaagtgatgcttgttttttttttcagagactcaacaacagaactgagaggcagaaaggagccagttgtaattcataccgagttgtaggctttgtgcgatgaaagcgatggagcgctgcctgggagattgctttgctgcactccacgaagcagatttgaaactgtcgtggaccactttagatgagagttggattatggaatgacctgctatgtctgtgtcatattgttctgcgcagggagcattatactgtgctaactaggtgttcagtaccaaataagagaggtatcctagatktgatctgtcagctgtgtctcatttttatattgcttaaaatgtaaaacaaactgtgatgtgaacagacagaatagctagatattgtacatgttaatactgccatgtgcaagatatttaaaatgtctgcttattttaagaacctatgattgaattctaatttgacaggaatgtgtgtgtacatatatatgtgattgtgtatgtgcgtatagtaggtaagctgatgggcttgacagaaatagatttacttattccttacaaatgcaaaaaatataggtaactacagagttatattttaaactcagtgtgctttttaaacagggctgaagtttagtccattttaaagagtacttattatagggatcataataggtattataaacagtgtagatcttttaaagtatgcatatcattaatggaaaataataggtaacaaaagaaattgggggaaaagctttaagagttctgaygcctatttaagtaaattaactctttycccccmaaaattcttaggcttgaagatgcagtggacgccagagcatgcccagtggccagaacagcactttgacatcacctcaaccactcggtctcctgcccacaaagttgaagcctacagaggtcatctgcagcgcacctatcagtacgcctgggcgaatgatgacatatctgctctgactgcatccaacctactaaaaaaatatgcagagaagtattccggcattttggaaggtcctgtggaccgacccgtactcagcaactattcggacacaccatyaggactagtgaacggtcggaaaaatgaaagtgaaccctggcagccttccttgaattcagaagctgtttatcccatgaactgtgttccggatgttatcactgccagcaaagctggagtcagttcagccctccctccagcagatgtctctgcgagtataggaagctctcctggggtagccagcaacctgacagaacctagttattcaagtagtacctgtggaagccacactgtacccagtcttcatgcagggctcccatctcaggaatatgccccaggatacaacggatcatatttgcattctacttatagtagccagccagcacctgcacttccttcacctcatccgtctcctttgcatagctctgggctactacagcccccaccaccacctcctccgccaccagccttggtcccaggctacaatgggacttctaacctctccagttacagctatccgtctgctagctatcctcctcagactgctgtggggtctgggtacagccctgggggggcaccgcctccgccttcagcgtacctgccttcaggaattcctgctcccacccccctwccccccaccactgttcctggctacacctaccagggccatggtttgacacctattgcaccgtcggctctgacaaacagttcagcaagttctctcaaaaggaaagctttctacatggcagggcaaggagatatggactccagttatggaaattacagctatggccaacagagatctacacagagtcctatgtacagaatgcccgacaacagcatttcaaacacaaatcgggggaatggctttgacagaagtgctgaaacatcatccttagcatttaagccaacgaagcagctaatgtcctctgaacagcaaaggaaattcagcagccagtccagtagggctctgacccctccttcctacagtactgctaaaaattcattgggatcaagatccagtgaatcctttgggaagtacacatcgccagtaatgagtgagcatggggacgagcacaggcagctcctctctcacccaatgcaaggccctggactcygtgcagctacctcatccaaccactctgtggacgagcaactgaagaatactgacacgcacctcatcgacctggtaaccaatgagattatcacccaaggacctccagtggactggaatgacattgctggtctcgacctggtgaaggctgtcattaaagaggaggttttatggccagtgttgaggtcagacgcgttcagtggactgacggccttacctcggagcatccttttatttggacctcgggggacaggcaaaacattattgggcagatgcatcgctagtcagctgggggccacatttttcaaaattgccggttctggactagtcgccaagtggttaggagaagcagagaraattatccatgcctcttttcttgtggccaggtgtcgccagccctcggtgatttttgttagtgacattgacatgcttctctcctctcaagtgaatgaggaacatagtccagtcagtcggatgagaacsgaatttctgatgcaactggacactgtactaacttcggctgaggaccaaatcgtagtaatttgtgccaccagtaaaccagaagaaatagatgaatcccttcggaggtacttcatgaaacgacttttaatcccacttcctgacagcacagcgaggcaccagataatagtacaactgctctcacagcacaattactgtctcaatgacaaggagtttgcactgctcgtccagcgcacagaaggcttttctggactagatgtggctcatttgtgtcaggaagcagtggtgggccccctccatgccatgccagccacagacctttcagccattatgcccagccagttgaggccygttacatatcaagactttgaaaatgctttctgcaagattcagcctagcatatctcaaaaggagcttgatatgtatgttgaatggaacaaaatgtttggttgcagtcagtgataacttctttagaaaaaaaaatgtaatgaatgttggcacacacacataaaacctgctacatagggaatagagcccctttccagtagagtttaaattgcaaagggtactggggaagatgacgattaagttgcatctttagagtcagggtagatttggaggaaaagtgcatcaaatgagagcttctgatttgaaagccccagatgacagaaagcatatgtggatgctcagttctgttcaagctagacaacactcaccaaggagcaaggtgcaagtgtgttgatttcagaaggacatgaacctcgtgtgttgattccattctgctgttctcgagatttagttgctgtcaagtgcctggagtggtgctttattttttgtttgcctcacaattacattggtggcatgtgctaatataaagagctttaacttcaaacattattggactaaagagatgaacagttgtgttatgacagaaaaccagatttttgccattttaagagcaacagtattcctcaatcctgtctgttctgcagtattaagctaagaacaggtaaaacagggtaacggtaatctggaccttaatttctgcagttcatttcttttaatgttcttgtctgcaaaaactcaggaaagtgattgtgatttgtacagtacctcaaaggaatgtgttgaaagcactatgtactgctgagagtaataggataggcttcaatgttactttatattaaaatgtatgtttacctcaacaattggaaaatagcaaggaaaattactttgaatgtatccagaaaaatactgaagtgtgatacaactgaatatttacagtttaaagtagaaatggaaggatttttttaagttcttttactaattatggggaattaaccagagcagaataattctttatgtcaataactgcaagagttcttagtacattgctccttgataattaagtgaaaatgttcttaaaaggtacactggttaattgaaagctacttattcagtttgtgttagtgtctagacctgtcagccacaagacctgtttaggaccctgaaagtcacagtacctaaaaactatgactgcctttttattgcataggtggtagtggtggtgatggtggtggtagtttgcaagttatctcttaaaactgctgggaatggtgtcattctattcactaatctagcttatagacttgccgtgctgtttgatagaatgcagaggatagcaaccaaaacaaatacacaaataaataaaaacaaaaaccaaccaacaaaccaacttacatacacatatatatatccacaaagaacctctccatctcctccccttctttttgactccactcttgtcagtgcaattttgcttctcattttgaaatctgggctgtagtgctcctgctttatttctacctcagttttgttacatttctcttggaaagtaaagtagaaaattggaagtggacacacacactgcaatgtagcttgccaaacatgttactttgttttcttccatctttcaccgtaaatctagtttccaaagacatcagcatttgtgcttacttccacctcagtctaccagccccacccctacccatggcataagtggcatttttcttaatttcctatttttctcctgctctctgtcaagttgttctttgtatcctttaatgctttatgtgcaacctttcattgatagtgggctgatgtttggcaatgcttctgaactgtcacagagcaggctgtagctttccacagccactgcccatgcataagcagaacagcctggccttttgaatgtattttcctgggttttttccccttttctttttttagtttagagatgcagtaacaaaactgttgcaaagcactggcattttatgtattcaataaataagtgatgtacatttttaaaaaaatttaaataaatgcaatgagaagccccaagaaaggcctttctgttttttttttcttacaaaaatttttaccgatcttatccacaatatccaattctctgaaacacttaacatagagaaagctcatgagggatttcttatctctgaaattttatgatgcttgatctttactcccctttttttattttttatgttgctaaaaactgagcaattgaaccagaatttaatttactgtgacattctgtcaattaaagctgtgcttaaatataaatattccatattaaaaagcagtgcctttcattaaggatacaaaaaataatacttaaatacgccctctgcttttcgcaagtgaataaatgctacaatcgtgttctgggtctaccctgtgcatcccttgtaaggaaattctaatatccacattaacttgtaggttcatattgatctcactgacaagtttacttttgcacagtgctgacctattttctgacttttagacattatatttcatttccgccaacatgctgtgttcacttgaaagcgtctggcaagttttgacaaacccagtcttatttagacaactttggaaaatccaatattgacccacatttttttgtggctagtaagatttaatgccaaatatatgactgcactattgtgttttayactcatttataaaactgaaaataaattgaagtcatacatcttggcttttagctttaagtgacttaaaaattagaactctgagtgacttaaaaattaatttgagatgcaagtggtcaaaaatccatgtatttagacagaagctgaagtcgtatgtgattttcatttagcctcacaaaatccaagatttgatctcttaggaaattgggcatgttgaagaaatgaagatctgttggaggagatatggctgacctttgagtagatagtgctctcctgtgattctttgattctgcatggcagcattatgagctcttctataaactagcttaataatgagctctattctgaccatctattctggaacttggagtgggggtggggtaccacatcctcagaagtgaatgtgtacagtcggtgatagtacaactgagtaatggggcttcatacccttggcctctttttgactgctaagaatttggagaaggctattaatgaaggtaaggtaatgagccagtccaaatccctcactgtctggctaagagattgagccattccactttacagcccctaattcccttcttcccaactgcagcaacatttccaacagggacaaaaaggaagtgaaggaaaccacttcagtattgggatcaatagaaattcaagaggtagttcataatgaccttatatgtgacacaaatggaaatactctacacttctggcatgcttctctcccaaatatttagaacattagtgacaatatgaaaaactttgctgactgagctgatcaatggaatgtgaaggcagtatactttaaggctatttactttcacacagaatgtttatctattagtcagtttgtattctactcaaatgcagatagacgggtataatgttttcttgtgcatttgaaacctatcaaggagaaaataaaccattccactaaaatacataggccaaacaccatctgggaaagtgataaaagctatccagaggctatgctatgtaaaatagcaaggtcaatttacatgggttgcatagtacttggctatgcagttttcaaaagaacacatccaaaaaaaaaaaaaatccaaattagttcctataataggtctttgtaaatttaaatatatttgtgggttggaaaatacgtttttagagacatttagaatttctttctctaaaaatgtatccaactccaagcagaaagagacttctgtactcacattctcatgtttcttagaattgggtagcatgatcattgaatctgtattttgcaaagtgaaagggacgcagcttgttgaactattgaggccactaaagtaaagttctaatatatatatataaatataaaattagtgtgtgtgtttgtatgtgtgtatgtgtgtgtgttctttcatcaccacctagttgaactttaaaacagacgtctacttttcattattcagaagcaacttgttacttcctttcttcatatgtgcagagatacacatgatcatgttacaatttgaagtgttttaatgtgtttttttttcttttgaaacgtaaagccttcagttgttgaatcatctgccgatttttatatgaagcacattagcaaacctggagctattagtatttcagaattcacaaccagctgtacttgtgactaaccaacacatgaactgaagctcacactttgctaagacctttggttgacattcgattttgaacctgccagatgcatttgtgtgaaccagggatactgcatctttaatgaacaagtctctcctctttcccctgtttttaaatacaacacaagcagtgtagcactaggcactgcaattgtcaaagacaattagactggaagcaggaaaatttcacctccctgtctcagtgatatgtagaatgtcggcagcatgggtcagccttgccacagagttgtgtgagaatatatgaatcagtcctatagaatgttaaatatttataaaatggttctgtagtacaccaaggttgggagcacattcattccttcttgttgtcttatgatacaaaaaaaaaaaaaaaaaaaaaaaaaagcaaaagtttatttctgggcttaaaactctccctctaatatctctctctcttttacccccattccccaaccattcttctctccatccctctcctctcctcttcctctctcttctctctctctctctctctctctgtctctaactctcgctctctcttgtatgtgggtgtgtgtgtgtatgagtttccactgtggattatatacacttgctagagaatattcatttcttttttttcttttttcatctgatgtatattcaaacattgttctttataaccatttctacctcattgctacatattgtacatgtagtatttatttgttgtctttttttgaatgtcatgcatttcgtaagaaaaagacytgtccttgaacttgaacagtctacctcagaaagactgtctttacactgaacagtattagcaacctaaatgataagacgcattagtgaagtgtggcagggtagataatgcacgagtacttgggatactgatggacttytaattgtattcataacacaagactgcttaaaagaacttaaaagaaattatgcactgtgtaggtcttcatcgaggtcccatttgggacattatatacagaatagagctttattcctatgtgcccatctctgagaaatgtgttagcattcccaagtattttacactggcaatctggctacttaagacaaacaaattcaaacaacatttttatattttgactgacaccctcagctcctaaatttaagagaaataatggtacttaactattttcaactatagtcttcagtgattgaaaatgccttcattttaattctgtgactcctgatataaattaagaaaaacaatgcagttgcaagggcctgcacaacactgaaaataaaccaaaaattaaaaatggcacttcccaaaggaattaacaaacgtggagtcatggtgcttgcaagttccataactgaaagcattttgtttctgatttccctttataacatgtatttgtttattgaagcaattgtacaactaatggcacattgaattactttgtatgaagtgttttatattatactatttattttagcattcgttctttttcttcaccagctctatattacagtagcaaaagaacacttagttttaaaaaatgctgaaaggggttcaccacccacccaatcgatgaatggacttttgaagttgcttgtcagcaaattgtggatattttacaaaagcaaatgaactgtgacaatccacaactcccacagatgtgaattcagaaatgcatctgaaactccggtatgcctgacaatctattctttaagtttcattaacaaagtggcatccaatcctttcacttacaattccttgcaggaatgtattgtctagaggctgtctagtagtga

SEQ ID NO: 93568 - DNA, 12770 bp, Homo sapiens
gggcagctgtccacccaagactggcacagtgttaggggtaggctcctcaccatgtggaaatggtgagttagtaataccctctgggacccacacttctgccacaaacctttataaccctgggctcgagagatcccccatgatcccccttaccccctcgaccagggcctccaaactaaaacagagagctacgtggtgtgtgggcagagccatcactcaagctcaggtggtgatatagcttggccgtctccatccaaatcccatctcgaattgtagctcccataactcccacatacagtgggagggagccagtgggagataattgaatcatggaatcccccatactgttctcatggtagtgagtaagtctcatgagatctgatagttttataaggggaaactcctttcacttggctctcattctctctttgcctgtggccttgtaagacgtgcctttgttcttccctcaccttcccgctgccatggtcgtgaggccaccccaaccacgtggaactgtgagtccattaaacctccttttctttataaattacccaatctcaggtatgcctttatcagcagcatgaaaatggactattacaggtggattcctggtcccttggacccctgggcactctggcaccagtggctgcagctctagtagttggggaggctaggctcccttgcatgcccccaagatagaagctgaatccatggggctgatgaacagatatactgcaggctttgcctgcatctatccagacaaagcccactgtccttggagtctagcatggccaccccagccctgcctgagctctcaggtcggtagcagccttacactttcctgggacagagctcccagagggaacaggtggacctaccagttttactgctccgcagccctcaatcctgctgccctcagtcttggaaaggagcaaagtgattatgaactaacgtgggccctcagtgtagcacagcttacagaaaagtggccggactgttttccacatgggtccctggccattaatcctcactaagcaggcttctcaacctgggcccccagtacaaccaccctgccctgcctgaacacttcagtcagcagcagctctgcatttctttggggaggaaatctcagagacaacccacagccccttgcccatcacagctgcaatggtactgcccttattaccctcaggctggggaaggaaccaaaggcctggtcatgtcactggcacctccagcacactgcaaacaccatatggagaggagtactgtctctcttccttgtgagcccccacaccctacttatcaccaggcagggtcccaaacttggaactgcagagcagccactccacccctgactgagcattcccactggtagtggctcttcgtttccctggggtggagcttccagagaaaactgacagccactctgccactgccactgaggcagttctgccattgctgtcctcagactggggaaggaataaagaccctgaggtcattactcatgcattcagcacaccacagtcaccacacagagagaagcccactctctcttacctgtgagactccaacacctgctcttcaaagaggacccctggctcaggctcacagtacagccaacccaccctcagctcaacattccctttggcagcagctctgcatttctttggggtgaagttcccaaaggcaactgaaagcctctctgccactgctactgcagtggtactacacttgctgccttcaaagtgaggagggaacaaagaccccaagtactttactcacacctccagcacactgcaggagaggagaagaggccagtctgtcttccctgtgagacccctgcctcctgttcattacaagggaggtctccccagcatggtcccacaacacacaccacagccctggctgaccactccaagtagtagaggctttgtgcttctctggggtgaagccacaagagacaagtaaaaggcccttgctcattgccactaccaaggtcccttcccctgctgcctccaagctggggagaaaacataaagcctgagcttgccctagggctgtgatgtgcagcccaggagttccaagcccagatctccatccagaacttgagtgggaaaggagcccacactttcaaaacactgagaaggaacgtggctgcaaatgtgaggaaatacagaggagccatgaggctgagcaagagcctacctactggacattacacttaagcaccatctactggatcacagcccaaacttcaacatccaaaaaactttgctaatataccactctgtgaaaccaaggacaagaattcagctacaaataaagacccaggacaaagctttagtcctctgaaaatgtccagaaaggaagttaactgactatactcaaattacaccagagttaaagccacacagatgagaaagaaccagcacaagaactctggcaactaaaaaagctagagtgtcttctttcctctaaatgactgtactacttccccagaaacgcttcttaaccagcggaaagggcagaaattaccaacgtaaaattcagaatatgaataggaacaaagattatcgagattcaggagaaagtcaaatgcaatttaaggaatctaaggattataacaaaaaatgatacaagagctgaagataaaatgggcattttaagaaaaaaacaaactgtaatgatagagctgaaaaacacactacaagaatttcctaataaaattgcaagtattaacagcagaatagaccaagctgaggaaagaatctcagagctcaaaaactggttctacaaactaactcagacaaaaataaagaaaaaaaggagaaaaccttggagaaatgtgggattatgtagagaccaaatctgtgactcactggcatccttgaaagagagggagataaaacaagcaacttggaaaacatatttcacaatcttggccacaaaaatttccccaacatcaccagagaggccaacattcaaattaaaaaatgtagagaacctttgtgagatactgcacaagacaactatccccaagacacatagtcatcaggttctccaaggtcaacaagaaagaaaaaatattaaagatagctagacagaaaggacaggtcacctacaaagggaaccccatcaggctaaaagcagacctttggacagaaaccctacaagccagaagagattgggagcctatattcactattctttaaaaagaagaagttccaaccaagaatttcatatctggccaaagattcccaagcaaaggagaaataagatacttttcagacaagctaatgctaaggaaattcattaccttcacacctgctttacaagaggtcctacggggagtgataaatatggaaaggaaagaccattaccagccacataaaaacagttaagtacatagaccactgacactataaagcaaccacacaatcaagtctgaataataaccagctaacaacacaacaacaggatcaaatccacacatgtcaatattaaccttgaatgtaaatgggctaactgtccccagttaaaaggcacagaatggcaacttggataaaagagcacgacccaaccgtatgctgtcttcaagagacccatctcatgtgcaatgacacccataaagaaaacattataccaatatccttgatgaaaacagatgcaaaaatcctcactaaaatactagcaaaccaaatccagcaacacatcaaaaagctaatctacagcaatcaaataggctttattccagggatgcaacgtttcttcaacatatgcaaatcaataaatgtgattaatcacataaacagaactgaaaacaaaaaccagatgattatctcagtagatgcagaaaaggcttttgataaaattcagcatccattcatgtttaaaaccctcaacaatctaggcattgaaggaacatatctttaaataataagagctatctatgacaaacccacaatcaacatcatacgggttgcacaaaagctggaagtattcccccttgaaaaccagaacaagacaaggatgcccactctcaccactcctattcaacgtagtactggaagtcttagccagagcactgaggcatgagaaagagataaaaggcatccaaatagaaagagaaaaagtccctgtttgcagatgccacaattctatatctagaaaaccccatagtcttagcccaaaagctccttaagctgattaaaaaaaaacttcagcgaagtctcagcatacaaaatcaatgcacaaaaattagaagcattcctatacaccaacaaaaaacaggcccagagccaaatcaggaacacaatcccattcacaatcaccacaaaaagaaaaacatacctaggaatacagctaaggagaaaggtaaaagatctctgcaataagaattacaggccaggcacagtggctcacacctgtgatcccagcactttgggaggatgaggcgggtggatcacctgaggtcaggagtttggggccagcctggccaacacggtgaaaccccacctctactaaaaatacaaaaatcagccaggtgtggtgacaggcacctgtaatcccagctactcaggagactgaggcatgagaattgcttgaatctgggaggtggaggttgcagcgagccgagatcacaccactgcactccagcctgggggatagagtgagactctatctcaaaaaaagaaaaaaaaaattacaaaacactgcttgaagaaatcagagatgacacaaacaaatggaaaaaagcattccatactcatggataggaaaaatcaatattgttaaaatggcattactgcctagagcattttacagattcaatgttattcctatcaaactaccaatgacattctgcacagaactagaaaaagcgattctaaaattcataaggaaccaaaaaagagcccaaacagccaaagcaattctaagcacaaagaacaaaactggaggcatcacataacctgagttcaaacgatgctacaagtccacagtaaccaaaagagcatggtaccggtacgaatatagacacatagacaatggaacagaatacagatcccagaaatgaagccacacacctacaaccatctgatctttgacaaagctgacaaaaacaagcaatggaggaaaggaaaacttaagtcaataaatggtgctgaaataattagccatatgcagaagattgaaaaccggatcccctcctataccatatacagaaatccattcaagatgggttaaagatttaaatgtaagacctaaaactataacaaccctgaaagaaaacctaggaaataccgttctagacatagaccttttctgttgaagatgccaaaagcaattgcaacaaaacaaaaaattgattagtgggactcaaactaaagtgcttgtacacagcaatagaaactatcaatagagtaagcagataacctacagagtgggagaaaatatttgcaaactatgcatccagcaagggtctaatatccagaatctataagaaacttaaatttaaaagaaaaaagcaagcaaccccatgaaaatctgggcaaagggcatgaacacatgcttttcaaaagaagacatgcatgcagccaaccaacatatgaaaaaaagctgaacctcactgaccattagagaaatgcaaacccaaaccacagtaacacaccatttcacatgagttagaatggctattatcaaaaagtcaaacaataatgtgctggcaaggacgcagagaaaaaggaatgcttatacattgttggtgggagacagaaggtacaatagtacttttcttacagggttctgagactataaagtgaacttaggcatgtaagagaaattcatgcaataaaagtactaacaaaataattattatgacagatacttataatcattgtgtttttacatattcaaaatatgttatacctataattaccctactcaagggaatctaagggcaaaagtaatgttatttgtctttgttttccttgtttaagggatcatggacattacagtatattttgaaagaactggttataagaactctaggaacaaattaaacttggaaatattaactgctatcttcagcaacaggtctgagctgttccctctgagaactttagcatgcattgtggggaacacatggagtagggcttaaagtccatttttttttatcamgttataagaagacccccagggtgggtggtgtctctgggttgatcgatttctgtaaagggctctgaccacaactggctttgagaccacgatattggcagggaatgtttatatccctctggccaaaaaatatagcgctgacatggttcaccttcttctgcaggtgaccgttaacggcaagtaccacatcactgatggtcagtttggaagctccttccagatgtggcagcctctggggtttatttctgggaaggatcagcctcaggtgtcactcattttctgcttgagagagagagtggattctgctacctggatcaccttagaagaygtcagcacatttcaaactaagattttcttaattctgatctccgggaagaaaagaaataacaaaaaaaaatctactcctttactcctgaatcctgaacaattgaagattttgagtctgtgagtacatacctgtagacatctccaacatctccatttacaagcacattattttgttctgtgcaaaccccagaaggtatgcactgcttggtgggcttcactctcaactgtaggagattctgctataaggacaatatggatctcgtagagttttaaattctgaaataggaagaagttgaagaatgactgaagaatatgtttaatatatccttagagggaaaactcatgcccaaacatggtgattcatcttttactatttagagtaagaaacaaaataaatccttgtgtatttattagccagctcactaattatcaaccgatgtcctatcatatatcctctataccctcacattatttggaggaaaattctatatatcaaatcatttcaccaataaaaatgccagcatatatcattaaacatcattttaaagaatgataaccacacattttcaaactcatgaacataaaagcattttaaggatgacctgtgattatcttgggaaccatagtgatttgtgtgagaaaatatttaatgcgggttttttgttgactttatagaaaatttttactggtaaatgagtgaatagaatattacggaaaaactaattgtctataaagcatatgaaaagattgttggataatataatgtgaattcaagtttttctttaggagacttaggctattatgggactaggtgtttttcctcaataaagtcttccctctcatcctttctcttgtctcctggttatattcttttactttcttccaaactttgccataagaaaaagaacatggttttggtatataaattcgatttgaaatcctgtggacactgggtgaattattttttaaaactgtagctctgatttctcaaagataaaatgaggataatatttatacaattcagtgccagacctggagtaaactttcaaaaaaatatttgctacatggatgaatgaataatgtcagtaatgttttagtactagatcagcatttgatcaaagttctccttccatcttgctttatttccctacagtttgaaattctggctccagtttcatctgcctgcttcttccttgattaaatattgatagaaaatcagatgccctggatctaagcgtgtgtcttgtgtttcagaatctgaatgtttacttatccataactcagattttctgttcgtagattccagtatcagggctatagtttaaacttcagactgattcttacgttactctctttctcttcaacttgtgatcattttaataagcttaagagaaaagcagggaccagaatggagaaatattcgttaagaaaataagatacattggagcatcagtattttagacagcaatataatagttgggagatactggcgagtgtgaatgatatgctttgactgtatccccacccaaatctcattttgaattgtagctcccataatccctacatgttgtgggagggacccagtgggaggtaactgaatcatgggtgcacgtttctcccatgctgttctcatgatagtgaataagtctcacaagatctgatggttttataaagggcagttcccctgcacatactcttttgcctgccaccatgagagatgtacctttgctcctccttcaccttctgccataactgtgaggcctccccagccatgtggaactgtgtgtccattaaacctctttttctttataatttacccagtctcaggtatgtctttattagcagcatgagaacagactaatatcaaggatttcctaagaagtggtgggtatgagacctggtctcagtgagaagaaagaatgaaagagatatgtcaatatttgaaagcttgccatcttccttactgatgggccttgttcagctatgttgctgtcttgcaataatgccacgtcacttctggtactctcgagcagaaagaactttctcatattccaaccaagatcaggccaatggaggaaatgctggcaaaaaactcaaaccagatcaaaatgtggctcaaagaaaatgatgcagttttatacaatgagtcaagtaagtcatgttgcacaatgaatatcctgtaacccaaatgcaattttttttcttgaatatatctgtcacatagggggaaaagcaaaaatatgttcaaaaagactcaaatatacaatttagcttgcagattgaagacttctgcttttactatgcaatgttaacctttttcaaatggaatctaaatgaatgaaggaaaagaatctcaccaattgatttggctaaagattttgaggtggatgttgattctttgcatttgtccaaaacgttgtctctatttttggtggccctctgaagagtaggatatgccatgtcgtgtcagaaccctgagacaagtaagttagaagatctagttggaaaggttgaggtgttaagtgtgtatgctatttcctctaccttcacagtgaagctgagtgtgtatgtgttaatctcccactctctgtgcattaagcaaggcagatgatctgggacaagcgtgtatattggtattcaggtggtagcctctgaccctagggagatacccactggaagtgagcccacctgtttgttttctgaggcttagggatattcaggaatgcaaagccccactgactccgatagctaggtcactgggagaaagtgtctttaatgggagctatagaatttgtcgcacttgatgtgtgagacaacttcttcaagaaaacatgaataggactagatttattactggggtaagccagaagaaaggctcagaaagtaccatgctgtgactcagactgcaggagggttactgtttgtctactctattagctcactaatacaaattcattagaagccaggctgtcaaatagtcactgaaagaatgtacagaaaaccccttctagaaagaagatgggagctgtgcattccagcctcttttctgaacagcactctggggatggagcccctggaagtgcttagactcccactgaaaaccacctatttgttctgtaatctagaaagactcacgtgtgcattctcccgttcctagagttggaaggtttttaggatgcagtcaatcaagtggtaactataagagtttgggaactcaatgcatggctcaaaccccatttgggaatgaacagggaactgcattttagagccccttctctacattcctccactgaatgaagtccctggaagtgtgtgcacgctcatataaaactgccacttttttctgtggcctacagagtgttgtatatgcctagccctctctactcccagagctaggaggtttaggatgcagccccttgtgttaaaactataaaaggtggggcactcaatatgaggacaaactcattccaggtgggattaatgggcctggatttatcagtagtgtgagccaggggagaaagctctggaaaagccattgtgtttctgaggctaccaggcggctatctgccccctttctccccaatgcacattagaaaccagacccccaagtagccactggaacagtgtgccataaacccattccaggaagtaacaggtagctgcatgtttaagccccttttatgcactgctcctggggcatgaggtccctagaaatgcttacaaacctgtataaaatcgccactttttcctgtgatctagggagacttacgtatgtctacttctctctactccaagacctaagaggtttaggatgtcatatcagatggaagttgaaatagtggaatgctcatcatgtgaacaaaccctttccaggagggatcaatagacatacgttttcactaaaaaaatctggcagaggcagttatctaatgtgtagaaaccaacacagaaggtcaaagaaaatgaggaaacagggatatatattcccatttaagaacaatataaatctcccaaatccaacccaagtgatgtggagatatgtgatttacttcacagggaattcagaataaagataataaagatgcttactgaggtcaggagagcaatgtaagaataaactgagaatttcaacgaagagagagaaaatttttaagaagtaccaaacagaaattatagcactgaagaatactataactgaaatgaaaaatccaataaagtggttcaacagcaggctagatcaagcagaagaaaggatcagtgaactcaaaagcaagtcagttaaagtcatccaatctgaggagcaaaaatagaaaagaatgaaaaatactgaagataacttaagagatgtatggaacagcgtcaggctgtacatcatatgtgttattgatgtaccagaaaagagaaagtgacattaaccatattcaaagagataatgaaagaaaacttcccaagcctgtagaaggaaatagaaatactaacttaaggagttcaaagcaccaaacgaggtgactctaaagaggcatacattgagaaacatcatactcaaattgtcaaaagttaaagacaaagagagagtttttaaagcagctagagaaatgcaaattgttatgtacaaggaaatcccagtgatagtatcagcagattttttcatccaaaatcttgtaggccagaaaggagtaagatgatatattcaagacctagtagggggaagccaactaagaatactatacccagaaatcatgtctttcaaaaatgaaggattgaaaaaacttcgtcagacaagcaaaagttgagagtttatcaccactagacttgcattgtaaaaatttcaaaggtagttcttcaagatggagaaaaatggtaattagtaacatgaaaatataaatcttactgataaaagtaagactgttttaaaatccagtacactctaacactgtaatgacaatgggtaagtcaatcatgtcttcagtataaaggttaaaggtcaaaacgattaaaaatgactaaagctacaataatttcttaagggatacaaatgctgaaaagatgtaaattgtgacatcaaaaacataaaacataggaggaagaggattaaaactgtagagcttatatatgtgattaaaatcacattgttatcagtattattcacaatacccaagatatgaaatcagcctaaatgtccatcaacagatgaatgggtaagaaaggatgctgtatatattcacaatggaatattattcagtcataaaatataatgaaatccagtccttcccaacaacaatgatggaaccagagggcattatgttcagtgaaataagccaagaacttaaagataaatatcacatattaagttatcccacgaaaatggtgaatagaattatggttaccagaggctggaaagggtagggaatagggggatgaagagaggtttggtaatggatataaaaataccgttagatacaagaagtaaattctgatattcaacagcacatctagtaggttgatcatggttaacaataattatcatatatttcaagagatttggcatgttcctaacacaatgaaataacaaatgtttaaggtggtaaatatcctattaccctgacttgatcattaaacgttgaaacaaaatgtcacatgttccccataaatacgtacaattattatgtatcaataaataaatgacaattttaaaaagcaattcactacccatccccaaaattaagctgctaacacctaaaatagcctgttacatgtataaggtgttttctgtaagcctcagcataacaacaaagcaaaggtctataaaacatacacaaaacatcaaaagaaaatatccaactcatatcattacagaaagttatcaaaccacaaaggaagaaggcaagaaaggaagaaacaaacaaaggatctacaaaacagccagaaaacaatgaacaaaatggcactagtaagttcttacctagcagtaattacgtgaatataaatgaatttaattctccaatcaagtcacagagtagttgaatggatgaaaaaacaagacccaactctatgctgcctacaagagacaccctgtttttcctgtaaggacacacatggactgaaagtggagagttagaaaaagatattccacgcaaagggaatccagaaaagagcaagaggagctatatcagataaaatagactttatgtcaaaaattgtaaaaagagacaaaaaaaggtcattacctaataataaaggggtcgattttgtaagaggacatattaatt

SEQ ID NO: 93569 - DNA, 13271 bp, Homo sapiens
gtcctacggaggcaggcaggcctccttgagctgcagtgggctccacccagtttgagtttcctggccgctttgtttacctcctcaagcctcagcaatggcaggcactcctcccccagcctcactgccaccttgcagtttgatcttagactgctgtgctagcaatgagtgaggctccgtggatgtgggaccctccgagtgaggtacgggatataatctcctgctgtgccatttgctaagaccattggaaaagcccagtattagggcgggagtgacccagttttccaggtgccatctgtcactgctttccttgcctaggaaagggaattccctgaccccttgtgctccctgggtgaggcgatgcctcgctgtgcttcggctgtcactcggtgggctgcacccactgtcctgcacccactgtctgacaagccccagtgagatgagccttgtacctcagttggaaatgcagaaatcacccatcttctccatcactcatactgggagctgtagactggagctgttcctattcggccatcttggaacctccctctaaagtctgttttgactgaaattaggattgcaagccttgttttttctgtctaagtctttttggtggtctctaaaaacttgtttaataaatctgggttctcctgttttgagtgcctatatatttagcattgttagttctttttgttgagctgagccctttgtgtaatgcccttcattgtctttttgtacctttgttggtttaaagtatgttttatctgaaattaggattacaacctctgcttttttctgttttccatttgcttggtggatttttcttcctctcattgttttgagccattggtgtcattgcatgtgagatgggtctcttgatgacagcataccaatgggtcttggttctttatccaccttgccactctgtgccttttaattggggcatttagcctgtttacgtttgaaattagtattgatataagtctatttaatcctgccatcatgacattagctagctgttacacaaacttgtttctgtggttgctttatagtgtcactagtctatgtactttagggtgtttttgagttggctgataatggtcctccctttccatatttaatgcttccttcaaaaacttttggtaaggtaggtctggtggtaatgaattccctcagcatttgctggtctgacaaggatcttatttctcctttgcttatgaagcttagtttggctggatatgaaattcttatttgaaatttcttttctttaagaatgttgaatataggccaccaatctcttctggcttgtcgggtttctgctgaaaggtccactgttactctgataggcttcccttcacagttggcctggccttttactttggatgcctttaatatattttcttttacttcaaccttggagaatctgatggttatgtatcttcgggataatcctcttgtgtagaatctttcaggggttctctgtatttcctaaatttgactgttggcctctctagtgaggttggagatattttcatggacaatatactgaaatatgtttaccaagttgtttcttttctccccttctctttcagtgatgccaatgattggtagatttggcctctttacataatttcatatttctcagattttcttcattcatttttattctttttactttatttttgtctgactgtcttatttgagagagctagtcttcaagttctgaaattctttcctcagcttggtctattctgctgttaatacttgaaattgcattgtgaaattatcttagggtgtttttcagctctgtcagatccattaggttctttttttctctctctctattttgtccttcagctcttgtatcattttattgtgattcttagtttccttggattgggttttgccattctcctgaatcttgatgattttcatttctatccatattctgaattctgtgtcatttcagccaactcagttgggtaagaaaccttgttggagaactagtttgatcgtttggaagacataagtctctctggccatttgagttgctggagttattgcattggttctttctcatttctctgtgtgggtgctcctttaactgcagtgtagattgagtacaatcaaaagacttcttctttgcacgttttcacagagtcaaggctttgtacagggtcgttatttgtggctcacttcttgtctttggtttcacaggagaatatatttttgttgttgaagctttggggtgtgatgtggtaggtagcactaggtatagtgttcagtaagtaggctcttgctcagttgtgtgactcacaaatatttcctcatgtttgcagctgtgctccctcttaatactctgaaagtgtgggctcctctcctatttgagtgctgcctctatattacagcttggaagtaccaggctcctgactgctgctctggggtaatctcaaagtttatattccctccccaacttggaggcagcagaggaagggaccttcacagtggttgtggaccagggtcttttacttgtttcctggaggatctaccccagagggaagcagtcagtaaccactcagtgcaatcagcctggtatgggggaactgtgctgtgggcccaagctggggggctccctgcctggtgatggaggggtgggtggaaccaatgggaaacaaactggcctcctctccttgagtcaactgcaagttgttggaggtgtggataaagcacttagggggtttgctcctttgttaacccaaaggtagcagagatagtaccgctgcagagacagtggcagaggggctttctgttgcccctgggggcatccacctccaagaaacacagagctgatgttactgggagtgttcaatcagtaggatagggtggctgcactgctggtgtgagctgggggttccacttgttgggaagcagggagtgaagggctcactgggaggagggattggtctcctttccatatggcgactatggcatgctgtaatcttgagtgtagctcacaggttctttgtttcttcccccaacgagggacagcagaaatagaatcattgctgtggcagtggcagaggggctgttacatatctctgtgagcctctccccagcgagactccaggccactaccagtgggtatgcttagctgtgggtggaggagattgttctatgatcataagccagtgtcccagcctggtgaggagtgggggtgggaattctcagagaagaagggctggactcctctctgtttggtggctacagtgtgctggaagtgccaccacagtgatggggcactttgttccctccccagtgtgaggactgttatggtggtaccattgcaactgccatcacagaggggttacaggttgactctgggatttcatccatggagaactgctgggctacctctgattgaagtggtcaagcaagggcaggggggttgtgctggagtcccaggtcaggcaaccctgcccagtgagaagaagtgagaactgggacctgtgtggagaacaacctggccacttttccatgaggtagatgctctgtttggggtgtctggatgagcccctggtccctgtggactctccagggcctggagacatcaagcatgagggctgcaagacagaaaagatagcaacacacttctccaactgtaagctctattgcagacagttacagaactgctgctagcttgatatccctggcttgtggctggtggggtattgctggagacccaagcaaggatgactcatccagtgaggagatacaggatcaggtacccatttaacaaagagtctgaacacttttctataagctgcagtatgctgggcacctgctctagaccccagtcacctcagaatttccaatacatgttgccagcctgaacacaccagcaggaggaggctggagacccaggttgggaggccctgctcaatgaggaagaacaggatcagagaactgcaaaaaaagcagttgggccacttttttgtagaacagctgtgctattctgggggtgcactccagcccccatttgccacagactctgtaaagtctgaaggcaataacagctaaggcttcaacacagcaaagacggcagcctgcccctccccctgggaggtgctgaaaaagtgctcattgatcatcagagaaatgcaaatcaaaactacaatgagagattatctcactccagtgaaaatggcttttatgcaaatgacaggcaatgacaaatgctggagaacacgtggagaaaagggaaccctcatacactattgatgggaatgtaaattagtacaaccactatggagaacagtttggaacttcctcaaaaaaacctaaaacttgagctaccatatgatccagaaatcccactgctgggcatactctcaaaataaaataaatcaatatattgaagagatatctgcagtccaatgtttgttgcagcactgtttataatagctaagatttgggagtaacctaagtgtccatcaacagatgaatggataaagaaaatgaggtacatgcacacaatggagtactattcagccatcaaaagtaatgagattctgtcattcacattagtggtgatggaactggagatcgttatgttaagttaaataatccaggcacagaatgacgaattttgcatgttctcactagtttgtagaagctaaaaattaaaatagttgatggcatacagatagagaataggatgattataagaggctgagaagggtaatggcagggttgggagttgggaagggaagtggagatggttactgggtacaaaaaatagagtgaataagatctggtatttgatagcacaacagggtggctattgtcaataacaatttaattgtacatttaaatataactaaaagagtataattggattgtttgcaacacaaagaaataataaatgctttaggtaatggatgtctcatttatcctgatgtgattatgcattgtgttcctgtatcaaaatatctcatgtaccctgtaaatatatacaactactatgtacccacaagaattaaaaatttaaaaaaaaaagaaaagtgctaagaatagaacccagggaaacaatgatattcaatggtttgatagaggataaggagcctgcagagaagactgaaaaagtgcaatctgaaagatgggggtggggaaaacaggaaagaatactgccatggaagtcaaaaaagtaaaaaaattttaagtagaaggcagtgaccaatagtagcaaatgacacagaaaataaaattaggtaataattgagatatgtacattcaatttcacaattattaagaggtaatcttaaagtatgttcagccagattgcaacaggttgtaataggttacaggagtgagttctcactgcagtgagacagtgaaatggatagaatgatagttgaaggagttgtttcttgaggagtttttttgtttgtttgtttgtttatttgttgttattggaataacacttgatgatttttaaattctgagagggaacccaactagaatattggaaaagattaaagtcagagttgagcaaaaggaaaattagtgaagaaagatctctcaaagtatatatgaagtggggagttctagagaacaagtagaagggaagaagacaatggtaggtataggcataagtatatttttcaccaggtcaaggtagaaattttgaggtgcccccctcccatatggcctctatttacttgatgatagaaaaattaaggcaacttgctgtaagagtaaggagtagatgaggtggagaaggagtctgaaaagacaggttataaattttggaataggcattaaaagaatggggaatgttactgactgaggcaatacagaggtatttctgggtagtgttgtggttctgcttgctgaaaactaagcttttgtaagaactccagtgtggttgtatgattatcttttttctaggccaaggagcttggacacagaagtagagatatgatagcttgaaatacaactttgtttaatgaatacaatttgaagactgctggggagtaatgacgtctcatagctcaacctatctggccattaaaaatggtatgagttaggcgggcatggtggcttgtgcctgtaatcccagcaatttgggatgctgaggcaagaggattgcttaagcccaggagttcaagaccagcctgggcaacatagtgagaccctctctaaaacaattaaaatttaaattagctagacctggtggcacatgcctgtaatccaagctacttgggaagctgaggtgggaggatcacttgagcccaggagtttgaggctacagtgagctatgatcgcaccactgcactccagcctgggccacagagccatatcccatcttaaaaaaatggtatgagtcaattgtgtttcwctgctgaagactacctcaactatgtcatctacatatatgattcctcccatgaaaagttcaacattattgtcaaggctaagaaatggaaacttgtctatattaggaaacccatttccactttctaggagtgagatattgccaatatcaagtaagataatgctagcatctaatatgttatgtagcccactagtctctttcttctcttggagaaggctagagttcatgttagagatggaggcacattatctcttcctattctgcagatggcccaacgtttgtgatggaagtgaaccatgagaagtatgaccacttctcctcttgtactgcaaactctctggccccctaatcaaggttatccatccatgacaactttggatcatggagatactcattatcacagttcacaccatcacttccatcgtgaaaaatccagatggtttcttaataggaaactgtggtatgttagtcataccacagttggtgctgtccagattatcattgctgcaaacactgacaccaccaaggctatggggaaggtcattcctgtgctgaatgggaagctcattgatatggttttctgtatctccaacatgtctgtcatggacctgacctgcattctggagaaagtatacaagtatagcgacatcaataaagtgttgagtcaggcattggaaggccccttagaggacaccctggcctacgctaaagaccaagttatctcctgtgactttaacagtgacacccattcctccatctttgatgcttgggctagcattgatctccatgaccatattgttaagttcatttactggtaggacaatgagtttggctgtaggaaccaaattgcagacttcatggttcatgtgaccactagggagtaagggccccagaccagtgttcccaatgacagcacaagaggaagacagaggccttcagctctggggagttctatctcaaatctacccatcaacacaatgagaatcactgttctcaacatgattcccatctcaatccccgtagaagaaaagtgccatcaatatagttgactatagccaccaggaaaaaaaaaatgatatggttttccatgagcaaaaattttaggagtccattgccagttagagtatgaggcattgcaaataaaggcttcagtgcagacaccatttagacatggtgtagaaatgggcctccactcatggtttctaggcatgactgtttaggccctatggaatacattgaaacactttctcctttccttttctgtgtcattctgtgctgtattttttttctctactgctctactgataggggttaaaactggttgtacatgtctctttagccactagcaccctgcagctgtgacaccattgtgagtgtcaccttttaacctaggacaccatgatatatgtcacaaggtacaaaacctagttacactaccctacttaatagaggcagttggcccatttaggaggaggaaggatatttcccatatggggcttctatgtgatacgggaggctctttgtcataaatgtgtgtatatagaagcagggggcttcctgtgagctccaagggtggtctcaaagtcagggacccttcaggtcatatttctgcccatgtttttatttgtgcatccattaagaacagatcttggtatgacctaagaataactgttactaagccccttgccaggcattggctctgtgggaggtcttaagccaagcacagaaactattaaccaagttggagtttaggagattctgtgagtataaaatgggagcctgaggaaatgttggtctcatatagaaaatttggagttagtcaccctggccatgtgttctgtgggtcatgaggaagagccttaaattcccaaagagctcaccattgaattataccatcaggatccattattttggattaagtcattacttcctctcttttagggtattgggggaaatgctctttaaaaatatacagctagaacaaggagggagtaagtggaagcactggaagatttgggagagagccagaaaatgttaagtttgggctgatgaggtcaaaactcccaactctgggaagggctggctcagagcttgcttccttccttgcttgctttctgtactcagcgtaagggagcatctgtcagacccaagaaggcacagaaccacaagtgcctcgtctctttaggatgaaactggatagttgttgagcaggaagcagcttggcacatagaaataagtgattgggattccactgagggaagaagataagacctgggtaagccatgggcttgtgctggcttgaatttcaagtatctttgggcttttagcactgtgaaaagcagggagctcttgagaagaaactgaggaaagaaagtggagatcatatgttgttaattagaaaagaaggaatgacaagaatgctaagctttagcttcagttctccttgtaagttgatgacaagccacatgtaaagtttaagatgggtatttttgaactcatccttctgcccactggagcagctccagctgtatggtaaagaaacaaatgtggcaaaacaggatgtttcaggcttttactttcgaagggccaaatggaagtagagatctggtcctttggtctcctaatcactgaagattgaagggtttgtgactctctagggctgtatttctcaccctgagtaggcatgctgttttttcaggtgtgattacaggagggaagaaaagagtaatcaggttaagtaggccctgtgagggaagaatatgggatttctcaggtacaatggcagaaataggtgaccacttctgagtctaccaagaatccttgggcatttcactaaaactgtyactcaaaactcccagatggaataatctgtaggtttccaaacaaaaagatggcgtctttcctggatttcaagcttctagatacctagacctcctctggatagaaagaaggagatgcttgactgtgtatgcctttgcctggggagaatataaggaattttaatgatttcctgtgtaaagtcgtgaggggccttgggtagccagtataaacacaaggcatttcagttgattggatttatgttcctgaaatcaggaaacaggccaatgtaagcctctgtttagctccattctacgggactggaagttggaatgcaaggagatgctgcctcagtttttatcttgtagtcagtggccactctgttctttttggctgttgtttcagctacttaaatgagtgtgtgtgtgtgtgtgtgtgtgtgtgtgtgtgtgtgtacagtgtgtatatatatatatatatatatatatatatatatatatgctacctcacttctcagggaggttagggctgacagagggtctgacttccatggataggatgactgagtcacaaaaggactcccttcaagcctgggataatatttctgaaagatacagggattagatcatatgttcttgaacatccttttcagaaaatcccttgtgtaagaagcacaaaggacatccaggagcttccattcttcatctgttatccaagcctatagggtctacatcactttatctcaaactcatttttataccctgtcttatgcaaagaacttgacactaagttagacagctctggaatccagcttgggctctgccatcagctagttgtttaaactaaacaatttacgaagtaaaagtagccaccattgactactgtgtcagcccaatgctcagtgccttacatagatgttcacatttcatcctcacaaccctgggaggtagggactactattatcctcacttgaggaggatactgttttctagttgagaaaactaaagtttagtcattgactcaaagtaaatggctaatcagtggcaaagtccaaattagaatccagaattgtttccaaagcccaccatcctaagcattaaagtagactgcttccactcatacactttgtactctttctgttctgggtccttgtacaataggaataattatttgaaaatacctagcctgccttctttatgagaatgtttccaggacaaaatgagaggatggctatctcattccatgaacatttatgtgttatgggaaagacattattctggggtgtgggtattcaaaaacaaataagaggttccttccctccaggagattaccatctgtatattctgtcttgaaatcttgccatctgtgaaactgcctggaaaaacataaagcattatgcaagtgcctgtttcctatgatactgttttattgcatgtacagtgaaggaaaactaacagccataggtacagaacaagccagggtaaaattccacatggctttcagctgctccctacaaaacttggcaagcagctgttgccagtcccaagtgagaatgaaaggagaggaaatgggcagtaatatgaagagtgactataatgtaatgtgactgctgcttttttgcaatcatattaggatgtgcacatcctaaagagtggtgtccccttcagactagtaccttgggaggctaaatccctgtacatttattgcaatgatgttgccattgctcaaaatattttttggaactcctctttagtaattgagttcagagcctggggcacatccttttgaataaccacagtggtgataaatctttgtcccttgaggatggatttgattttagcaaacagctaaaagtcattcggagccaagtctatagaataaggtgggtgatccagctcagtaatagagtctttaatttttttaaaagaaaacaaaaccacttcctctcttcttcattcctttccccaccctactttcccctttcttcccctctcttcttctcccttccaagtatgactgtgagccatgaagaccagttttcttgtgtggttaataacctagtgtaagcattaaatgactactatacaaggtcacaagactatgtaaggggtgaactaagattaaacactatgtcttatgcagatcacagcattaaaaacttcagctaacagggaagctttatgatgacaaaggaacctaaataatggaaatacatgagcagaggactatgggttattcgtctctaaaggttttgctatatcctgcacagaggacacaattatatcattgcttgatgtcagtagaaatgtcctgtgacttggtacttctttccagacaaatccaactggggataggccaacacctctgaaaactgactttccaaatagattataaggatgaaacaagaactctctgcttctctacccaccctggaaacaataatattgtaggagagtcagggctgtgcctgagcaaacttgtgaaggcatggaaacatgtgtctttggcaaccactttttcatatctgcctcctcaattgctatcaccaccttccctttatctccctattccccagttaaggagaagagtgtccagttagtgcattcatgttaagaggttacaaagaccatatacattttagaagagggcatcagggctgtgatgaatccaaaaaaaagagaaaaaaaaaaggaaaccagacaagcagaagagcttgccacatcagggaggagatattttaaggcaaggccagaatacctcaagtcacccaagagaggcaatatctgccactcctgtgcatgacattatccctagagtgagttctaccacaggcttttttctctcaagtgttggcttccattttaagagctagactttgaaccacagaatttcagagctgccaaagccctcaaggagatcccatactgtcattttaaaaattgaaagctaggatgagtgcaagggagaagcaggaagagtaatagcctgctcccagatcacaaaagaagttaatggccctactggagctagaacgcaggtccctggcttcccaccacagtgggttttttttttctccaggccagcagtagtttgcagaaatgcctgcttcaaaggctttgtaaagtgagtcacacttcccgtgctagtttcctcttgatacaagaagctcttatgtttctcagtggaggaaggaatgagaaaaatgtcagaattctattccatttccagaggcccaacagcttctctcttttgaggacaagcaatccccttgggaactcaggatcattgcttttgagttcaagcagccagcatgcctttcacagcaactcgagtttgtgtgtgttattgaatccccaagatgaactattagagaactatgtttccatgggtcccagagcacatggtcttaattagaatgtgcaagagaaaagcaaatttccccttctgaaggtctgaaagtaacttgaaatgcagtcaatattgttccagcagccaatgcctggcttccagctgctgcttggtgaaaattcaaaactcaagatgacgcgtggaggggtaggtagaggtatagaaggccaaactggggaatagaaccataggaggactgtagttaaaagagtactaggttgtagcttccccaggcttcacctctgtcccatttccaagcctcaacaaactcaggcagagctgattgcaagcccatcccagtatggggttctatagtgagacccactggacactagatcaactcctacctcctatataaagtttccagactactctggctgacaggaaaccctcatggcttctcagctctttcaacaagaatatgattacttgccgggtgcggtggctcacacctgtaatcccagcactttgggaggccgaggcaggaggatcacaaggtcaggagatcgagaccatcctggctaacatggtgaaaccccgtctgtactaaaaatacaaaaaattagccgggcatggcggcgggcacctgtagtcccagctactcaggaggctgaggcaggagaatggcgtgaacccgggaggcggagcttgcagt

SEQ ID NO: 93570 - DNA, 111304 bp, Homo sapiens
tcaaggagagaggcttcagcaggcagggccagtgggtacccctctttgtgaatgtggtacaagacacagcaaaggcccaagttgctgacatccccatttgtatccattatgggtgcacaaacccctcacaggtcctggagagagggagctacgccagaggaaatgtcaggagggaaagaaaaaaggaaaagagggagagagggcaggagagggggagggaggttaggaggagaacaggaagacaggaaaagagagaagaaagaaaggaagggaaggaagcagagagggagggagttgagcaggaggacaggaaggaaggaagacaggaaaagagagaaggaggaaaggaagggaaggaagcagagagggagggagttgaggaggaggacaggaaggaagacagaaaaagagagaaggaggaaaggaagggagggaaggagagagggaaggagtcgaggaggaggaggacaggaagaaagacaggaaaagagagaaggaggaaaggaagggagggaaggagagagggagggagttgaggaggacaggaaggaagacaggaaaagagagaaggaggaaaggaagagaaggaagcagagagtgagggagtcacggaggaggacaggaaggaagacaggaaaagagagaaggaggaaaggaagggaaggaaggagagagtggaggagaagaacaggaaggaaaacagaaagagagaaggaggaggaaaggaagggagggaaggagagagggaaggagtcaaggaggaggacaggaggaagacaggaggaaaggaagggaaggaatgagagagggagagagtggaggaggagaactggaaggaagacaggaaaagagagaaggaggaaaggaagggagggaaggagagagggaaggagtcgaagaggaggacaggaaggaagacagggaaagagagaaggaggaaagaaagggagggaaggagaaagggagagaggggcaagcaaggagggaactgtttggagtcaggagccctaaatctcagaacaatgagatgataaagggtggggtgtgatgaagcctgagcccctctctcagatgtccagtcatgtctagtcagtgagaatcctggcaggacagaggaaattcgaatgcatggtaaggtctgaccacatgcttcacttctccacatttttggagcacacatcctcccttcacatgtgctattttagaatagtgtgtgtctacttaggcactaacattacggatattacgaaacatgatctgtaatcattagtgaaggctataaagctgatgctggaatttctactttcttgttattaactggaagctacattttattattttcataggcatgtctttaatccctctgtccattttttgacagttgatttaaaaattaaataatataagccataaatacactttaccttaatatgtacattgcattatgctgaaatcaaataaaatggttgagagcaatgatgtctcccctcctccctgcaaggatacctggagaaaagaccaggacacaagaacattcgccagtgttcacacaaatattaaatgttagggctgggtgccatggctcctgcctgtacttccagcactttggaaggccaaggcgggcggattacttgaggtcaggagtttgagactagcctggccaacatggtgaaaccccgtctccactaaaaaatacacaagttagctaggcatggtggtgggcacctgtagtcccagctacctgggaggctgaggtgacaggatcgcttgaacccggaaggaggggagttgcagtgagccgacttcacgccactgcactccaccctgggcaacacagtgagatcctgtctcaaaaaataaaataaaataaaataaaaataaatcttggtaaacttaacacatttgctacttctttacattaaaataataatcctggccgggcgtggtggctcacgcctgtaatcccagcactttgggaggctgaggggggcggatcgcaaggtcaggaaatcgagaccatcctggctaacatggtgaaaccccgtctctactaaaaatacaaaaaactagccaggcatagtggcgggtgcctgtagtcccagctacttgggaggctgaggcaggagaacggcgtgaacccgagaggcggagcttgcagtgagccaagatcgtgccactgtactccagcctgggcgaaagagtgagactccatctcaaaaaataaacgaataaataaaataacgataataataataatcctaagccccctccccacaatgaagtagctggtataccccaggagggggtcaatggtctagaccattggatgccctggttgaaaggcagatgctgagttggtcagtctgggggtggcagctgggattctgcatttctagtgagctcccaggggatgctggcactgccagttccgaccacatctgttatccaacactgcagagaagcaaactggacctctcgctcagagccagtttgcactctgatggtgaaggggttcaaaaacaatgaccctccccacacaaaaataccagatatgtccgagagtacaaagccaggagtggcgaattcagccatctatgtcaggctcccttccagagctcactgggcttggaggaaagcagcagcgggaaggggtgagaatattcagtgcctctgaagcaagagacttcctaagtcagcattgcaaagccagctatctaggggaagaaggcaggtaagtctgcaatgaggagctcaaattcaggccccatcagatgaagtcagagctttctggtctctcagcatcatcaagaaaagtagactgtgtacagccactgagaaagatggtccctagtccaacctgttaccctccatctacgctgggcaagatttgtacccctagaaaagtaaagagaataacagggcaaagtgggctcacagaaaacagatacagcagactggaaaccaaatacaacagataacaaaagcacagagacacaggaaccaggacaacaaactaaggaagttgaaataagctaagactccctacaggatggcatatatatacacacaataaatggcatgtttaagtttacatgttgtgtgaaagaagagcatctgtttatttgtcccattgataatgtgcttttgatgccatcgtactgtagtttactggatcatttctattgtgtcttaaaattgtcaggaaaagtaagttattgtcccatggggaaaacacaactgtacaaaagtaaactgtaattcatggaaggaaatgcatccccatcagcatagaaactgcccatctttggctgttggagaattatgaaaagctaaaaactaacttgttatatgtgtacaaaccacattgctagaacaaaatttcattcttttccaatctagcttgtgacagagaagcattcaccattcagtttgtttttttttttttaagcaaagaggagtcttccatcttatgcatagaagtgatgttactgaaaagtgtagaaaataagactgataaaaacataatgtgaagcatgttttcacatctgtggagagctgaagtacctacgatttcccaatctgtctcttccacaatcgctgtgaggctttgccatttcgtcaaaatggcattggggccttttttcctttgaaaaatactcttttttggccgggggcggtggctcacgtctgtaattccagcactttgggaagccgaggtgggcagatcactaggtcaggagttcaagaccagcctggccaacatggtaaaaccccgtctctactaaaaaatacaaaaattagctgggtgtggtggctggcgcctgtaatcccagctacttgggaggctgaggcaggagaatcacttgaacccaggaggctgaggctgcagtgagcagagattgcgccaccgtgctccagcctgggtgacagagtgagactctgtctcataaaagaagaaagaaaaaagaaaaatactcttttttaatttaatgactaaacagaaatgtgaggtggttacaataccaaaaaaataacagtaactctgacatgtgtgcatccatttgtttccagagaatggaaggaaactgggagggagaattctacagactccaggtgggaaatactgtcatacttactgtaggtaccacagctatgtgtgtgcaatgcatctattatggaattgtgttcccaaaaatatatgttggagtcctcatccccgctacctcagaatgtgaccttatttggaaacaggattttgtcagaggtaatcaaattaaaatgtagttattagggtggtccttagtccaataagaatggtgttcttataaaaggagaaaatttggacacagagacacacacagagggaagacgataggacaagatacagggaaaggaaagcaggttcaagctgaggagaaagacctggaataggtcctttcctcacagccctcagaaggaattaagactgctgacatcttgatctaggacttctggcctccagatctgtgacacaatacacatctgctgtttaggttacttagtctgtggtatattactatggcagctgtagtaaactaatacagaaaccacgaacgactgtatttgaggcgcaagtccctacctaatttgctcataaattgccttctctgaaatcccgtgtcctcaaagggaaatcacgattgcattaaatgggggaagctctcttatagtaccacctctaagaacacataattttattgactatatattatgcactggtactaagggcttggcctgcctcacctcctttatcacctccattttacccaggaggaaacagacacaggtgcactttgtctatcatagataataattcttgctgaatccaggcatgcccctgtccactatgtctgcactaaactagaaatacactctcatgtttacacctttttttttttgtctttttccccttttgtggagaacagggtctcgctatattgcccaggcagttcttaaacttctgggctcaaactattcccccaactcccacttctgcctccctaagtactgggattacaggtgtgggccactgcgcccagcacaccctcacgtttttaaagtcttgaaattctcctatttccgcttctcaaaaggtccaatccttttccttaaacgtgaatataccacataaacgaacacgaaatagaaacagggacaaaaaagtatttttttgacgatggcaaacgggaaaaaaaaaaagaaagctgtttaggtggcatttgaaaagttaaaaaagaaagaaaactcagagcagcccaaaagacagatgatacctaagaaggcacaaccagcaagacatgttgactgttagtattatttcagcatcctccttgagcagcttggctttgctctgggacaatgcaccagcctgggatgctcagagatgcaggcacggaggttgtgcagcctctccgcacactgcgcatgcgcggctgccggttcaagtcgcggtccaggaccgcagggaggcgggcaagcgaaactgagaaaaacccacccacggtccagggactgggggctcgggcgaacccacccagggacctcctgaccaaggccatttgtctgcaacctgatggctagaactgataccaccctgagcatcttcaatcccctttccccactctacagccccttgtactgtccctccttcctcattcacacccctgatccaaactcaagcactgaatttgtccccagacgagggcctcggctctgcgcggccgctggctgagtagcttggcccgattccgggtgtgaagtgaggaggaattgatgcgggtaaacatacagcgccggcccgcgccgcatcccgggtctgcagctacagctgcggcgaaagcccaaggtgcgcgtgcgcggagcgccactaggcagcccaggacgcgcgggctcggagccgggcgaggggccgcggaaggcgcgtgcgcagagcgaccccgggcgcgcgagaaggtcctcagtgcgcgtgcgcggggcgggcgggtgcgcgcgcacttcctcctcgcccccacccagacccagaaggcgccaccatggcggcgcccccgcagcccgtcacccacctcatctttgacatggacggacttcttctgggtgggtagtgtgcagccgccgcctccagtaagggcggtcttgkgtgggcgtggggacggtcggcgcggggtacgtcacggcctgggggccgcggcggggcggtgttcatgcagggacgctcgggctcccgcgcgctctgcccccggctggccccgaagtcgggcggcggccaggagcgcccgcgggcccatgtccgggctggcgggcgcgcgtggccgcggcgtctacgcggccccagcacccgcttccggtcggcggcccgcgcgtggggccggagcacgtgggagcagtccctggggtccaccgggcgggcgcgcggctccgcgtcctctcctcagagcgaggcgcggcgggacctccgcgctctcttttcggttacgcatgcgtgcgaccttgagcggtgcccagcctcagcttccccgtctgcaaagtagcctggaggatacttgcctgcctgctccaaggttgctgctgtgggcgcactttgatggtagcatcctgcatggtagcggttctctacctggcggttttgcagccctgagggcatctggcaatggcgatgtcaggagacattttggctgtcacagctggcgaggagtgatggggtcactggcatctagtggagtccagaccagtgatactgttaaacttcccgcagtgcacaggagtgccctatgcaaccataaggaattatcccgcgccgtcaacagtgtagaggcacagaaggtccgtcaagtggcctggctgcctagggtgaccagcaccggggacatcacctgtgggctacttgtaaatgtagaagctggggccccaccctacccctgcccaatcagaatctgcattttaagcgcgtgaacgtttgagaacagctgctctatcaatccgaggcattaagaaacccttggcagtgtactaaggtagtcagtcttagcacatgtgaacttcaccagccaagaggaattcaagtagaattcaaagaataaaaccctgtttttaactcaagacagaactatgctgagctctaccgaaagccttgacacagttaacactatgacacataatcaccaggaggcttcatatatctataaacatgtctgcatactctttgtagacagctgacctgcttggttacgtatatcattccttcatttcaaaaccctgcaagttaggaggaagtatttgcatgtcactaattaaaaaaaaaaaaaaaaaaaaaccctgcagctcagagaggtaaagctacttgcccaaggtcacacagctaataagccaagctgagaaacgattctggattgatccagttctaaatataaatgatgttgagctcatcttaaattgtgaatgtgaccttgtttctgctcatcatattgctgggtaattccctagcagtgtttccttttaaaaaggcatgcagaaaccattctcttcattttatgaacacagaggtgtaaactgatgaattccaaaggaaaaaaaaaatccccgtagaggtcactaattggagccaacggtgtatgcagctactaaatttgaaatgactcaatttcagaaagcttgtgggatacataggtatagtttgtagacatgaattttcctactccggtggtcaaaaagttaaattgtcaaataaatttcttatcctctaataaaggtccagagaacctgttctgggagtctcatgaattttaataccaaacaagatgtctcattaaaattaaatttattaaacttctaaatgagcttggtgcctaattctgattctagattcacacatagccatgccctgaagtgatgaatgtgacttaaatggcattacaagcattgacctcacattgttacccaatcctctgatctagtcagataaccaagaattagtgctatttggaaaaataagccctgcttctttttattcccycccctcattttctgcccatttcctcctttcctgccctacctcttctttgaggtggtaaggccttgcaaaactttcttggaaatatacctttgtttatcccattctttcaccaaatgtgtaaatataaaacacagctttccaagatgtgccactttaatttaatctaccagattatgcctgctgtcattctttagcacctcacttcagtgtatctgttgtttgcataacaatatactatcaatttataatgagttattttacaataggtctgtttttcgggaattttgaatgcatttttctaggaagttctgtttgtctatgtagccccaatacttgcatacttggggaagtaaaattgaaaacgaatagtttcatggaggattgttaacattagaggagaagattgtttaatcagaggagaatgaggaagtaaatggagattttagaggaaatgttgaccaggaagaaagccaggacactttcccatgcttttgacatgcacgatgctgttagttgtcctttaaaaaaaaaaaaaatacacttcggtttctgtttctcatgaccaaggtaagagtcagttatgatttaggtaatattaataattttggctctcaaatgccattcagagaaagagagtaggggagtgggattagttaaaaactgggatgattttgaaataagaagatgacaattattaaacagtatctcagcagctggacagggaagattattctgtttgtaaataactgaaattaggaacacaaaagatggtcccartttctttaaaagagaagacagtttgttgtccagagcagttctgtctcatagaattgagccaggtaaaaattttggggagcaatttttaataagtaaaaagatacagatgacattgatttggatgatgtatgttatgtaacctaatgtatcaaaaatattatttaatacaaagtcagtataagaaaatctttgaagtgtttgacattaattttgatactaggtcctcaaaatctgtgtgtgttttatacatacaacacatcttagtttgaactagcctcatttcaggcactctgtagcctcatttggtgggtggctactggcttggacagcatgggtctaggtctttgtggagcaacccaagatgtctgttgataatggctatgctgggagggtcaggcagagggtgggtgttaagaatattcagaattaggagttttggtgtatgtaaaatgtggtatgtgtaaaatgtgttttcttggagtctaatacagaattatttaaaatccttttaaaatcaaaggaaaataagcttatttccagtttcttaaatatcgtaaaataataaggtagatctgcgaagggtaataagaacatttgcagtgttgaccataatataccatatctttataaatccagattgcaggattttaatgagtgacttctacttcacctttagtaaaatgaagacctcttctgtgcctttttgcactcccgtagcttcctccttgccaaataatagcacttgagactataagtgcctgcctcactgtctggggcccaggagaccctaaaaggtcatggaggtagggtctctgtggggattaccaagcccagtactgatgggattgtgggctgcctgagacagttgacagtcatgtccactgtgtggccaaaattccacagacatagcgtgagtgtgttttgcgctgtcattctttgttaacttcatgtaggctgtttctttagacaccagaacatctatatagctgatgacaaaaatagatttttcttacgtaatattagcgcatgccctaggtggattgtcagaagaatctatgtatgttgtcatttgaccccatgaaatacgtctgaggtttaaaagtgcagctgacaagcttttcagcctcagtcggttcttactacttgatgttatcaagtcattcattccaagtgggatttctaagagttttggcacatttctgaggaaggtggagcaaagtgaaggatcattctgcatgcttccataggtggttattgtttaaccccagaacgtgcagtgatcctagttggaatgagatcgtaatcacaatctcccctccttccatcatttgtaatgggtcttgctctggatgtcaaagcaactctggtggtaggttcacattctttctttgccctgtcttccctgggggctgacagtgtacccttgggttttacccttgctaggtgaaatgtaggttctcttccacgtttgcaaaggagatggctgagggtggaggccagtgtgagggcttgggacagagatgaacccttatctcaggggccatgattggcctttcactacagggtgatcaatgagtaatctgttgtttctggaaactgaaaaggcttctggaatatagaaagcacaagacacgtgtgttcctattaagggtccgaagagatttagagtaagatgctatattgtatgttggagaaacagcatcagattatagatttagctccgtttggttctgttttctaattgacctgaaccatgccaaccttaagttcttgtagtaagtggttggttgtccactgcagctgtttctgtttctagaataattgagaagggggtaaaacttaaattgcaaaattctgcagataaataataagagttttgtccagctggcaacacaaatattcagcagattctaggcatgcaggtgtaaaatatccttttcttttttctagctctctctttcaaataaaagcaatatggttttatttagaatctttaagtaaactggatacaggcatgtgtgagaactattgtgggttcagttccagaccatcacagtaaagcaaacatcgcaataaaattagtcacatgaagtttttggtttcccagtacacataaggttaggtttatactatactgtattctattaggtgtacaatagcattatgtctaaaaaatgtacataaccttaaatacattttattgctttaaaaaaaaaaagtgctagggatcatgtcatccttcagtgagttgtaattcttttgctggtggaaggtgttgtcttgatattgactgttgaccagagtagtggttgctgaaggttggggtggctgtggcaattttaaaaaataaaacagcaatgaagtttgccacatcacttgattctttcttttacaaaaaaattctcttttggcgaggcatggtggctcatgcctataatcccagcactttgggaggcagaggcaggcagatcacttgaggtcaggagttcaagaccagtctggccaacatggcaaaaccccatctctaccaaaaatacacacacaaaaattagccaggcatgatggtgcacacatgtagtcccagctactcaggaggctgaggcccgagaatcacttgaacccgggaggctgaggttgcagtgagccgagatcccaccactgcactccagcctggacgacagagtaagactctgtctcaaaaaaaaaaaaaaaaaaaaaattggagtcctctcaaactctgctgctgctgctttaccaactaagtttatgttaatatagtgaatcctttgttgtcacttcaacaatgttcaacaacatcttcaccagaaatagatttttatctccagaaaccactttcttttcgcgtccctaagaagcagtgtctattcagttcaggtttcatcctgagattgcagcaactcagtcaaatcttcaggcttcacttctaattctagttctcttggtatttccatcacattctgcagttacttcctctgctgaagtcttgaacccctcaaagtcatccatgaggattggaatcaactccttacaaactcctgttaacattgatattttcatcttttcccatggatcatgaatgttgtgaatggcatctggaatgctaaatcctttcctgaaggttttccatttactttgcctagatgcatcagaggaatcactatctatggcatctataaccttaggaaatgcatatcctaagtaataagacttgaaagttgaagttactcctcaatccatgggctgcagagtagatgtcgtgttagcaggcctgaaaataacacgaatctccttgtacatctccatcagagctcttgggtgaccaggtacgttgtcagtgggcagaaatattttgaaagaaatatttgtttttgagcagtaattcttaatagtgggcttaaaatattcggtaaaycatgctgtaaacagatgtgctgtcatccaagctttgctgttccatttacaaagcccaggaagagaagattcagcatcatttttaagagcactaggattttcagaattgtaaatgagcactggcttcaagttaaagtcaccatctgcattagccactaacacaaaagtccgcctgtcctttaaagctttcaagccagacactgacttctcctctctagctatgaacgtcatgggtggcattttcttccaatagaaggctgttttgtctacattgaaaatctgtttagtgtagccactttcatcggtgatcttagctagctctcctggataacttgctgcggcctctccatcagcacttgctgcttcaaggagctgttcaaggacagagcaaggagcaattctttccttaaacctcatgaacttctgctagattcagacttttcttctgcagctttctcacatgcctcagtccccatagaagtgaagagagttagagccttgctctaggttaggctttggcttaagggaatgttgtgctggtttggtcttctacccagatcattaaaacttcctctatgtcagcaataaggctgtttcactctcatcattcacgtgttcactggggtagcacgtttaatttccttcaagaacttttcctttgcattcacaacttggctaattgggtgcaagagacctagctttcagcctatcagcttctgacatgtgttcctcactaagcttaaccatttctagcttttaatttaaagtgagagatgtgtgactcttcttttctcttgaactcttagaggccattgtagggttattaattagcctgatttcaatattagtgtgattcagggactagggaggcctggaggagaggaagagagatgggggtctatggagcaatcagaacacacacaacatttatccattaagttctctgacttatatgggtgcggttcatggtgccctaaaacaatgacaatggtaacatcaaagatcactcatcacagattgacgtaacagatgtaataatgaaacgatttgacatattgcaagaattaccaaaacgtgacacagacacgtcacgtgagacatgctgttaggaaaatggtgttgatagactttctcgacgcagggttgccaaaaaccttgaatttgtaaaaactacaatctatgaagcacaataaaataagatatgcctgtataatatgggacagcagtgcatcgttttgttttgttttgttttttgagccagaatctatttttctccttgaaaagctatatattagagattatttggtcctttttatctttgcgattattcactccttactctgattctatttctttttttttaaactgctataatttatatactattttctgtcatttttcaggagtagatggagacttaaagcaatgtaaaggagcaaggtaaatgatatctcctaagaaatgtcccctgaaagcactccttatatagatgctcaggcgactggtcagaccttctgatgagatgtttgaaaagtgattgataggcagtctgtaggtagaaagcacaatagtgttattctggaatacattacgcttgaaaataatgctcctaccatcggctataagggaatttcagtgattaataaatgcagcatttaatatattaagagcttccttcaatagtgttaaaatggtggaagggggcaaccttgattttgtgttgcagatatttgcagtttaaaattgccttgttggtgcttaaagagcatttttttgaagacatagtaatcctaacacatgcatttctactgtgtaagagcacaaaaaggaagacttttccccatggcttttcatagctgggccatccatgtggcttctcttcacatcccttttcagcaatgtctggcagatagatcaccacctttcctgatcctcctttatcctctgtctcccttgtgtcctttgctgtgatgccaacagtgagtagcagctaaggaccctggtgcagctggccacgtggcaaggtgcctgcgtatgagaggaggatggtcacctcttcacagccatgcctggcaggcagtttcatggcattgcttgtggcgcttggtggggcccttgactcttctctctctgagctctgggagctgggccgaatgatgtgcccttttgtgattgatggtgccttatttaaaaaacactgcagatgacatagctgttcaaggacagagcaaggagcaaaccaaagtttgctctttgactcccaatagactgttccatgtgtctatgaagtaaragcaaatggtcatagttggcacatcgaagcttatctgagccttcagacaaaagccaaaataagcaccaaccctctctcccacttgtgtcagctgccatgcacatggaagagaagcacatggtccttgagcactgtgcgcctgtctgctctctagcccagcactgtgtatccagcaaatcttcctgccaggatggaaatgttctgtaactatactgcatccgatgggagccacagctggaaactgggttcatgagatgtgactcatgcaactgaggacctgaatttctcgtgttatttaaatagcccccaatgactaattgccaaaacgtaacataragacacaaaatatagagtggacagcacaactctagaggaatgcattcactcatccttaatctatttagaaaatactctgctgggtgttacaaaggcttcaaaattagtctcttcctttaaggatcttagagtcctgctggaatctaaaacatgattggtaaaatctgtgaataattgctaatgatatacacaataagaatgtgttagcaacagtgcaggattttgaactgaaatcacatttggggtagcatactgtcaaggatagataggagccaagaagaaaaatggatattccagaccaggagaaatggccaagccataggcatctttactaaagcatagaagagagtcgttttttgttgttgttgtttttatcaagcaaagactgtattaaaaaaggaaaaagatcttgctaatgattacattgaagtgtggaggtgagaagagatttgaaaacataataatcctaacacatgcatttctcctgtgtaagaacacaagaaggaagactttgttttccccttgggtttgcatagctggagcacctgtgtagctcctcttcacatctcttttgagcaatgtctggcaggtagagattagaaatctctaatgtttcattgagaaatacgagactggggctggggacagtggttcacgcctatcatcccagcactttgggaggccgaggcaagtcgatcgcttgaggccaagagttcgagaccaccccggccaacatggcgaaaccccatctctactaaaaatacaaaaattagtctggcatggtgatgcgtgcctgtaatcccagctactcgggaggctgagacacgagaatcacttgagcctgggaggcggaggttgtagtgagctgagatcacgccactgcactccagcctgggcagtagagctagattctgtctcaaaaaaaaaaaaaaatactagattaatctctgtcaggctaagattagtatttcttaaactgggtgcccattggtaatatccctttagcctattttaaagtgaaaatctcaccccatcctgcaagcacacatcctgggttttccccctatgactttcagaagagtctaggatggttatcgagacaccagcctacattctggatttgtctgattgtttccacatgataccaccttacttgttcctctgtcccctgtatttcctctaatctagaaattatgcctagtgcttcagttggacacaggtcagctgcctctggcaagaataatgctgtgccccttcgtcacctttttggggagatgtttgtattcagtctatatagggtcagtaccttcatgctagccccagccctgcagagtagagttgtcctcaggaaagctggtgaactgactcctctcccatagtggtacatggaactttttagtgagaagttcagagcctgagatacaagttagaagtactggctataatgcctgtgtgtgtggacagccggaacccttaggcaggaagaggaggctgccggggacagaggtgtgccatgctgtgcacccttcgaagagaaggtactcacaggaacctaaataggtttcacgtgtatgggttcctctgttccatgcagtgggatacaggaaagaaagagcagccatgcagctgttttctcactgtgtcggagcacacaccacagtctctttgatgtttgctcatgagattgaaggacactcatggctttgtcacaagatgcctgagaaagcacagaggttttttgtttgtttgtgtgtttgtttttgagacagaatctcgcactgtcgcccaggctggagtgcagtggtgcgatctcggctcactgcaagctccgcctcccaggttcacgcctttctcctgcctcagcctcccgagaagctgggactgcaggtgcccgccaccacacccagctaattttttgtattttttttttagtagagacagggtttcaccatgttagccaggatggtctcgatctcctgacctcatgatccatctgcctcggcctcccaaagtgctgggattacaggtgaaccaccacacccggccttagttttattttttttttttgagatggagtctcgctcttgtcacccaggctggagtgcaatggcgcgatcttggctcactgcaatctccacctcccgggttcaagcaattctcctgccctagcctccctagtagctgggattacaggtgcctgccaccacacccagctaattttttgtatttttagtagagatggggtttcaccatgttggtcaggcaggtctcgaactcctgacctcagcacagagttattaaaatcaaatgcagttgcctacgctttgtctgcttttgaaaagtaaacttaatgtttcagactgaggtgtatttgtcattggggtcctatgttctgcacagtttgtaaatctacttcacccaaagtgatacagtgatactcaggagggcttaaaaaagattaaatccttcatttggaaacatcatgcccagtgaaaggaacacaggccctaaggagatgtggctgattctagggaccgggaccagtaaaatacaacatgagcacagagcactttctcatgccaggatgcagtgggcggggttgggggggggggtcccactggcacaatatgaaccatttgtaatcaaaagaataatgaccagaagagagtataatactctgtctatatattttttaagtctctgtgttatgattctcaaaagagtaaaagggtggctgggggtgagctcttttacagaagaatgccagttaataaatatggacagaatgggagaattagccaggtcaccattttgggatcccgactgtaagtggttcccacaagcattgtcagtggaagccaaaatcatagagtaatcatgcaggagacgaaggtgcccgcagtgccatgtcagaagtcactgactgataacagaggcaaacgggccttcagagcaggcagctctgggggccacaattgaccctgtggcccaactgatgtagctttgccatccagaaagcagcatgtcacgtcacgtgtgctttctgaagtgacctcagaaatggttaacctgaatccatctggacctctagcagtttcagaggggtagaggaacacgggagggggtgtcatgtggaaacagcaagacaaatcctgaatgtaggatgttccaccaggtacctggactgggtccttgaaaatgttgactatcatggggaaaaaataggggctggcttttccacttttaaagaggctaaagggacatagtcaaattcagtggaccttagattggggaaaaaaatctataaaagacatttttgtgacaattggagaggtgtgatgtgtgctatttagggggtactatgaaatattgctgatttgcctgggtttggcagtggtattatggctgtgtaggagagtgttattctgaggagaaacgtgcagagagctagaggaatgaagagttagggcatctgcatgttttcaggtgtgttgcgtgcaggtatagggtatgtagatgtttcctatcctactattgactcttctgtatacttgaaaagttaaaataggaaagggaagattaagtcttaagcatgaaccactaaaaacaaccccaaaagcagtattaagtagtagtcagttaattctgtttaagagacaagaatgtaaagcatgcatctttagaaaattgatgttggagatatggaagaaatagtttcagaaccttcagctctctcgaacattacagtggcaatgcattcattgcaatgtgtattatagcagaaaacattctgaaggaagagtcccatttcctagtgctcatttttcagttcctcgtctctctcatagtgcaggagatttgtagacaaatgtctacaggatttagacagatgtcaggaaaattgtcttttgttgatgtcttaattggaatccgatagtttgtcagggcatgatgcttataaaaggaataaaagctttctaaaattcttcaaagagtagccactggtacctgtgtgtcacatcatatgctgatgagacatgacagaaaatgctcctaagtagccttatagctgatcctgaggagctactgtgactgggctctcactgcacctctcagctgacttctgcctactgggtctgtgtcatccctttttactctgaggctaccaaggtcttaggaaactggaggttggagcttgaactgagtgatgggaggaaaagacttcctgaagtgctgcccacatctcatgtatgttctcttggacccagttgtatccctgccattccctggaggttacctgttcatacgcagacttctctttcccttatttacctcaattgcagtagcttggcaaccttttaactcttgctttttaaaaggaaaattatttggttatcgtagaaacattttgtgcagcaaagtgttacacatatttctgttctggccttaaataatcatggatttcattaaatactaaacattttgctgattttaatacagtgctttagtgtattcttattttctttttgcatctcttatttgcctcgtttatcttaacataaagcatttcctttggttaagtagatccttatatctgctttttctttttgtatgactcctatttaggttggtgctaaagtaatgacggtttttgccattacaatacctgtagacataaaggtctagcttactttttgccatttgctaccctgtgtttagtactggcattttgctgactgctcatcagcttttgatacggtgtgcttacgtgacaagctctttaaagtgaaatcataatcagatttgagatttagaattgaggcgacttgtcctgtctacagtgaaactgaggcaggacaacctggggagctatgaatagtaggaaaatcccagtgaaaatccagcacttctaacttctactcctgggcgcttcatcacttagagttaccagcagtcttggtaccatttgttcatagttttgccagccctcacaggtacaggtacaattgtagatactgaaactctcaccagctgacatctaatttaccagctgatttaattttatctcattgatgattgagaggctctactgatagcccaaaaccactttagcttaggtgaaacatgagctgcgttggtaactgaagcctggcccatctcattgacaacttacttactgtactgatttagtaaaattacccatcctctgtgtccccgagtatggtttgcagcatatcacaggcaatgtgtgacatcttccaggatattgcatgcctaccaaaatataatcagattaaagaacatgttcagttcatatctgacctacggccccattgcactgtttaacatgattttgcaacagagatgtaaccatctgcacatgttatgcatccccttataccattagggtttatgctgagatcaagtaaaatcatatcctctcatagggaggggacgggacttctgtgaagtagcctgaagaaattaacatctttatatgatcacatctataatacagaataataaatgccatgtacctgttgctgtgtttattgcttctgctggctgggactagtgagtgtcccgattttaaggacgtgttttgaaactggcttgtctgtctttctgcctctcttctcagccaagtgtcttgctaaagtgggctgtgtttgccgaactcactcccccattttccttccctcgctatgagctggctttttggccctaccactcacagaaattgttctgacagaggtagcagtgatgtccgtgctgctaggtgcagagggcacccttttcttaaattgccagaacttccggcttcctttgccgcttctgcaccctccttggaaatctttctctttggcttcacggatagttcctcttctggcttccccatagctttcttttcctcctggtgcctgtttggcgtccctatggctttgttatgggccctgtcctcttgtggaaacctcttctgagctcatggcttcggcacatgcttctgctctgatgaccccttgacctccctggctgggcctcacctcttttgagttcctgtctacgtttcccagtgaccacaggctcttcctacccgcgtggccaagaggcagctctgaagcattgtattttaaacggggcctctagttctctgccagatctgctcttttcctgcattccacaccaggcagcaaaccccgaaagccccacagcagatggctgggagttatcttccagtcttcaattccttgccatccccacccacaccttccaggcacctcctgatttataaatatttcaaagccacttctgtgtcattccagctgccatttcctgcttcaggctttcaggcttttttctgatctaatagcaatatttactgagaacctttaccacatgcagttctgttggttacctgcagtgagatcagtggtggctgtggggttttgatgctcatgagggtgaaatcgcagagttctggggcccaggtgtatttgcatgaggtggctttggtgagagcatagccttcaccaggatgtttttggaggtttttctcctagtgtattttcctagattcctttgtcaaaggaatttggtcataaactggcccttaagtactttctaagagaagccttgttcatgtggatcacaatgaccttagactttgtgtgcgttgtcagtgctgccctctcctgggcattgcttctgcattcttaatgcaaatatgtgagttattcctgggtgtggctccatgacttgttcctttctggaagctctagccttatctcagccctcatcttgttaaaccagttgtgctgaccttgcttctctgacagcaacctgataaaagcctgtaaagttgcccacttcaagtcattgagcaatacaggtagccaagcagtagaggtggttacaataaatggcttaacattcccagcatttaggtggctccattcagatggcggaaggcaggtggcactttctgttgtggagaatttgaggagagagctttaagttcaaaaggaatttaagaaaagcctaagttggatctatgagggctctagaggagagattgagatgttcagggtgttccttcgattcatgaacccgactgacttttcacagcaggaccaccagttgccagatactgagacaactgagtcaaatgaatacaacagcatccctgttcttcaggggactgcaggcaggggtgctgtaatttgtacgggggcgggggtggacatgatctgttcttctatattatcatcattcatctgctagagacaactcgattttcttgggagccaggaaaaggaagttggccagtcggatgtgcctcacagcagagcaaacgcatcccaaatgagccaccggaagggttggggagtcactgaggtggaggaggaagggctgagggtatttcaggccaagaggactcggtgagaggcggagcacaggtaaaaaggcctgccaagggcagatggcggcgagcccygtgccaggctaaggaattcacattttatctcgtagccatcatacagcctggcgagcacacgatgtctagaagggtggtgcttctgatgatgtggactgttggcgcttagacactggagactggtagaaggctgttgccattgtccagatgaacgatagaaggactgcatgagttttccacaaactggggggcctaaaacaacaggagattactttatctcagctctggagacaagaagttggaagtcaggatatcagcagggctgcgtttttccttggcttgtagctgcatcgctccggtctcagcttctctccacgtggccttctcttctctccttttgtctcttataaataaggacccctgccattggatgtagggcccaccgggataatacagagtgccacatctccagatccttcacttaatcacatctgcaaaggtcttttttccaaataaggtccgattctcgggccctagggattaggacgtggacatatatttttgggagccacccttcaactgactacaaggacccacagggttggaatgaaaggaagaaaagtggctgattcagaggccgttcagctgacagctgggcatagagggatgggagggagaaggcaggtgaatagcagtgacttgtcctgaagtcgaaattagaggaagctgtgaggcctgaaaatagggatgagttccattttaggcatttggacatgttgagtttcaggaaactgaaagactgggcacctcttaggttgacagcattgatggaaacaaccatgatttcccatttaagacaaacaaaactcttggtgccgttaacccatgaagaaaactgacataggtggccatcgacctacactcgtctttgaacagctacagtacctagaagccattttagtttttacttttattattattattttttgagacagagtctcgttctgttgtccaggctagaatgcaatggcacaatctcagctcattgcaacctctgcctcccaggctcaagtgatcctcctgcctcagcctcccaagtagctgggactactggtgtgcaccactgcacccggctaattgctgtatttttagtagagacggggttttgccatgttgcccaggctggtctcgagccgtgcacccggctaatttttgtatttttagtagagatggggttttgccatgttgcccaagctggtctcaaactcctgractcaagtgatccacctgcctcggcctcctaaagtgctgggattacaggtatgagccactgtgcctggcccctggaagccattttaaacttatttctaagtccccttcctcagagagaatacatgcacacacacagttggataattagcctaggaagggtctggaaatttagccatatgcccaccatgttttgtcctcctcctccttttgtgtgtgtgtgtgtgtgtgtgtagtatgtgcatctctgatacaaagggagcagctctggatccctagtcattctccaatcagcctccgaattccccctaaccctgcatcaaaacctgaatccccccaaccctgtgtgaaagcctgccacttcaggcttaatctttgttgacacgtaagggtgccgaactcacaactttgaagtccttttattctactcccttctccttttctcatcccagctgggttgtaaatgtcagggagaagtagagggcccagtcctccttcctggggtagggagattatttaaccatgggatgcaccatgatttccaaacacagttgattttccagagaagggagtgaaaagaaaagtgctttggaataacctttggactccacgcaccatgccggggataaacatggaaaataaccatttgttgggcggtgctccgtgtcacatattctagtatgtagttttatacccagccattscccttaccctttcgatttttgttagagcgggacggtgccctgcatgctgtgtgctgtctgagtatgacatttctagtagtaaggaaggttaggatggctctttcctttgccttcattaaagttctcttgcccagatgtgagatctttaaaaggtcagtgtttttgaataaggaatgaaatcatattctaagataaaagttcagagagttatacaataaaataataaattagtaaatggcacttccctgagaggcgatggtcactggtcactgttgttgcatcccattcctcttgccttcagggaatatcccctcaggtatgagaatgctcagggctcaaagacagagaagagctgtacgtcacactgttggggctggcagcaaaatgctgagcaaccttgggctctacaacatgtcctccatggaggtcaggctctaggcctgttctgttgactgctggagtctcaacattcagaacacgggtccaacatggcatgtgtattgacagagaagcttcaggtaatttttatgtccttgaatgaatgggyacatgttacatgacagagcagggactagatggagccaatatattagatccccttctctccacacctcattttctatatagtgcagccagtatgagaatataaaatggaaaggaagaaggcatatcattttgtatgtgctctatgatctttaaatgttattaaatgttggtaatgaaatgctgtggtataactaattatatcctagcacctctttcccatatacttgcattctctaattatgttcaaagcaatggttgcccgaaggctaagggtactcggtcctttcctcccccatgaggactatgttttagcttgtaatttcacctgcaggagctcacaaaccagctgcatttgagtgcaattatactttattcatagtgactaataacagaaaagagacatcgtgggggtttgggctggagatttataatctcatataaaaaatacgaattcttgcttatttatgggttgagcaccttgggcccccgctgtttcatctgatggctgcctgatttttatccgcaaaatcattcattagtatctacactagaatgtaaacacagaatgtaagataaatttgttgtgcagtacttggatagttagaacacatttccccagatagaaacattaaaactagaggttattcactcccatattcacacaacctttatgcacctgaggaggttccgaatgtccctgaccatctcttatttcttatgggaaagtgtttgggtaccagcttggaatgccaggagtgtaattctccagggcagcgactgccgcccgtgccattgggtccctagccctttttcatgctctgctttctgatgagcttacacacacaggcatggtgtactgtgggtgcttagtattgctgtaggacttcttgtgtcctgagttcaccactaccctttaattctaaacatttataaactattgaagttagattcaaaactttcttttccctaagcttttactttctgcttattctgcttataaattagtaaatgttggccgggcgtggtggcacacatctgtaatcccagcactttggkaggccgaggcatgtggatcacttgagcccaggagttcaagactagcctgggcaacatggcgaaaccctgtctctacaaaaaatacaaaaatcagctgggtgtggtggtgcacgcctataatcccagctactcgggaggctgaggcatgagaatcgcttgaacctggaaggcagaggttgcagtgagccaagatcataccactgcactccagcctgggcaacagagtgagactctgttaccaaaaacaaaaaatctagtaaatgttaacagtcactgttcagaggccataacagtgtttgagtctcaacctttacaattttttcataaacttcacctttatactgttaactcacacttacaaaactctaatatattttatttctttgttgagtacttcagttgtctgaattaaagaatgaaactcttttagtcaataatcatcttaaacataataagtttataaaaatgatgaacctaaaattcttaatatttcaacatcattctgatcatgccttaaattgcaaatgtaaataattcaggtatgcatttaaatggttatttattagcattattgttctcataggccaaattcaattaaaaagtacaagtaataaaataataagtaacatggaaaatgtattcagtggtcttgctgcttttaagcatccctctaaatgatttgggagttgagagatgtctgttcattaaggaaaacagttccctcccaggtactttacattcccatgcaggtgattagagttttcatttcttaaaataagtaaatatctttccacctaactccagtaatctttgaacttgggaggaattctccattcttttatgcttctcaggtcagtacaagtcgtaggtacagctattaaaaggatatctgattgaattctggatatctttcatgtagtttgactgacagtaacacctcatagggccacattactgacatagttagaacattgtgctagccttagttatgtgtctgccaagcccctagctgttcaaagaaaaggcggtctcttaccagctgtccttccctggtaattggagctgtggaataaaggtcagttgctctttgagaatgtgagtgagcatttctgactcctcatccttcagtgcccccatgtgtggaaggcttggtaaattgagctgtgcctgcagttaccaagctatgcctccttttgtcaatataattcccactttgctactttgggtaccagaggtacactctgcatagcaggaaccataccctatgctttttggttcttttgagaaatcctaggtagaattagatacataaaatctgagatactcgaaccaatttatacatatgcaaatatgtattctttaaaaaaggatcttgatccttatttcttagtgatcttcttcatcccttccccatgttaagatagcaccttccattaacaaactgctcttgccttttatataaaaaaataaaaattaaaaaaaccaagtagatgaagatgaataacccagtgttacgggctgagtcatgtccccctcaaacttacgtggtggaggcctaaccccaggacctcagaatgtgactatatttggagataggtctttaaagggctaaacaatgtcctaatccaatgggactggtgtccttataagaggcgattaggacacagacacactacggacaaccacgtgaggacacagggagaggacagcatctactaaccaaggagagaggtctcagaagagaccaaccctgctgactgactctgatcttagacttccagcctccagaattgcaagaaaattaatttctatgtaagccacccattttgtgttattttgtgatggcggccctagcaaacttacagtcccaagaatctaagatttttgattgtgtgaaggatcaagccatctggaccaatgttttcctgaatttctgggcagacctttccaggaaggtggkcagcaaatggcccaggtctgttcagttagaggatcaccakagaagtttctccattctcagctcctatcatctttttacagctgaattttctgacattcctccacccccaccagcacacaaaaataagtgaaccaaaagcataacagctaaagaaatattcctgtgacatggtcactcatgtgtctttaggagagaagcactttgtactgtgtattgctgtttatattcttaatgtttttcttacatttcatgatgatttacattgccctaaattttttaaaaatgtaattttggcattgtcttcatatatatgcatatatccctggtggtaattcctaacaggccattgatagggaatgctaagagtaaggatagtgatatggtttggctgtgtccccacccaaatctcatcttgaattgtagctcccacaattcctgtgtattgtgggagggacctggtgggaggtaattgaatcatgggggcaggtctttcccgtgctgttctcgtgatagtgaataagtctcatgagatctggtggttttatgaaaaggagttttcctgcacaagctcgctgtcacgtctgccgccaagtgagatgtgcctttcatcttctgccatgattgtgaggcctccccagccacgtggaactgtgagtccattaagcctctttttctttataaattacccattctcaggtatgtctttatcagcagcctgaaaatgactgatacagatagaaatggaagggtagcggagggcctgtcaccttcactgaaaaagaatagaagtgattgagttttggtaggaaagatgatctttaaataaagcctttgtgcatgttgtggaggacagttgctggttttcattaattcaaaaggcctagggatatgtgggtttggcattaatctataatgcctcagacactggaaaactagctctgagaagggtttaggcaaagtgacatccatctagagctctatgtttgtatatttagctcttaaaattcaaaaagaatttagattattgccattagctaaatggaagcatcatggtgcatcaataggaaatgggaaaaaaaatgattaatagtatttatacatatgtgttattctgtagcaataacgaaggcctagcatgctggggtttgttttcattttgtgaggactatactgtgctgttttttagtaaactggtgaactgcctcagataaattgtcacacatagttctgtaaactctgcctgtagctttcattgactttaggttgtgaatgaaacgtttaaaagtttatttttatgttttttttatgtttttttttttaatatgtttgaaagtcattgtacagtagcccgatgagggaaaaacaaaaagatagccaaagttactttttttttgagacagagtctcactctgtcgcccaggctggagtgcagtggcgccatctccgctcactgcaagctccgcctcctgggttcacgccattctcctgcctcagcctcccgagtagctgggactacaggtgcccgccaccacgcctggctaatttttttgtattttttagtagagacagggtttcaccgtgttagccaggatggtctcgatctcctgacctcgtgatccacccgcctcggcctcccaaagtgctgggattacaggcgtgagccaccgcacttggcaacaagatagccaaagtttcttaaatgccttctatttctattgctgctgtaacaaattaccacaaactgaggcctgattttaccaatctcttggtaaaatcgggtgttggcaaggctctgtttgtttctggaggctctaatggggaatgttttcttgccttttccagctattagaggccacccacacgtcttgactcatcttcaaagctagcactgtttcacctctttgaacatacttttttagtgcagacgtttgtagccataatttccctccacgcagtgcttttgctgcatcccataagttttggtatgttgtgtttccatttttattcttctcaaagtatcttttaatttctctcataatttcatctttgacccacaaatttttaggagtatgttgtttaatttccacattatttgtgaatttcccaagttttcttcagttactgatttctaatttcattgttgattgggaaaatatatgatttcacttctttgtaaacttattgagacttatgacccagcatatggcctattctggataattttccatgtgcacttaagaataatgtatattctgttattattgggtcagttttgtatagatgtctgtcaagttttaatggtttacagtgtgtaagtggattaaatcaagtcttgtatttgtcttccgtctagttgttctgtccattgtcaagtgtggcattgaaatctccagctactattattggaatcagctatatcccctttcagttttgacagtttttgctgcttgtattttggggctctgtggttaggttcatatatgtttataattgttgcatcttcttgatggggtgacctttatcactataaaatgtttccattaaaattgtttggttttttttagtgaaatggtttgtcctaagtctactttgtctgatattactatagctacttcagctctctttgggctgttgtttgcaaggaatctcatttccatcattttactttcaatgcttttgtaccatttggtctaaattgtatctctattgtagatatcatatagttagatcatgtcttttttaaatccattcttcaatctctaccttttaattggcgtttttaatctatttacatacaatgcgattattggtaagacaggatttacatgcggcatgctgctgttttctgtgttaagtcttcttgttaccttatttctttattactgccttttttaactttagatattttttagcgtgccattttaattattctgtcctttactgtatttcttagtgattgctctgtggactatgataaacatcttaaccacttattttaagtagttcacaaacctctgctcctatgtagttccgtttccgactctcttatttctgttgctgttgtcatacaaattacatgtttataccttgtttgcccatcaacacttataatttacttcacacaaaatttgatttacaaacaaaacataacgtttatactgtctttaatatctcccaaggggcaaaagcaaagcccagttgtgagccattgccttaaagtataaaaaataagtgttacagcattcttgtcctttatctcattttaaggtaacttagcacgatttagaaagatcaccagagacgtttttttaattggttattggataatgagaccccaaaaaaccctggataaaaaatgttccatttttaagtgtttccaaatctggcttgatagtttccagaacaaaaaataaagtaaaactttataacaatttttggtataaatacttcaagttagaactttgattcattaatctttattcaaatactgaaagtatgttgagaaggaaaatatatacaaactcataacgtaactctagtaataatctcaagtgagtttgacctggggagaaggtctgttcagagaaaggtgcatgtaatcgggtgatgagaatctgaatttgagccagctgtatccacacagtctttataagtcatccctaacactcagagcaattgcgcgggatagctgtttgccctggaaaaaagcttgactcttgctggtggagcccagattcaaaacgggggcagggggtggttacaaagcatatcaatctgttatttcatcacatacctgctgccttcttaaaggaaacaggaaagcattctttgatcagcatctacagggtctgagattctgctttgaaaaaatccatgtaggaaaagcgagaaggaaaggaagtacacaggaagggagagccaattcatctctgtgaccagaaaaattaaaagttctttttgcactggtcatctactgccaaatatgtgcttttaaatgggagagagaacaatatgcatgtacatagcagtattattcagtatcctgggctttttcctcttcattatggttatcagatttgtgtgcaaatgaatgtaaacacacacacacacacacacacacatatatgggtttttttttttgagacagggtcttactctgttgcacaggctagatagagtgcagtgcagtggtgcaaccatagctgactgtagcctcgaactcctgggctcaaccgattctcttacctcagctccccgagtagctgggaccagaggcacatgctaccacacccagctaatttttaaatgttttttgtagagacagggtctcgctgtattgtccaggctggtctcgaactcttggtctcaagcaatcctccttgccacagcttcccaggtgcctgggattacaggcatgagccacagcccccagctaacatattctttaaccccaatatctacaggatttaagactctctctgttggatagctcaacttaaagatatggtagagctctcctgaatttataaatccaaatcaacagttatttattctcccaagctagggacccaccctccttatggtcgcagggggttccctggcacactgcatgctagttagaaagccctcacactgaccccaggctcctccctatatgcctgtaccctttggccacctacctgtggatcttttctctctgggagcctccttgttctctgtgtttgggacaggctgtcaccttctgtcaactagggtaccttgctcttaaattatcccttcaatcccacctccaccataattaaagttaaaacagtagtgggacctgcttttagcctgcagtgtgtgggcgtggagggaaggcaccctgaagctccagggaaggaatggcgccatactttgtgcgctcaccagtgccccagaaaggatggcactggggacaagagccccaaaacatgggcatcccctcctccctaagaaggctcaacagagggtccccttcagggattccatcaataaagaaagcacattttatgaaggggagttgagaagtcccaggaagatttcctcacattggattccaggggtcatttatgagtgttgtgatggtcggtgggtattttttgtcattcagggctacttctattaacattgtaactgttcattttttcccaacctaataagtttttctttttaaaacaactttatggaggtttaattggagtacaataaactgcacataaagtatactgtgtgaccagttttggcatgcagttaccgtgacacagttcccacacccagatgacaaatcttcccacaactcccagaagtttcacgtgcccactgcaacccctgcctctctctgaccccatgccaaaggaaccactggtctgcttctgaaattaaagatttcctagaattgtatatagaaccacacagtatatgttctttttttaatctggcttctctcattgagcataattttgggaactcatgtcattgtgtgtaccagtagtttttatgccttttattcagttgtgtggctgcaccacaggctgaatatccattgacctattgacagtcttggcttctttccagtttttagctgttacaaatgaaactgccataaatatctgtgcctaagtctttgtgtaaacataggcttttctttcttgagtaaacatgtaggactggactgattccttcctgaggattgtatggtaaatttatagttaacttttaaagaaactgcccaaagagttgctatgttagccttttattactgctgtaaccagttgtcacaaacagtggcttaaaacaacacaaatgtattgtcttacagttctggacaccagaattggtctcagttggtaaaatcaaggtattggcagggctgcgttcctttctggaggctgtggggtattggctgtttccttgcctctccagctcctagagtggccgccattcctgggctctgactaccgctcctcttcataccttctctctctccctcctggccgcctcttataaggaccttgtgattatattgagtccacctggataatccagggtcacctccccacctcaagattcttaattacttttgcaaattccctgttgccatggaatttaacattcacaggttctgggaattaggacttggacatctttgggggacaattattctctctactgcagattgcgtcatcactgagttgtaaagttcagttccttacgtattctggatacgagtcctttgggtgtctgtgtgtgcatgtgtgtatgtatgtattgtaaatattttccctcagtctgtagcttgccttttgctttcttatgtgtatgtgccttttaattttgaagaaagcccctttatccatatgttctcgtacgacccttgctctttgcgttctatgtataaaaccttcacataatccaagcctccaagaatttttctcctgttttctttacagaggtttatgatcctagggatcaatatttttccccaatacagatatgttttcatacagataggtatggtctagcaacaccttttgaaccagttcattttttaagtgattttttaaatttaaatatggatgagaaaaaaattcttagaccaattcccatacctattaaatagaattgctaatgcctgtgaattatgccacatgctaatcaagagttttactttgcagatgatcactcaattatctttacagatctctattttaagcaatcatatttattattttttctctacagttcaaaaatgatagcttacagctacaggaagcgatatatcaaatacttaaatacttttttctaagcccactagagcaagcttctcatttgaggcaatattactgagactcttaattttatgcttaattattcatttcagtcctttaaattcctaaacacgagaaagcactagcatttacatgcaggctcatttgtaaaggtgaaacagtgacagcacggtgctgtggaagtttctatcctgtatatataaagcacaaaatacgttagtggttgtagggaaaagcgcggtagtgctcacagcgtgttaacaacttgcaacatttgttgaagaacagatgattgcacttctcatcatttgatgttctcatcaccgtgtcttctcccttctcatactgctaggaatttgtgcttggcttgtaacattgcttctgcctgacttctgttttcgggtctgagaggacatttcttagataataggtcattgaaattagttagctgaaggtgacatatggataggtcttcaggtgagaaaaacattctgatttacatagtgatgtattcttaatcactgtttttgcaaggtttctctttgtcagtatttgtttcaaaatatattaatgaacttatcatttctgattactgatttatttaaccttgtaaggactgtctccatgtcagttgtcacatttttcttggtgcctagcacaaagtaggtacccagtcaacatttgtttaattaaactgattgtattctgagcatgtgccatttctgcatacccgggatatctggcttctcgagatttttcatctatgatttgaatcaatattacatgttatgtttacttgtgtgacacaggatggtcccaacttagaaatatttgtctcagaaggggctctgtgctcagtcactggaaacctggactgaattttaatttaaggggaaagtcaattttaggttcgtttggattctagttcatagcattacagttttgttcttcagtttccacagtgtaaatgaaataacacatatagcagcaaggagcagtgagccagtcatacgggtgcagtacagtacttaaccaaaacaagcaaaccataccgttaaattttgaaccaggtaggtttgggttttctcctagtttatagacaggtatttattcatggaaggcaagttggatggagattgcagaaaacctaaaagagaggaatatattttgtgtttttggactttaacagcactaactttgatttccttttcctgtgacatacttacctctgatttttgctcacactcagcctcactgttctatagttttggagtgtttcctgcaaatcacagtgtctttctgctatacattgggataagaaaatatatacatgaattagatctggtaatggcaggccttgagaatagagcaaagggtaaaacccaaatatgtcagcatccaagcccacataagtgtgacagttctccagactgtgttaaagtttcctgattgtattaggacatattgtattgctataaagaaatgcctgagtccacgtaatttgtaagaaaatgggtttaaatggctcacaattctgtaggctatacagaaagcaagccactaaggcgtgtggcttgtgtgcctacagagcaccaggatgagctccctttgagccctggctgaagcaggagcagtggggatgaggggagcagtgtcctgaggcagctgggccctgggcgtggctcaggaaaccacccttctcttctaggcccctgggcctgtgatgagagaggctgccttggagacttctgaaatacctgtgagacctttcccccactgttttggtgtcagcacttccctcctttttagatatgcaaatttctctggcaagtggttgctccacagcctgcttgaattcctctcctgaaaaagctttttcgttctctgccacatggccaggcagcatatttcctaaacttttttgctctaccttccctttaaatataacttccaactttgtcatttctttgcttctgcatctgagcgtagtctgttagaagaagccaggttacacatagcatgctttgctgcttagaaatttgttctgctagataacctaaaggattaccctgaagttctaacttccacagaaccctagggcatgaacagaatgcagccaagttctttgctaagaaataacatgtgtgacctttcctccagttctcagtttctcatttccatgtgagaccttgttggcctggacttcaccatccatatcactatcagcattttgatcacaaccatttaactgttctctaggaagctgcaacttttctctcatcttcctgtgttcttctgagccctccaaactcttccaacctctgcctgttacccaattccaaagtcacttccatattttcaggtatccttgtagcaacacgccacttctggtaccaattttctgtattaggccgtgcttgcattgccttaaagaaatggctgagtctagataatttagaagaacaacggtttaattggctcacatttctgcaggttatacaggaagcatagtggcagctgcttcgggggagtcctcaagaggcttacaatcacggtggacgggtaagcaggagcaggcatgtaacatggcaaaagcatgagccagagagagagttggggggaggtaccatgcacttttaaaccaccagctctcatgtgaactcagagcaagagctcactgatcaccaagtggaggatggcccaagcgaaggatctgcccccatgatcagtatacctcccaccaagccctgcctccaacattgagggctacaattcagcatgagatttgggagggaataaatatataaactctattactgaccaatgcagtttctcctcataaacactgacctgatgcagggtctttttggcgtagagggggcatggagattagttcattctgattggtcattaccaaaggctgggcaagggcatgtggtaagggatgcaggagtgcctgtggaatatrgaatggtgaatgaggctgagcagggcaggggtcccagggcccagagagaagtgcctggcccaccatccacctgggaacatgctaggggtttgctaacggatggccaaggtggctgggaagaaaccaggaggcaggccagggtaggagggcagccacactcatcccatgagtctagtcggcagcccagggtccttggccagctcaatgacttatctcctttaagggacttgattgtctcaggcatgcctacagagtttccaccgccagccagagagccaaaatgtttcccaagccaatcccatgagatgcctcacttctagtgagccacccccagcccccacaacagcctccagtcagggcccacctgaagcctcccttttccaactgtaaagctttcccagctccccaacctgcatttgagcttctgccaaaggcaagtgctggtgtccaactttcttgctatgcaatctctgaatgaatagcctctgctcgttctcatttgaagagattttcatttaccttcacacatggacagttatctttataacttaactcagtgcctcctcatttaccagaatctggtcttttcgtgggcttctcttgtcttcccgcaaatgtaataatgccttcctatgacactaggatgctttgagcagatagactcttccagtccatgcaaagaggtggtgtggtttggcctcactcctcactgcaggcttaggccagctcccccttgcagccacgtgcgtggacgtgactctgggagtgaagtgaaatagcgctgccgacaggatctgggctctgtgctgtgtgccaggagcatagagagcaatgtgaaacagctgttgcccacagtgacctttcagaacagtttttgctgttagggttctagggattactaagtaagcttggctggttaagaaggtcaaaaaaagcccaaggcaaccccagctgtctgaactagccatttcagaaggctgaaacctttctgctgtgaagggctggatttcctagcttatgtagttcaaagctcagtttttaggattgctgtgctacttactgaccgaaagttggtttttggaaattgacccttattttccaatatctttcataaagctggaaatgctttcactagaagaaaaggaggatcttatgttagaacatatatatatagcgatgtaaaagtttcagtagttactctcaaaagaaggtcaccaaggacaactgtgatttcatatgtaatgattccagcctagaaaatgtttttttcttgatttccatttaagagagttgagccaattaactaatccttgcatatggtatgttccattaagttgtcagtgtttttattccaagatgcatgtttctttaaaagagctagcttattagggcatgtcttcataagcactttaccctggccatgtccgtgagaatgctgtgcataactttcattgaattctacatctcatttgatgcaggcctaattaactattattaactgagaaccccaatttattggaatcatttgctgcagttaacttgagaaagaatggggcatgtttaagggtccttatttttaaatctctctttcattacaaacacattaacataagtctgatttgggggtgacagaaggaaataggaaaataaatgtaactaaaccataatggggtacaatataaaggaaagtaagtactgggatgaatatcatcatagattgtttattctttaatttgtactaatttgtacatttgtatatgtacaattaagcacttcttagttaagattgatatatttttaaaatcacaactttatagagcacaagtcttacatgaaaacataatgccaggtcagtggccctccacttgagcacacattcaaatcactgagagggctctgtaaaacacacattgctaggtcccaccccagcttctgattctgtagatctggggtagggcctgctgtgtggtttgaacgtttgttctctctgaaactcatgttgaaacttaatccccaatgtggcagtattgagaggtgtggggtctctaagaggtgttgggtcatgaaggctctgccctcatgaatggaccctttcgttcatggattaatagattagtgagttgttggatgaatgcgttatcaaaggagtgggactgctggctttgtaagaagaggaggaggctgggcactgtggctcacacctgtaatcccaggactttgggaggccgaggcaggtggatcatgaggtcaggagtttgggaccagcctggccaacatagtgaaaccccatctctactaaaccccatctctacaaaaaattagccaggcatggtggtgtgcacttgtaatcccagctactcgggaggctgaggcaggagaattgcatgaacccgggatgcagaggtttcagtgagctgagatcacgcctttgcactccagccctggctacagtgcgagactccgtctcaaagagagaaaaaagaaaaaaagaaaaagagagagagagagagagacctgagctagcatactcagccccctcaagatgtgatgctctgtgctgcctcgggactccatggagtccccaccagcaagaaggccctcccaaaatgtgtcccctcgacgttggacttctcagtccccataactgtaagaaatgaatgtcttcatacattaccacgttttaggcattctgttaataagcagcagaaaatggaataagacagagtccaagaatatgtagttggacagcatctcacttcatactgatgctgctggtccggggacctcatttcgagaatcaaggtgtttaggaaacaagcagtagaatatcttagatgaacaatactagtggtgtacattttaaataaattgaacaattactgattagctactatgtactgtcaaaatggttcagaaaaatgacaccaccacttctatcaaaatgtactggatgttgggttttttaattaaagcaacttcactttaaaatgtggttttacacacattcaaaacactgctgaccctctttcctcagctgccattaaggtgcttagcccttccgaggaagctaaggccttgtgaagctgtcactcattgggtgactagcaccctgcccggtggcaccagccccgcactcgcccacaccatggcctccatctttgtttgagctcacttgcatctactcggccctcattctacagtgcagtgtggtgaccatcacataagaccgtcgccctcattaaagcagctagtgtaaatggtgaaacttttgggcctgacctgtttgcaagggcctggccagtgtcaacatcgggagcctttttggtagcatgggggctggtggacctgtacctacaggcagttctgcccctgtaccatttccccagccagagtcaacattgggaacctcctctgcagcagcatgggggctgctggacctgtacctgtaggcagtcctgcccctccactgctgccccagctgagcagaaggaagtgcaagcaaggaaagaagcatctgagggatctacttaggacatgggctttaatctttttgaagaaacctcttttgtaacatgatcagtgaaaagctgaactcttggctgggcaccgtggctcacacctgtaatcccagcactttgggagtccatagtgggaggatcactccaggccaggagttcaagactagcctgggcaacatagggagaccgtgtctctacaaaawaaattaaaaatcagcctggtgtggtggcgcacacctgtagccccagctacttgggaggctgaggcgggaggatcacttgagcccggggggtcagggctgcagtgggatgtgatcaccctactatactcaggtgagaccttgtctcaaaaagaaaagctgaactcttaaaacgtgcacacacacagtcagctaacatctttataactgtcagattgtgacaatttgattctaactcaagatcagcctttcttgtagtttattttgtgtctttaaggaactagcctatctaacacaaaacactggctttaagttttttctcttttttgtaattgggaataaaaattatgttcaagatacatcaagattagttttggagaaaaaaagcattaagtagattcagttgtgcaagatgcacaaagtgtaacttcataagtaagcggtcacaaactcgggttcataatccgttacccaaaatctatggagccagatgtatttaaatataggttatttttaaaaggtattagaattcatatgttccatgacacagaacgttctcaggcagcacccgtaatcaaatccattagtatttctatagggaagtgcttgaagagtcgcactaagtatgataaatgtggaccattaaaaccacctcatgctagcccagtacagattttgcagtgttttcagaagcttttgggttatggaattgggaacagaggctgtgtttgttcctctgcagccccggcaattaagaagtgtttgtgaagctggtttaatgtgcctagcaggtgtgatgtattggtgaattccaaataattgatagttttgtttgctttttttttttttttaagcaaaatatttggtaggaggcactttagtttctcaagttcaatagctgtttgctcttactggagcgttgctgttaagggagacagcagatcttgtcaattccctataactcacggttaacaaaagcattccctaatgattccatatgttgatgctcagaggtaattctgggccaagcgctcagagcacaacacagattatttcactccatggacgcaaccgcctagaaggtgtgtggcatgactacatcattaggatcccattttagaggtgtgcaagccaaggtccagcaggcttataagacctgcagtatgaataggatcctcattttataggtgctttacccaaggctgctagcttccagagtttccggctagaaagctgcagagttggggtttcccgaaagaccaccaggctttagaggacctggcttcactgcctgggctgcctgccacctcccacacctaaagcatctccccccgccccaccccacccccagctttaaggccacccccgctctgcaggtcagcggctattaaatacatttctccaataaacatcgtatgttagacaggctaagaaacttgtcccagggcgtgcagctgagctgggagttttctgcaggtctcttgggtccccaaagccctaggtcttgtatgaacatgaggrtaggagcaaaatcaggccttcccatgtgtattaatgttactctgttctcacactgctataaagaacttccctgagactgggtattctgtagaggaaagaggtttaattgacccacagttccacatggctggggaggcctcgggaaacttacagtcatggcagaaggggatggcaaggcagcaggagaaaggggcaaaggaggcacttgcaaacacttataaaaccttcagatctcactatcacgagaacagcatgggggaaaccaccccaacgatccaatcacctccctccctccacacttggggattacagttcgagattgtcaggcctctgagcccaagctaagccatcatatcccctgtgacctgcacgtatacatccagatggcctgaagcaactgaaaaaccacaaagtgaaaatagccacttcctgccttaatggatgacactccaccattgtgatttgttcctgccccaccctaactgattgaccttgtgacactccttctcctggacaatgagtctcagaagctcccccactgagcaccttgtgacccccacccctgcccgcaagagaacaaccccctttaactgtaattttccactacctacccaaatcctataaaactgccgcacccctatctccctttgctgactcctttttcggactcagtctgcctgtacccaggtgattaaaaagctttattgctcacacaaagcctgtttggtggtctcttcacagggctgcatgtaacagatgagatttaggtggggacacagccaaaccgtatcaccatatrtgcttcttaatgacagttggctcaaggtgttttccccgtaaataacgcaactcacagttataaaattgaagataggtccccatttgcatggtaagcaggtacagctccctgagagagcagttggggagaaaccctcgctttttatatctttgttgggtaaaacatcaaccactgtgcctcaggggcggacttagtgagcatttaagatacattttcagttataaaatgttacttgatttgcagcaattacccagtctccrccttagacagaaacttagaggccatcggcctagacttcctccaggcacagggcttccataacagttgaattaatttaagccttaatgcctcccataagcccccgggaactcaggctgcctctgaggatgaaaacacccgccagtctttgggccccagcctggggcaccctgtagcttcttcagagcttccacctccctgccaggctctccccctccccatgctgcccttgcagctactacagaagctgctctcaacatgccacacagattccagctgaggggaggggagtggtcacagtcacaagggatattttctaattctcctaaggagggtagtagtgtatgtggccctagcatgttaaaaacaatatgacctttcctggtaaaaaggaccctgaagcaatgttaaagctgcaagcttgttagtaagcagggaagaatatccatctgatggccctagtgcaagtgttttatgctcctttattttatttcagcatttttcctttcacaacgctgtccctttaagtgtgccatcatcaacagctgtagttatcatttgatctgagtagtttaattacttgtttagatcctttcttattccacggatttaggattattttatctaaatggtgaggaaaagtgtctgtctgcacagtcccctacagatttataatcccacagttctgtgtcttttaaattaaaagctccatgacattttaagctttaaataaacactgttggaagcatttttagaggatacagctgttttcctgcctttgtccacactcctttcttcctgttcgcacactcgccttagtcagagttccacggagcacctccatcgtcctgcctgccctctgttctgttccttcactcggcttttcaaacccgacagtggtgtctcacttgttcgatgcctgcagtttccttttgtcaatcttcctctctcaactactagaacaaacactcaaggaagtaaaatgtgccgcctcactgccaatccgtccatctccttgccctgagagccttggctctttctccccctcacagagaagaagaaaataaaaggagcgctcatgcctgggtaaccctcccttagaggaggcttttcaccactcagctgttgaggaggagggtgggccagcccttccttctgttctgcagcttctgtagggagaccgagtgcaggatggaatccaggaagccttgagttactcaggttgttacttgaacttcgacttctacaaaccagcccagacttttctaagagtcctgtcttttgtactctcctaaagggctttgagccctccattcagggattgggccttcacagtctgcagtatccagaacggtggaggttctgaggtttgtttggtgtgttttacagcaaacttaataaaatacagcttgtggccaggcgcagaggctcatgccttaatcccaacactgggagaccgaggctggagaatcacttgaggccaccagtttgagaccagcctgggccacagggcaaggcatcccatgtctacaaacaaaaaaataaatgaaaaaaatacagcttgtggtagaaaagcaaggagaaaaatattatagtgctgaaaatgaaatggcacctgcagatgcagctgtgggtggatttgccaagaaaagcagagaaagaacagaggagggctcttcttgttgctgttagcagtcaaaaccagagtatccatcaggaggtggagaagccaggggtcttctgcagggaagagggccacagagggggtcagtgcacagggggaggaaggaagatggggagtgcagggcaggggccacccaaaagcccaaggaagagcccagtccacaataaccagcctctcctggtctccagtgtccacagggtggactgggcccagcctcagccccatcccaggaggaagagccagagagttccccaggcaagtgcagtgagccctgggaccaggagagaagcgtgcacagaggcaaagtccacaccgtggcagccaaagcagtcagtgagcccagtcctctgagtataaggcggcaagagccctagccgatgctgcaggtgcagtcaagagatgcagtttggatgctgctgaaggaacatgatacagggccacacggaaaactttttctcaagacagcagcactctgcccttggttcattcaggaattttgcatataggtggtggatatgattgactgcccaggccttgtgtctacacagatgaccattcaccttctgtgagaaagatgcaggagacaaagcacaggtggccctaccattgcagcggctcacaagagaccttcccggcctcctccatgtgtgacacagcgaatcctgccgtgtggtgcaggcagctctctgcatgcctatctgggaggagcagatattttggagttaaaacctgccctaactctcttttttttgaagacataatttcgctcttgttgcccaggctggagtgcagtggcacgatcttggctcactgcaacctccgcctcttgggttcaagtgattctcctgccccagcctcctgagtagctgggattacagtcacatgccaccatgcccagctagttttttgtatttttaatacagacggggttttgccatgttgcccaggctggtcttgaactactgagctcgggcagtcctcctgccttgacctcccaaagtgctgggattataggcgtgagccaccgcgcccgccccataactctcctttagtcgcagttcataccttgccaactttcaaaacacatcgaggcaattacagacaagcatgcatacctatgtgcatgtaagcatgtgaacatacataggagtatgaagacttacatgcctcttggatacacatagccttctctgtgcgtacacgttacttccctcagtgtgtcctgggtctcccagatactatcttacagggaaaaaaactagtatttagggatgattattgtatttgtttatgtcattgtgggacagttaaaggccattgagatcgcctgctcttttcaggacttcttgttgggtccagctgtacagattcaaggtagactacgtcctgctaatgctgctccacaccctgtgggaaggtttcagtgctaaatctagaacaggtggtcagtctcctaactgaatttgaatccagatttttgtcagatgcatccgtgtgtcttcttcttaaatcagttgtgaacagggctatttccagcctctcgggttcagggactgcctctgtgccaccgcagactggaagacaaggactctgcccaggccttgggatagccttctgccttcactggggccttggggggattgtcatcaggcaacactcagctccatggagcttacctgggtttgaaattccacttggtagacattcctctgtgttgaagtatttctttttttttggcataatgcctcctagcaggtcagttagttggttcttcagtaaagtaatctttctaggcccacactggagacagagtggggaagacagctagtgtgtaacaagcatgctctaggaggctggcactagaatgttacttatgtgccctgaaatattcattctgtaaagtaggattatttcactgtagtagcatcctcagtagtattcttattggtaatatgagtgcaattgatactatgtatatattaaatatacatacagaaaaaacacatgaatagaaatgggtgtgagccagtactagttattatattgtatgtagtgtaatctagcgtatattagtggtactggtactattattagcagtattcctgttcatcttgtgtaagcgtgaggaaagcaggcacctgcaggctcactatgtttctgaggctgtgccctgagtaagtgccgagccgggagttaattctcaggtcagctttcaccatcccgtgacagcctgtgcattaaatgttctgttcttacctgggagcttcacagcagcatcctggccaggcatggtggggattcatcccactgggcagtggaaatgtccttaatactagtgggccatgcagtggactttgtcagctggtgctggcttccatgttgttgggaacaccgagtaatgatgccttgtgctatcgaatggaattgaccattccaaggatatatttagattcaaatacgtacatttaaacagaaaacacaataatacagatttcatttctctcctgagttctgaatttccagatcacaactccagacataactccagcagccttgagaggaggctgcccatagtataatttagtgagaatgacctgcaagcctttctcctgttcacttaggtctccacaaaagcctttgttcatggaatgagacctacacagtgtatgtttatgcggacctgatacaaacttactgttcatacagtatgcactctaaaaatctcttttttttttcctgcagatactgaacggctgtattcagtggtgtttcaagaaatatgtaatcgctatgacaagaaatacagctgggatgtaaagtccctggttatgggtaagaaggcattagaggcggcacagattataatagacgtcttgcagctcccgatgtccaaagaggagctggtggaagaaagccaaacgaagttaaaggaagtgttccccayggctgcgctcatgccaggtgcggttgcctcgctgtttgcagggttatgtttgtgactattagcaatggttttgtaaatcacctttaaagtctagcatagggcatgcttagtttgtcctcttttcttcagtatctaaactaagtccctcctggtgctcctgaaagagtttggctgatgctgtgggatgctgtgattcaattttctctttaaaagcttcttaaaataatatgcgttagtttcagtgatttctgggttccaaaaacatttgagtattgtttatattactatatataaagattatgttaatgacagaatgtcttcaaagtttaccttaatagatggttttgcctttttcttttcaaaatcagatataggattaatatttcagcaactattcaaactttaacaaattgataagcagctaaatctccccaaagacgcttaattaaaaaaaaaaaaaagtaaaaagtcgaattcatttttagcctgtgtgtttatatgccgttcagccctttctttacttgtatccagttttcttcggaaaggaaaaacaactttgttccctccgtgcttgttaactgacattcaatcagaacgggcttgcctgacgctccttgttcaagaatattctagattacagaccttgaaaatagactatttgaagatttttctgggatatacaggatgaatactctgtctttagaattcctggtgctaggggagaaaaaaaacagcagttatgtgagtaatcttggatttaaaatgatattaatatgaagcatacctacttttgaaatgtatgttattatttatatttatacatatgtccaaacatgtggattgaccattcctgggcagcacacacacacatgcaaacacacaccctttgtaatcactctgtctgcatccactgaaaatggtagtgtttgtgaatctcaggcatgggtacgagcatcgtgatactcagttctctgcatctagtgtctttctgcaccatttgcacatgaagttaccttgataagtcttggtgaaacacatccatacagttactatatacaaatttaattgtggtaggacacagacacacacactaaaatttaccattttacctattttaaagtgggcagttcagtagtgataagtctattcatgttgctatacaattgacctccagaactttttcatcttgcaaatctgaaacttcgtgctcattgaacaagtccccatttcgccctgccctcaacccctggcagccaccattctactttctgtttctaagatttttactactctccatacctcaaataaggagaattatgtagtatttatctttttttgattggtttatttcacttagcataatgccctcaaggttcatccatgttagagcatgtgataggattttcctcctttttaaggctgaacaatattctatggtatgttagaccacattttgtttattcatagttcatttgttgagggacatttgggtggcatccacaccttggctgttcttgtgaataatgcttatataaacatgagtgtacaaatatctctttgagatcctgctttctagtctcttgggatatacccagaagtggaattgctggatcccatggtaattttattattaatttttgagtgaccaccatattgttttccatagttgttacaccattgtatattcccaccaaaaatctataagggttccaattactccacattctcatcaactcttgccatttcctggatttttttgatagtagtcatcctaatgggtgtgagttgatatctctttatggttttgatttgcatatctgatgattggggatggcaagaatcttttcatttgcttgttggccatttctgtattatctttgaagaaatgtctgtgcacatcctttgcttatttttgatttttgtgtttttgtttttatgttgtaggagttccttatgtattttgaatgttaaactgttatcagacatatgacttatgaccattttctcccattctggctcccttttcgcttagttgttggtgtgcataagtttttgattagatgaatttgacatatrtcatctcatttgtctaattttgctcttgttacctgtgcttttggtgtcatagccaagaaatgattgccaattccaatttcatgaaactttaatttatgttttcttcctggagttttagttttaggtcttacattcaggactttaatccatattgagttaattcttgtgtatggtgttaattagaatctagcttcattcttttgtacgtggatgtccagttttcccaacactgtttgttgaagagacttatcttttccccattgagtagtcttggctggctcgttgaagatcgtttgacaaatacgtgagagtgtatttctgggctatctattctattctattagtatgtaggccagtactgcactgttttgatgaatgtagctttgtaatatgtttggaaatcaggacatgtgagacctccgattttgttctttttcaagattgttatggctatttgggatcccttgagattttttatgaattttaggatgtatttctctgtttctgctcaaaatgccattgggattttgatagggattgcattgaatctgtaggattgctttgcatgctatgaatgtcttaatattaagtcttcccatccatgggcataagatgtctttcaatttatttgtgtctttctttcagtagtgttttgttttgtagtttcagtttataggtccttcacttctcttatttctaggtattttattcttttgatgctattataaatgggattgtttataattttctgttcaacttgttcattgttagtatattaaaatgcaactgatttttgtttgatgtgtattctacaactttgctgaattggcttattggttctaacaattgggtttttttttttaatatgttgaattgtagtgatttctatatatatgatcatgtaatctgtgaacaaagataattttgtttcttcctttccagtttggatgccttttgttgtgttttcttgcctaattgcctggctgagacttccattattatactgtctagtagtgacaagagtgtgtatccttgttgtgttcctgaacttagaagaaaagctttagtcttcattgagaatgatattagctgtgaacttctcatatatggcctttaatatgttgaggtagttttttttttctgtccttaatttgactgtttttaatcgtgaaagggtgttggagcttttcaaatgcgttttctttctgcatcaattgcggtttttgtttttttttttttttggttccttattctgtaaatgtggtttcatatgttgaaccatttttgcattccaggaataaacttcacttgttcatgtatatgatcctttcaatttgctgtggaattgtttgctaatatcttatttagactttttaacctgtgttcatcagggatattgatctgtattttgtttttcatatagtgttttccatgtttggtagggttctccagtgaagccatctggtcctgggcttttctttgtggggaggttttcttttattactgattcagtctccttactacttacagatctgttcagattttctatgtcttcattttttcccccttctcaaaatcatcagggattctctgtcttcatgattcagtttgggtaggttgtgtgtttctaggaattcttttatttcttttaggttatccaatttgttgtcaaaggatatgccaacaaatagtattctcctttatttttgtggcattggttgtagtgttgccccttgcatttctgattttagtcatatgagtgtttttgttttttgtttttttagttaatgtagctaaggtttgtccataaagttactctgtgactgagtgtcttttgtgactttacaaagcactcatgatgtatgaggcatgcacgtgtcttatttcttccatatctacccaagcctttcacatggttttctttctacactttttgttctatattctaagatatacttgaaatatgttctactgcaattcttaaaaagaaaaaaatgttttatctagatagtctggtagtttggctggagtgctagtgaatctgttttatggaatctacttggtgatcccatcaacgtagtgtcttcatttggctttctaagcgagcaggtatcagattaagtaaggtgccaatcatagaaactcatagaaggtgaacaaccagccaggagctagttcttcaaagatagttcagtcctatagaacttatctagatggctctcttttctttctttactactttttgacctctttaacttttttttttttgacttgacaaatcatgttttttggcatatgatttgtgtgtgcgcgtgtgtgtgcacacgcatatacttattttaacttttactagccgctcagttgcragtagggacttcaatactgaaagtctctctttgaaaatgatcatatctacatgccatatacacaattagctgtgctttgacagagcagagcatgcagaagacttgaagagtatacagaaatgcacaaggtaatgctggagagaagaaacttaaaatcatgctgggatgctggctcagatgatgtgcagggacagtggtcagatgatgtgccgctttggtattctgaaacgagttaggtgtaggataagacaaaattattagaaatcatacttaacctgaagggaaagcaagccagaggaggacaatgttggactgaatgtatagagcagaaagacaggccgtgcctaattccaatccagaaatgtgttcttccttagggtttctgctcaatattataccagtcacaaaaatgaagataaaatagctcttctgtcctgaaagaacattcttggagacctagtttccattcattttgcactcctcccatctcctcttttatctgcgccaaacctgaattcccctcggaaggtgaccttatagcgtcattgctctggtgactagattcagagaaacttgctgctgtagtctttcttctaggtgttcattttgctcacttactactttgttcctgttcttaaggtgtagatgataatataacccttgactttgtttcttttccttctggaagtattttctggtagggtatgttaggttgtggaaatgaccttgagctctttagaaaagaaagctgtctgtagggagggctttttaattcaacgtcattctttttcacatgctttcagagcgacagccgaacccaaggaggtatttagcaagttaaattgccggagtgaatggtagattaccaggggaagcagcccctgatcatgctgcaggggctgtgtgctgtgattaggctgcaggagggtgtctgcttgggccagtcaccagggaatcagcttgattatgctgcagggacatgactacctgggccaataaccagggaatcagcttgattattctgtgggggtgtgtctgtcttggccaatcaccgaggaatcagtccaattatgctgcaggggtgtgtctgccttggtcagtcaccaggggatcagcctgattatgctgttggtgggtgggtggtagggggccggggagggggacgggatggggtgaggtgggggacggatgggtgtctgccttggccagtcaccagggaatcagcctgattatgctgcgggagtgtgtctacctagaccaataaccagggaatcagcctgattatgctgcagggtgtgtctgccttggccaatcaccagggcatcagcctgagtatgatgtgggggcatgtctgcctgggccagtcaccaaggaatcagccccctgattatggtgcagaggtgtatctttggcttgatcatggtatagaagtgtatctttgccctgattatgaagcagaggtgagtctgcctggtcatggtataggagggctctttgcctgggccagtctagccactaagaagacaaggtggacctaatggacttgaaagacgaggcagagtggccctgatgcactcgcacatcagctgcctatttgctatcatcacatttctggaaggccctctctatgaaaaggtgggtgggcctacgatgtcctcagtgggaaatccttttgagcagttagttctgtaggcatttcttatatggcttcatggttccatgtaaactgtcggtcagccaaggcttaaattattttaggaaaataaacttttaaattgtggcacaaattttagaggaaaaaatgcatgtggttcatctcttgtgagttttctagggattttaaaaataggtaccgtattacaactggaaatgtatgtcacattacttaaaaaaaatcttcacttaggatatcagaaaatcttgtttaaaacatagcctatgctggttacctccattgtatcttgaacaaatcctttcagtaatgaattccttgggacagatgaaattctacatttcattataactcagcgagggtaatttggattcaaagaccaataagaagaaagttggtgccttttattgtgtagaatcccccaggagttttttctgttgtcccagctctctgctttcccatgtgttttcactaagcatgagattcctagaggaagagcccagggcatggtatctgggccagtagaaaggacagcctgccttgcagatgtgctcctcagcctggccggctctcccctgcatctcttggccggctctcccctgcatctcttggccggctctcccctgcatctcttggccggctctcccctgcatctcttggccggctctcccctgcatctcttggctggctctcccctgcatctcttggcccttaccgcctgcaccaggctctctggtgttaacttcctgccctctactttccccctctcagaccatctggagcagaaaaagcaaactagaaccctggccccctggagagtcgtggatgggtgccagagctccccttaggtggctgaggggagggagcaggtgtggcctgtgtggtagaaaggatgggtccagtcacagctctgcagcggagcactcctcctgctgtccagccccagtccccttaggacagtaggagtactgactgacatgcccactgtggggtactatgatctgaatgtgtcccccaaatctagtgttgaaacttaattgccagtgtgataggattaggatatggggccttcaggaggtgattaagtcctgaaggtggagcctcatggatgggattagggctgtcatgaaaggactagagggtaaggcctgctcttccattcctctgtcacctgaggatacagcattcctcccctctggagggtacagcaacaaggtaccatcttgaagcaaggagcagtcctctgcagagacagacctgctgatgccttgatcttggacttcccagcctccagaggtgtgagaaatacatttctgttctttacaagtgtccagtcccagatattttgttatagcagcacaaacagactaacacctggggcattgctgtaagacaaccttggagcatgtgtggttacacctggcccagtgagtggctcctagcaggcacttgtgtcatctcctaacccaggaggatccagtcctcaccctgaatcccaccttgaggagttagtaaggtcgttctccatccctgctcggcttcgttgaaaagcacacaccagccatgacatggacaccatgcacatgacatgggctctagtcctctttctgtccaagctgtgtcttcctcttgtaagtaagccttcctcctcaggctgacttaggtaattatggttgtttccatccttctactttttttctttttaattttgttcttggtttattttcttacaccgttgtcttcctggctgttaacagatacacccccaccctttccattaggagcatctggcaggaaggcactcatcctctggaagtcagctaacaacttgcctctctttcctctgaactctcgtgcatgtagtgctgagtgagtgctcggggggacacaggagaaaggtctctttcctaatggagtatgtcatccatttggggagaggggacaggcatatctgcagcatccaagtgaaaacccgtggtaggatattgttgcacagcaaaatgagaaattcaggaaagagatgccaaagggatgtagaattaagtaaagcaagatattcttggagtagtggccgctcctggggtagggggtgacctcgggggagtccacaagaacagaagagatacagatgggagaagccatttcaaaaggaaaacagcacctgtggaggattccagtcagccagtgagtttgcttctatacagcatgaagccaagcttctcatggctcacaagcttcagagaggaattgtggctctatgagttgagcttcttattccccagctcatctgtttgctttctggatagggagaaccattgggatttttaaaaggaggcgtgtcagaatgcaacctgcacttggggagaatcctctgggtttgtggcacacaacgcctgcagcctagaagagatgggccagaggaaggccagggtgatggtaaaagacatgcaccccccttgactgggccatgaggtgtccagacggaacattctttggagtgtgtgtgtgagggtttttctggaggagattagcatttgaattggtggattcagtaaaggagattttcctttccagtgtgtctcatgaaacacatcatttttcgcatcatgaaatttgtcactagaggaatgaaaggatgatcttaagtagggagaatatcccttcaggataaaaaaaaaaccacaatcatgatatgcttttttttccattggagacacagtctcattctgtcacccaggctgcagtgcagtggtgctatcatagttcactgcagcctcgaactgctgggctgaagcaatgctttcacctcagcttctggcgtggctaggactgcaattatatgccaccacacccactaaggtttttttctttttttctttgtagagacagagtcttgatatgttgcccagtctggtctcaaaagttctacctcaagcagtcctccttcctcagcctcccaaagtgctgggattacagacatgagccaccacactgggccttttttttttctttaattacacaaattacacttgtttcacacggtacaaaaatgtatagcattaaaattggaagcccttctaactcccactctcctactccctggagataaccgttactcagtgtttaactatttaaggtacctcatttcaccccttgtcttatgatgcctatgtgtttgtgtgtagacccacaggcacacagagatatgctcacctacactcacctacatgcacctttatggaatgaggccgctgacataattcaccaagatccagagcaagtacctatagattaatgggacagaaatcccaaatgctttaattaaattgttagtcaattttttttttttggaagtaggtctaacaaaagtgaggacatctttttcctagctcttaaatgaattgtcactgtggatccctgaaatgctggacatcccttgggatgggaaggcactcagagcacttcctgcctgggagcacttacaaggttgcattagtccatgcagtgctaacatgattcttgtgtcaaggacagcttccagaagacctcagcaggcaagctgtgctgctttggtttgtcctccttagtgatggaggtattgtgctgtccacacccttacagtcctgtagattttcatatgtccacactgacacagtcacatctcttgttccgtctcctgtgccagtggcttcagggccagctgttacctttaggaaccaggaagcacccaggtcagcttccaggccaagaaggaagccagcagaagaattatagcccttggtttataggccgctctgataatccattactttctaagtctgggcagcaggcctcagtgttgaggggcagtataacacctaggtggcaggagcctcacagagaagagggacccatttgtgtacatggcacaaactgtgtctccacctgcctgtcattcctggcctatcctcagccagatttcacagctcggtgctggggctatgccagttagatctacccagggtgttggggcttcgagtctcattaagatggacagtgcctaggaaccccagaacacattctctgtgccatgttcaggaaacatgcacctgaagggtattcatgccacttttccttgttggtgtccactatggtcgtgttggctcacaagcattgaggactcactgcatgtcatgctctcagtgctttcactcgtgggggtatgtgtcagcctcctgccgccgctaagaagcagtcgctcttagcacagggaatggcaggtaggactgcaggggtcaagttacttgtccaaaagcttgcagcctctgattatggaggctggcctcgaacccaggtggggaatgaagagtccatagctcttagccacggcgctctactgccccagatgatgtggcggtgaccttctgttgaggtagacaacatcagagtacaaaggggagaagatgtgttctgacacgggtcacagggctgagccctttaaggccatatataacccatgtggagaagtccccagtgctcggggactctgcctcgtccagctccgtttctggtggtggtctcgatttggggcactcagctgattctcagtcgctggagaggctctgctggcaaagctggacctcagggatttttacttaggcagattgtactccttggataacagcacaattaaaggacacacacaacaagcgaaaaggaaaattgtacgctgacagtcatggtaacacattcaacttacgctgtgttccttttccgtttaacaaatcgaattagccccatgttcaggaaaatttatgatcgtagggaggaagaagcccatttgccagtcaaatgtaaatgtaaatgaaaattcttaccccccttttcctttaaagtatcagcttattggccaggcgcggtggctcatgcctgtaatcccagcactttgggaggtcgagacgggcggatcacgaggtcaggagatcgatcgagaccatcctggctaacacggtgaaaccccgtctctactaaaaatacaaaaaattagccgggtgtggtggcaggcgcctgtagtcccagctacttgggaggctgaggcaggagaaaggcgtgaacccgcggggcggagcttgcagtgagccaagatcacgccactgcactccagcctgggcaatggagcgagactccgtctcaaaaaaaaaaaaaaaaaaatcagcttattcaatgatgtatatggacattattcctcttttctgaatatagtgactttcataggcagctaattgccttgttatttagtaaattgtaatgaagacatcctagactaaggagaataagatacaaatctttgcttctgatcatcctagatattacctcactgcgcatgtggagatgtttctcaaagaattacaatttatattttttgctttgtttgtttgacacaggatctcactctattgccaaggctggagtgtagtggtgcagtcatggctcactgcagccttgacctccctggctcaagtgatccccccaaacccaagcgatcctcccaccttggcctctcaagtagctgacacttcagatgtgtgccaccatgcccagctaattatttctttcttttctgtagagacagggccctactatattgttcaggctggtctcaaactcctgggctcaagtgatcctcctgcctcagcctcccaaagtgctaggattacaggaatgggccaccacacctggcccagtttctgtttctaaatgtgtggtggttctcctgtggatttctaagtctttaggagtataggataatgaacaagagaaatccttacctcaaggacctctcgattcaaaggagaggaaatgagtagataaatgaccacaatgggttgaatcaagtcactgtccctccgggaggggtgtgctcacagcataggacagcactgtggagctgcacagacaggctttgaggggtgttaggtgccagcactctctgcacactgcagtcaggacgagggagtggggagggcagtgacttttaggtgagcatccaggtgtagagcgctgccagcttgccccgagtcccagcacccgctcacagcctcctggcgccagtagtagaaatggttgcacaaagcaaccaatgagaaatactttcagttttccatctgccacacagagaaggtaggagaggcttgcaaagggaatagcatccagtccttttgttacttgggcatggaaagttggggttttccttttgattgagttctgggaagtcagcatgaatcagctttcggttccctgcctccagaccctattctcctgcttcagtatgatgtccctagagttgtcaaatccatagaggcagaaagtagaattgtgattgccaggggctgggggagggggatggaggttttagcatttaatggggacagagtttcaccttggggagatgaacacgttctggacatggatggtggtgatggctgtacaacaatgtgaatgtactgaatgccacagaattgtacactgagaaatcattaaaacagtacattttatattgtaggtgttttaccacatacaacaatagttattctttttcaaatggcaagaagccattcaaggattttggagttgtgttttggcaaagctcctgtgcagatgaggtagaaagcctgtagtgagtagacacaaatgtggtttttcacataagtgttgtggataagtgcatctcctyatccccaacagaatcatacactcttatcagggaagacaggtgtctctcatacgccccaagcacctgggtcatggggacttgggcccagtgtcatgggcaggtttgagtgaggtcaggagtacctygcaccacgcctactctcttgaggtggtttctgcaccacttctatacggtgggacctttcatctccatagcatggtagacacaagaatacagggaaagtcttactctctcctttctagaggattccttagagagtagactgtaagagcaagactttaatatttgagactattgacagagacaccatcaacagaaactcctcacaacaaagctctagccataaaactgaaatttctatgaaatatttgcaaaaaaaaattgacaataggaaactatgatattttatagtaagtagtccacaaattaggttaagaactttaaaattagtttgggattactataacttaaagtattctgttatttttgtcttattgttgaatgcataaggcaaaatgaatccatttttgatgtgagttatttaaaagaagaatacttttctgttacctcttatttgtgaagaaattgaaaactgaaactctttcccaatctttatatcatttgcacttttatgtttgttttgtgacgtagtcagggttgttcttatttgcattatgtaggtgaggatacaggttcagagaagtgaaacggagaaggagaagtttgaccctggccttgtaggccattaccaggctgcttttattgagaacctcaggtatggcattctctacgatgagttaaatgccttcttcagattgggttttataatacttgtgcttgtttaggtaagagaatttacattgtttaatcacgtagagagctatagtagaaaatcaggaaaattgaatgagctattatgttaacatttcctagtttatatcttttcctttggctattaatcataagctatttaaatagctgttttatacatttattttgtagtgatagatccttagaagtagcaacccgaaaagtgattcaaagtaaatgaaattagtactgtaagcagctttctggcaaatcaaagaagacacaaaatcaaatatttttctgaggatggtcagtattttgagatagttggtcaggttctccagatcttaagaaagccaatgaaagaaaaagtccatttaaggccgggcgcggtggctcacacctgtaatcccagcattttgggaggccaaggcaggtggatcacttgaggtcaggagttcgagaccagcctggccaacatggtgaaaccctgtctgtataaaaatacaaaaaaaattagctgggcatggtggcgggcgcctgtagttccagctacttgagaggctgaggcaggagaattgcttgaactagggaggcagagattgcagtgagctgagatcatgcctctgcactccagcctggtgacagagtgagactctgtcttaaaaagaacgaataaaaagtccagttaaatgtgccttccctttgagtttccagagctttccacattctagtgaaacctaggagacctgagttaccacagtcaagtggtgaactaagtgtgtcctgatcagaacaaaatactgttcctcggtatctttccctttcttttttatttaccattgacagctggctacagagatcatataatctccagaaagaatgctggtatagcttctgtgaggacaggaggctcctgacgatcataaagtctttttcatggagtcaccattgaccctttggaagtgttcagtgccacttctttctcatatcaacgtaaaactctgcaaagtcatctccttctcatctgttacataatacaaaagaatgcattttacttgattttcagggcaaagagcagattctgaaactgatagcacatttgcacactgaactcagaatttgccagtggtagtaacctttgtcacatggcggggagcacaagattgtgtctgattgtgtctggcctggttggggtgaagtcggggctagtgggtcgcttacatggtagcctccagcctcttcattgtgacaacacaggagcttctggtgttgaaactgcctgtccctgtaagactgagatgagatgtgaggcatatgatcaaagggtcacttaccagctagctagggggaagtggacatttcctgaatgtcccacattttagaaaatagtacgaaattcccaatgcagatactgtctgggttgtatgagtcttattttactgagttttctttgtaccatgcacagcctattgtaagcgcaatttaataaggagattttaagcatgttggtatatcaaattgatttgatctttatatacatcctttttgtctattagggatttatatgaattcaatttcacagggctaagaaaaatttttttaaatttaaaaatttctgctcctttggttgcattgaaatggtgggtctatggctcataaaatattctatgcatggtaagctaaaatatatctgtatttggatttagctgcataagtacaggaactgaacatcagactttaataaacattaataaacccttatgctatatgtttttcaatgagttattatatagtatatataatatktagatactatatatactttaaattctcaacattgttttgataatttgctctaataaygctctaataatttgagcacttgtagagaatatttagttaagtggttaatggaagaaactcgttggggatttttggattccgtttctaggagggcagttctctcatgaggtaaatttcctatctggtctgtgcatgaatttcttgaagaactgacaataattcttcctattagtgtcacaggcaagggggcaaaggggttaggtgtcaatgcctggctgatttcctgcattacaaaatktacctcttacttttctgtcttcctgatgttaccccctcttttctttcacctcttgggcctgcacatgatttgtttgctatcaggggccaataagctttctctgtgttttcagctttacagaccccatggtatatgtgtgaagcctttagctttgctgtgttaagaagcaagtagctgtaaacagtgcgtgagtgggtgctggtgctgcactccagtcaaactgtctctacagacacagaaagtggaacttcatctcattttcacaggttataagatcatattttttgactcttttcatttaaaaacaggtagtaagttgaatttgtgtttcaaaaaaaaacaaaaggcaggataaaacraagagctaaaacaccacagagcaggttgaaatcccggatgtgaagtagtggagccattgggccctccaccccaagctgtgcattcagaatgccacctggggcagaaaacaggtttatacacagagccagagagacttcagatctccggtgatcaggcacagtggagracgtagataaaagatccctgcaccctgcgctgtgagcccaccaggtcccttcacctcactctcttttatgcacaaccaaaaaagatcctggagaactcttctctggggaaggaagttacctcatgacaacaactcttaaacaccaacatttcgaggcccactgatggaaaaactgactacaggtagtaacttcgagtttggagaaggctcccacctgtgcccccaggtggtgctgtgtagcttactgagaatctgcctggcgrctcagcccccactcttctgttgtggcaacccacatctgaaatgttgtcctctggggaacatgcatcctttccagacactcctgtaatctatatatttgttcctccctttcaagaggcttagaacttaaactttggttgtcatttttgttgatattatgctgttcattcctagtatagccgttttctaaaaggagagagaagcaaggatcatggatcagtagccaacgttagagtcagagagcagtttgcatgcaggttgtcacagaggcacatctagaacacaaggaaactctcatgcattccatgtgcttattaaaagggcattatactgcgaagtactagtctaataattctctgcaagggatttaaaaaagggatcaggggttagtactacttgctagagtcagagggcaatttgtatgtaaattgttacagtggcaaatctggaacacaaggacactcacatgtatcccatgctattaataaaacggcattttattgtttaagtcctagtctagtcattctttataagggaaaacaaggatcaaggatcagtacaccatgctatagtgagagggaaattttcacgttaagttgttacagagacaaatctacagcacagggaaatattgagtcatttttaacattaaggtgtcaagtcctgcctggaggaggggcacttagggtcagtaggatcaggtggagaggcttttcttctaaagtcctagtgcttagcagaggaatgagagagaccattcagtcccactatcacattgtacacctgtagttgcagcactgtgggaggccaaggtaggcagattgcttgaggacaggagtttgagaccagcctggtaaaatcctgttgctacttaaaaaaaaaattacacgctgtagtcctacgtttacttcataaaaactaatgtagaaatgcaaaattaattttccttaaataaaatttctgcattactctctatattactttgtctcttttattttcaatggctgaaaaaaatagttttgttttaatttttattatttgatccatccttaattaccaggcattgatcagtggtttgaattgccctccctggctttccattttaatctaaaattctgctataagtctatgaaattggaccagaacacaagctgtgccatcagtgatactgataacgagattctagagaaaggtgcttctttggctggaggagtttaggccgatcacatttcagtgaccccggagaacattagacagcacctattgccacaaagcaagcagccagctgtgggtagaacagcaaaggcagtcggatgctcatcgcctgtattgccctgggaccagcagaccaaataaatgtaaactggactcttgcaactgtttgtttgaagatttgaaaggagttagtttatatttattttcataactgctttatttctgtcagtatttaatgtttgccaaaaaaggaaacacaggtttcccacactgtctccccatcaagtatcacaaatttgtgtgtcaagtaccagaatttgagaaagataattaagatggtttaaggtcatctcacagatagaacctcagtctatccaagttttctcctccagggtcaacccactgtattagcttcctggtagtgctgtgttaattaacaaactccgtggcttaaagcagcagaaacttaactgtctgacacctcagaaggctagaagtccgaagtcaaggtgtgagcagggctgcactccctctcaaggctctagggaaggatccttcctgcctcttttcagctgctggtagttgccggccacccttagctttccttggcttgtaccttcaactccccaatctctgtctccattttcacacgccctccctcgtcctgtgtgtctttgtctccaaatttccctctcctttctttggatttagggtccaaccttaatttagtatggcctcataataacttgattacatctgcaaagaccctatttccawctaaggtcctattcccacgttttaggtgaacatgaattttgtggggagagcactgtcaagccagtacacctccacccatactttcctactcccagctcagactgccactgttcaggttgccccaggagggccctgagctggggcgcggactcagtcagtcgtgtttggctggagtgttccatgaggttcagccagtcttgccagagccttgctcctcttccagcccctcaacccaattcctttctcctgtttcctttccttccacactaccacactgtcttacgtccaggatataggttagtcactcaattccataagccggatcctgtggtgcaaattccataagtggcgatccctgatattagctttgagttggtgccgggtccctagtaaattaggactgaagatctgcacacagccaagggccctctccctagcagcaagcaccttttcaaaagagcagaattcatttggaaggcctagaaaaaggaaggaggtgctctgccaaaatcaatgatgtctgagaaagaagcatgctccctagagcttggagaagatcagaagagggatagcctgaggcatggctctgcagtaaatcattaagagacgcccactcacagtggctgtggctaccagaggtttcctgtgagggaactaaaaagcgcacagtagtgtttgtaagtgatggttccattttaatagataaacatacagaacttataaaaaatcaagaatctatattagccagatttcctaaattagttaatatttcttttaaatttatacttaaagtcacagtttttaaaactatatatatgaatgtgaatactatatgctttggggaatttgactttggttattttctagtgtcaaggataaacacagccagacagtagttaaagcgatcagcacagattttcttccataatatactattgcaatagagaaaagagaccaatgtgaaactgggctcaacatcaattatcccagaggtgactgggcattttaaagggaaattcagggagtagggaggggtcagcaggggctcagcagagttggggaagtgaaaattgcaraaagcrggaagagggtttggtcagtgtgaagccatctgggtttcactggtgctgatagaagtcaggctcctgcccttccacagaggcttgtctgcaggagtggctggaaccaacaatcagttattttggcagccttgagttttcgtaggcaagtactttaagggggctagagtcatgtagcggtgtgaccttgagctgttgaacttgttcaagtctttataggccagtgtgggggccttgtggagaaaaagactcagagcagcctgagtagagtctggtccaggagacacttttgtcactgagcatgaccaatccatttatcacaatggtagcagcgtgtcctcatggaattatgtttccttcgataaatcttgaacaagaaataaatgcatcagcgtatgtttttaaaagttaaacagatgttaaacttaaaggaagtttgctaaaatccatttcgtggacccctttgtaaatacctgacctacacagcttaccccttatgatttaaagttaacttgcatccattttatggaatcccaggtgcctgtttgacctgcagacatctttctcccttcttggtcactctctcagggcatcagctcttcacacagcaacagcttcctgcatgtggcccctgactgtccattgatgaccgaaggctcgtggacttgccaagttgcccacgtaaaacccagggttcagagagcgagacaagtccttgcattgtgaagtgccaacaattctagtattccaaagctcagtgttgttcagaacatggtacccttgtgagatcacgtgtgacatttgtgaagaacctggaactgatgtttccttaggaagcctcgcaacagtaagtgctttcagctcgctcaaggaacttcaagtaggcaagaaataagaatggaaaccctgcattactccatcagatcttgaaagttttctcttggataaatgtgcctgtcaatcacatcgaatcttatcccctgcctccatgtgctataccacaacagcgacgtctgctggaccgtgtgtgctctctgggtacacattttccaggaggcagcatcttattagagagtaacaggtctgtcttgtgtaaaggagaatgctaaccgcttcatgagaaggctccccaccatgaactcggataaccggatgctatttttttaacttatttattttttaattgacaaatagaaatcgtatatagttatcacacacaacgtgttttgaagtatgtatacattgtggagtggctgcgtcaagctaatgaacacatgcatcatctcactttctcatcatgttttgtggggagaacacttaaaatctagaatctgagtgattttcacatagccaaatgttatttttaatgacctttgccttaattgtccattcaatatcggtcatagatatttattgagggcccagcatgtgccagccaagcgtggcctcctaattggaaacacaaaccctgagaaactctgagcattgttgtgtagtgcaggggccatcctcacacccccacagccagcattcagcttgcttcataagccatggatggagtcaaaggaaaactagctcaccttcccactatgtatctgaaatcactttctattccatgctgcacacatgtactgcaaggaaaaggaatgattcctgcccccaccactgccttccattcctaagaacagagaggatggagtacgaggatgaggaaaacagacggcaggaaataagcagtttattcactggatgtctgcatggggtcttgggagtgcagaggttgtgactcattcttgagtggaagtttctaaccacatacatacaaccgcaataactgcagccagctgctggaggtgttgtggtgaatcccagcgggttacaagggtgtgaggagcctggtaaagtttccaggaagtgaaagcacatgagctatgtcttcacggcaaagatgcaggtaacagctcagattctgagtcttaggaagaggatggaggccggagggtgacagggtttctctgtagtcctcaggaagtgaaactgcctcacaggaaataaagcaatatcaatcaggcagtttctttctgtgtatatttgaatattgtcaatgttttaaaaatcacgacgtatttctttttttttccttctttttttttttgttgttgttgttgttgagacagtctttctctgtcgagtgcagtggtgtgatctcggctgactgcaacctccgtctcttgagttccagtgattctcctgcctcagcctctcgagtagctgggattacaagcatgtgcctccacgcctggctaatttttgtgtttttagtagagatgggatttcaccatgttggtcaggctggtctgcaactcctgacctcaagtaatccgcccacctcggcctcccaaagtgctgggattgtaggcatgagccaccatgcccagccaaaccggacatatttctaaggaacgagaaagagcagccgtctgtccaccacctgccccccacaactgccttgaaccgcatcccagacagcttggtgtcgtagctgacattgcctgtgtcggccctcctctcctgatttattttaatcctcatatgttctttcttcttctgggaattgttcttttctagcattctgtttttgttttaaggactcagtaacttatatgtctccatgaatactaattattatcatgactgttgcttcctcgcccacttttctctggattgtcatttttttctggcagattcctgtcttctgcctgtttgagtcttcttccacaaacacctggcagtgtctgttctgctcattcacattcaagaacagagcacctgtgtgttcatttcctggggctgctgccacaagatactgaaaactcagcaacttctaataacagaagttgactgtctcccagttctggagactggaagtctgaaatcaaggtgtctcagggccacactccctctgtaggctctaggggaggatccttcctgcctttcccagctcctgggggctctaggcatccctgggcttgtggccacatcacttcagtctctgcctccgtttccacgtggcaaagtgagctcatctcaagatttttaacttaattacatctccaaagaccctttttctaaacaagacagaagtaccatgggtgaggacttctgtttgggggctaccrttcaacccactgctctcagtcacacaaagcttttgaagcataacacctgctgttcaggcagttgcaaaagtagcccctaagaaagacagcatgccaaagcaccttccccatggtggggtggggtgacgggccaggcacccttaggatgcccatgcaggaagtggaggctcagcagaatcccacaggtgtgtctggtcctgggatagcatcagcgtcttctcacaggtagccaggtggcatccatcagctgaccacatcgtctgccccagtggcacgggctgtcttccatgtctcacttcatagagctcttctagactgaggcccaggacatggttctcggcacacagcgttaatgacatgcacggccctctaagcggttccctctcccactttgcgttgtcaacccccggtaccccccacttgattctgttgctcactgcaggtcttaggtastacagagaatgttcaggcttgtagggttctgatggccagatcacccaacaaaagaatgccacgaacacctgagaccgcgcggcagctgcctgtcttctgcctctttcctttgtttaatcctgtttaattgcacatccctgttctcacccaccttgggtctctaggatggaggaaagcaggagcgtttcttcccactcacagtgctgattctccacattccccagttcttcccctggagatgtgtcctgtgagctgattgtttggagcaacagatacctagatatctgtctctctgcccttcctgtaaacccacggaagcacaccaaattctaggagctgggaactggagttcatttatacacataattaaccagcttctccctagaacagaactccatttgcattttttcgtcttttacttctcagggaaagccactgagtgagacaaagtttgtgtgcactctttaaaagatgaaaaactttgtgaaggcatcaggcagttttgaatcaggtgattaggatcgttcattcctgatgatacactggagctatatctgatgataacgacactacctaacatttatctggggcttcctcacccatgtcattttccaggcattgttcttcttgtgaattaattccatgaggaacgttaatcattgctctttgacagatgacaaaattgaggcccaaagagggcgtataattgacggatgtcccgtaatctctgactgtggtcatagtcttgtcttggctttcatcttcataggagtcccaagcattttggagatctcagtatgttgtggtggtgtaaagcagtcgtccaaaaccgtttttgattcattctccatcaataagaatgttgagctgcattccagtctagacacattggtgtgtgtttgtttatctactccaccttagaaataattcacagcaatagaaatgcaagaaggataagctaaaataaaataatcggccgggtacagtggctcacatctctaagcccagggctttgagaggccgaggcaagaggattacttgaagcagaacttcaagactagcttagctaacatagggagaccctgtctctacaaaacataaaaaaatttaccaggcatggtgacatgcacctgtagtcccagctattcgggaggctgaggctggagaatcgttttgagcccaggaggtcaaggctgctatgattgtttgactctgctccagcctgggtcacagagcaagatcctgtctcaaaacaataataataaaataatctgtttaagtttttaaaattaatagcaccaaagtactttaagaaaatttttatacagtgtgttttacagagccatgtgtttaagtgtgctccattttttaaaatattggtttaaaattgtgtgatctagcaatttaaaaatcttgttttaaattcagattgttttgatactcagctttaatcactgtttatatccagacagaagttcatgattggctaattttttttttttttttttgagatggagtctggctctgtcacccaggctggagtgcagtggcgctatgtcggctcactgcaacctccacttcctaggttcaagcgattctcctgcctctgcctcccaagtaacgggttacaggacgcactgccacacgtgactgtctcttttttaaaaaaattagagccttttatctcatccatcagttaggttaaggtttaaattgaaatttagctaataaatatagtcctctgtgatactaatcagtggttgttgcaaactaatgaaatagtgtggcattttagtatttttaactaatggattcaagttctgtagaagctctttaggtggagtacttctacactgattgaatattgtttttatgcgtggaggtatgtgtatgtatgttcatgagatctgtcgttttcttgtctggcttttgtctggttttgggatcagggaagtgctgatgtaaaatgtaaaatgagttgagaggtgttccctccaatttcctgaaaagtctgtttagaattggcattctttttttcttgggaagttggtaaatttaccagcaaggccatttgatcctagatgtgggaaggaggtttttaattacaaattcaattcctttcataggcagaaggctattcaggttatttgtgtcttcttgagggagttttatatctttcaaagaattatctcatttcatctaaatggtcaaatgtgttgccattaatcctataataattaagtttttatcattttatcgatgttaggatctgtagtgatgtctgtcccctctttccctgctaatgttagtacatttggatcttctttatttttttgatcagtttagctaggagtctactaatttaattgctcttctcaaacaactcgcttttgatttagttggttttctgtattctacttttatttcattgattttctctctcatgtttattatttccttccttttatttgttttgggtttaatttgctcttttccttcactttcttaaggtaaaagcttaaatcattgaacttctttctttcaggttttcaatgtggcaacttagatcacttatttgagaccttattatttaacatatcactcaatgccatcagttttcatcgaagcaatgttttagccacatcccagaaattttggtagtttttagttctctacaaaatattacctagtttccctttgtgatttcatctttgacccatgtcttacatagaagtgtaacatccaaatatttgtgattttccacattcctattattaatgtctattttaattctaccatcgttagataaggtattctgtatgattttaagtattttataatttttgagaatagttttatccttataataggatatttcttgttgaatgttccacgtgcacttaaaaataatgtggtttctgctgttgttgggagaagtattacataaacgtcaattaggtcaggttgcttgacagtggttctgaagtctgctgtgtccttacttcttttctgtctacttgttttatcaattactgatagaggagttttaaacttccttctacgtttgtgtttctccattcagttctattggtttttgctttatgcattctgaagctctgctatttgatgtttacacatttagaattatgtcttattgatgaactgatctatttgtcattatgaaatgtccctatttatccctgatgatagtcattcattgttctaaaggcttgtttgttattaatgtaagtaacctggctctcttttgagcaatagttatgtggtatgtagttttctatccttttatcttcaatctatctgtgtagttatatttaaagtaggtttctgtagacaacatgtagttgggtcttttgtttttcttttttattctgatagtgtctatcttaggtgtgtttataatacttataaagccgttacataaggtcatgatctgctaattccatctgtctctatcatttctgtgtctatttctcctgattgtgggtggtrtttgcttctttgcagcatggtaatttttgattgaatgttagacastatgaattctacacccagtggagtgctagattttgcttgatttcatttgctttatttaactttgtcctggaactacattatgatctgtccatgccttccttttaaaaatctttagagggtcaggtgctccagatatctgttaccttatcctgaatgactgtaggtgttcggaaaaaatgastctgttgattgttttgtgtaacaattgacaaagtagggacattaaatcatgacattattaaaataggcatgattatacaattatttaaaataattttaggccaggcgtggtagctcatgcctgtaatcccagtactttgagaggcyraggcaggcgaatcacctgaggtcaggagtttgagaccagcctggccaacatggtgaaaccccatctctactaaaaatacaaaaattagctgggcgtggtggcacatgcctgtagtcccagctactctggaggctgaggcaggagaatcgcttgaacctgggaggccgaggttgcagtgagccaagatcagccattgcactccagcctgggcaacagagtgagaccctgtctgaaaaataaaatgaaattttaggcaaaccgtcacaccttgtgtggatttagatgttcctgttgtgctagtcgcataagttaaaggtaggarggactcctggtatttttgattctttctgataactagtcctctcatgattggctctatgatgacctccatggacctgtgtggtccctgtagttaatccgtgtggctaatgacagtgtgaggatgctcttttcatatggcacgttgctgttgatcagctgtgttcagcagctttcttttgtcccctgatcccttgttaagtagcgctgcagcagtccctcagccacagccttcttcagcatctggtggacgcctttgtgtaatttcctctccttagcagggtgaagaatgattgaagtgttttctgtagaatacagcatttttgcagaaaacaccaaaagcatagtccttgtgtatttactgctctggaaaaaaaagtatggttcagcgaggccctgctgaagggccttccccggtgccctggccagatcccaggtccagtcacctcctgggcctgctctctgcccttctccacgtttcataaggaggcccagcaggcaaagcagcagtgcctcccagtgcgctcttcttctgttcctttgggaaacgtatcgctcaaccgccaatagcttctttgattttttggtttgttttatttgagcagggatgttgtggagctgacaaccgcttttagacaatctgtcctaggtcagaaattcctcaaaaggagcagcctgagagtgtgctgccacacagctggagggactgtccctgcaagaaggtcttatkgtggaggcctcgcccctcacctcagtccttccctcctcctccccaggggcggagaaactcatcatccacctgcggaaacatggcatcccctttgcactrgccaccagctcggggtccgcrtcgttcgatatgaagacaagccgccacaaggagttcttcagcttkttttcccacattgtgctgggagatgaccccgaagtgcagcatggcaagccagacccrgacatcttcctagcttgtgccaagaggttctctcccsctcctgctatggagaaggtaagtgggtgccggtgacacgggccrtgttccacaaccatgttccaccaaataatatccatgtagtgtttgctaaatgtgaaaagttgtggtttgtgctgttgaaggccactttgcaatgctccctagaacttgggtatgtgggcagggagatggtctggttggaagattttgtgaggaatcgtggccgcacctaagtcaccaggccagggagactcagccagaatccactgggtctcagggacaatctgagaagcttacagtgccagaacaaggcctattcagacattttccagggaagcggcggttttaatgatgtggggcttaaaacagtcttattgtctaggtgcaggctttaaggtgagtattcactgcagttcagatgtaaatcactaaaactcacttcccctccccaactgcttatagagtgctcgttggttgctgcagtttttgcttgtgtagtgacgctgggtttttatcgccaagtttttggacttccatccatttctccattggaaagtggcagctggtgggcttgtatgccgtggcaccccctgtcccgcaccacggctgcttgaccatgcagggtatgcagtggagacggcccctggctccctcttcttgttaaataaggctcctcctcaggtgacctgggcagagcgtttagagagccgaccgcttgtggtggctgggcctggctccagattcctctgaccgttctgtgactgccaagatggagtccttggcctgaacgatctgcaggtacagattccagaatcacaggaagtcacccttgaaaggggggctcccgctggcgatgtaagtgtaagcagctggggagggcatccgtcggggagtctctgcaaatgcctgcttcccctgggttcctgcatgtgaggacttttgtggtttgtggggaagagcctttcagtgagaggtctttttcaggcctcacctctcattactaaccagtgacaccaatcacgagctcagggaaattactcagaaaccttcccaataaagcggagctaccggagtagtcttgaaagacctgttttttgttgttgttgttttgttttgttttgttttttgcccagggtgcaacttactaccttgagcctatagaggcagccggaacctgtgcctcagtacacaggcctctgattctctgaagctaagtgggcatccagcaattcagttcagttctgacactgactcctacggttagcccagaccccgaaggttaaggccccagtcccacaagacgcccattgcacgttccaggggccacctgtacttctgattggctacaaattgggggttcctgcaatcctctcttcaggtctaataatcccctaacatgactgacagagctcaggaaaacactttcatacacttgctgctttgttatgaaggataaaactcagggacagccaaatggaagcaaggcattggccaatgtatggcgggtggttgcaatgctcccctgccctctctgggcacctgaccctcccagcacctccatgtgctcaccaaactcaaagctccccaggccccttatgtagaggtttttatggagctttcttacgtaggtgtgagtgatgacatcactgacgattgctcattgaactcaatccaggccaaggtgccctccctggagatgagggggagggctgaaagttccagtcttgtttgtttgtttgtttgtttgttttgagatggagtctcgttctgttgcccaggttggagtgcagtggcatgatctcggctcactgcaacctccacctcccgggttcaagcgattctcctgcctcaccctcctgagtacctgggattacaggcgtgtgccatcacgcctggctaatttttctatttttagtagagacagggtctcatcatgttggccaggctggtcttgaactcctgacctcgtgatccacccgcctcagcctcccaaagtgctgggattacaggcgtgagccaccgtgcccagacctaatcttctaatcgcatatttggtctttctgatgtccagaccctgtcctaaagctatcctgggtccactagaggcatcttattaggttgaaaatggcttattaatgactcagaaattccaagtgttttaggagctccatgtcatgaactggggacaaaaaccaggtgtgtagtttttatgatgccatagctataaacagtcattgaaagacagtggggcattcttagcaacacacatacctgggctgattgaaatctcattcttgatttaagtctcattattgaattcaacttgactgcaattgcttaacgtgggacgtgcctgagacctcccagctagtaagtcagagagtcaaggctgagcctccaggtgcggctggaacagctcccagtgggaacatgtatctgcttcttatgtctggacatgtgtatgtctgcatgcttggcaccctgttacaaattcctctgcaacatgttcatttttccttagaatttcccccttgtggaagaattatkccatagcttcaggctataaagccttcttcccagaaacaccatttttgttgttgttgtttaacctgagttattgttcactagaaaagtgaaggtgctgcactccataaccatgtcccagaagcgatcagagtatgttggcacttgcattcagttctgtatttacaaactgataaagacaaggtgaaatatttgccttgttaacatgagctgttcctatagctaaggcaattaaacggaatttcaagtacaggcagtccttgttttgcaaggtactctgttaatggaaacatggtgtttcatgtggggttttttggttttggttttgttttccttttgtttttcagatagggtcccctttgttgtccaggccataggcggtggtagcacaatcgtagttcactgcaacctccatttcctgggcgtcagcaatccttctgcctctgcctcccaagtagctgggaccataggcacacaccaccatgcgcagccgggtgtggcagctcacacctgtaatcccagcactttgggatgctgaggcaggaggatgcttgagcccagtagcttgagaccagccaggtcaacatagccagaccctgtctccacaaaaaattagccatgttttaaaatgtatatggaagcaaagtgtatgtggaaaccacatgctgccattgcatgggaccagttatggtgaaacccwcagagcaagggccctcatgaggaggaatttctctcacaaggtaccctgcaaagaggcccatggaatgaattgtgttttaacatcttggtgttctcattgacaatgtttgttttagacttgtcaaagaaaaatgagcagttgcattttttaaaagtcatttagcttttagaaagttctaaacattttccttattattaatctacatttacttacagatatatttctcttgcagaaatgaaatgtttcctctcatgcttcttacttagagacagtgacacattgtgggtcttcctcctgtgatgtgcatattgtaataytaaaggaagtttttcccaagctcctgtcagggaagcagccctggttttgtacttggcrtttgtgtcaggaatacaggaggcagtggccaggggccgtgtggacgatcttggagctcttcagtcaggccctgctgctgcttcttgcccgcagtgtgggtgtgagctcacaggagcagcatgcctccagagttcaagggcattccattaaatcatcagtcactgaagagacttctgaatctcttagggaattgccttagggaattgatcatgccataggtgtcaccaggttaattaggcatagtagtagtagtagtcataggaaagtagtcaaaaacaagtaggatcaaagggttattaattatgttaaatattaattcccatcttactaggagaaagtgtccaacagagctgacattaaagaatcaagttttcactgagaatattttctaagttattcatgtatcattattttgttctaaaaaatatcaagcaaacataaggccaccttcagaagccccccagaaaccaccttcaggataatgagcacccatcgagtgaaagcacccgcccactgtgtgccaggcagggtgcgacatctgccaacacatcccctgaaggccagagacccagtgggtagagggcctccatgtgccgaacgccaggtcctgagacttgcgagtgtgagcacactcattgcttggtggggacttgagcgaccaagctgggaggcaccccagggctctctgttcccagccacaaaaatgccatcattgttgtgaaacaaaaatgatggcattgcttacatatcacttctagggttgatatttattacaagtaaaaccagaaatcggaaatcagtttttttttttttttttttttttgagacacagtcttgctctgttgcataggctggagtgcagtggcacgatctcggctcactgcaacctctgtctcctgggttcaagtgattctcctgtctcagcctcccaagtagctgggattacaggcacacgccaccacgcccggctaatttttttatttttagtagagatggggtttcaccatgttggccaggctggtcttgaattcctgacttcaggtgatctgcccacctcggcctcccaaagtgctgggattacaggagtgagccactgttccggctggaaatcaattttttacagcctagccatcactactttgcgtgttttagttttcttgtacttgttagtgttgttttaggagctgaatttcaggttttaaaaaaattatttttgtttttgtttttctgttctattttcaagaaagttatacatgttaaactgcataaacagatagagtagactcattttgccagcctaagttttgtgtatattcggtatctgtctttttttgtataataccagggttgaagttgtgagataatattcacaattaataaacaagggacgtggtagattctactctttttcgtggaaacctgcatatttcttaatgaataagggctaagtccacataaataggtagactgggctcatttcaaccagcctttagacatttctactcatagcccaaactattatgctatcaccttgttaagaatacagtcttacaggtggtggttcatgcctgtaatcccagcactttgggagtccaaggtgggaggatcacttgagctcaggagttcaagactagcctgggaaacatagtgaaaccgtgtctctacaaaatataataatgatgatgatgataaatttgccaggtgtggtggcgcctgcctgtagtctcagctacttaggaggctgaggtgggagaatcacctgagcctaggaggcggaagtttcagtgagccgagatcatgccactgccctccagcctgggtgacagagcaagactctgtctcaaaggaaaaaaaaaaaaaatagagagtacattctgggtggtgacttagggatacaggtgttctgtgaaattctttcaactctgctgtacgctggaccatctctacagtgcaatgttgggggaggcagctctgcctagtgtgacagtcagaccaaaagttcactcaggcacaaattagagcatcataggggaactggggatggcacagggcctgagataaatgctcagcgtttttacagagaagaacagagggtgggattagtgctgaacagaacaagtccaacaggagtgcagccaacacagaatcaatcgtgaggactttggaaaccaagcagaaaagtttacacatggtacaataggcatttgagctcactggaaattcttagaaggacacattggccatgtctgtgttttagagctcagtggagtactgggtgacagattagaaataggcagtaagggaggaggaagtgccaggtgtgccatgtgattccaatgtgatttccttcagggaacttatagttcaattagaaaaaaataagtaatgtcaaaagttataggaggcttaggagaaagtgaaattaagaaaactgtcgctgggcatatattcatatcaacttgtaccaaatttgaagaactttttgcatctctgtgactctttcctagatttaaaaaaactgaaaaaaagatgtagctagttaaaaatacatgtatttttctaatacctgtaactgcatgtgacatttacacaaagtttcatcttaacttatccttatcgtacattgcatatgtcccaaaagaatgcagacaggagcaggcaggctgtcagtgtgagctgacctctgtaactggaacttcttttcctccgagaataatagagaacaaatagctgtatactacttatgtccaatttaaagttaatatttgggccaggcgtgatggctcacgcctgtaatcccagcactttgggaggccaaggtgggtggattacttgaggtcaggagtttgagacctgcctggccaacatggtgaaacctcatctctactaaaaatacaaaaatcagctaagtatggtggtgcacacctgtaatcccagctactcgggaggctgaggcaggagaatcgcctgaacccgggaggcagaggtgcagtgagccgagattgtgccattgcactccagcctgggtgacagagcaagactccttctccaaaaaaaaaaaaagttaatatttggtgaccagctgagctttgctggacctctggttttggggagattagatgttcttgaatcagcttcttaccctgcaacactgagttacgggcacagccacactggagctgctccagagggtgaggaccgtcacctgccattgtttgccaccctctgtgggcctcaggaccccacagcctgggtcctcattgctccagcctcaaggccacctcctcctgtcacccatcatcgctgaacaaaataggcatgcctctgctcacttgtccttggtattatttcatttccctttctcccttctttcgttatttaaaaaaccgtaataacaaggaccttcacggttactgtccttacacttcttttctttcattgaacttgcctttgggcttggtgtcccttctgaatttcctggcacgagggcacttgcttaaaccaaatttcactgtcagaggaaatgtgtttcctctaccctcttaggtgcagtgattgggggcctgtaaatcagactaacaaaagacagactatcaagagtaaagatagatttgtatttacatacaacgaaggagttcacagaaaaatgtgactcaaggaggcagttagaatttcggatttgtatgtcatcttaacatggatgggagagaggcagaaggacacacagaagaataaacttttaggaaaacttttaggaaaactaagtgggccgttaggagactagatggtggataagatagttttataacaacatcttttggggcgatttctcatctaggtgtgacaggtgctgacttcttatctttggtgataagactcacacttccctggttgtgaaactcctgagcattggatgtatgagggctgagggctgaattcttctggaaggctttccttagaaagggaagggagtgcagaagccttctgttcctgtacttgatgcttactgtcttcagctctaataaccctcatgccactgtggcatgttcctcagtccatggaggccccatctgcttctccccaacaccccatcattactcccctgcccccttctctgaatgcccagcacccagcactaataagaggccctctgcctgccgagcgcacgtggcatccttgtttctaaacaaccctgaggtgcccggcccctggttctcaggtcctgcctttatccagcccgagcagccttacgtccgtgtccagaacactagccttggggcatcttgctctcccagatgacctcggtgtccctcagtcttgttcccacattagctgccaggtgccacaatccctgtttctgactgcatcctcgcctcctcacctcgcctcggggggcatttcatcctggcatctgccgctcctgactgctgaaaccacagacatccgtttcccacgctcctctgcaacgtctccctctgctggctgcaccatgcccatccgccctcatccactgctcccactgtttctctctgcacttcctctcacccaggaactcggttcagcaatccccaaatgtcagcatctgtgtgtgtgcaggtgttgttttggtgttcatctcactctgtcccatccccctgggtgatcttatctgctacttgttgtcactgtgcctgactcaaatcttggtttctggacatgggtagagtcctgggcccagtggtctggaaaggggccttgggaaaatcttatgtaaaagttcagccaggccacacttactaggagtctcaatagaggttctcctaccttaaatctactcttggggaccctgctgcttgtctgagccccaggctcatgaatctgcactgcctggaagtcatgagcacctctgaaaacacggccaacactccattttcccacattttccttcagcctgctcctgtccctccaggcaccctggagtccctcagccaaccttgaagcttctcattgcacgaggattctctctcctcacatgccgtctgcagccagcaacctcctttatccatccacttcttaggccctctcttctgaaaacctcccttgtcctcatttgtacgtttcttcccttcctgaattgaggctgtaggtagcagctgctgtgttgacttcaaggtctcattcccagcctgagaacacagactcctcccctgtccccacacccaaatcagaggctatcaatgcacgatatacggaagcagaagccaatagacacagaatccagtcactgattctgtaggtaaagaaacagattcacaccaarggactcaattcccctctgtaagcttttattgaacctttcgtgtacgtgccattttatcagattgcaagatgccaggaataccgagtgatttaggagcacacactgtcatttagttttaataatagccaatgtcatttcttattagaatttagtagttatttcttgctctttgattttcagttcttataaactttggcaaagaaaccctacattcccagctatagtgtggccttctatattagtctgttttcacgcttctaataaagacatacccaaaactgggtaatttatacaggaaagaggtttaacggactcacagttccacatgactggggaggcctcacaatcatggcggaaggcaaggagcagcaagtcatgtcttacatggatggcagtgggcaaaaagagagcttatgcagggaatctctcccttacaaaaccatcacatctcatgagacttactcactatcacgagaacagcatgagaaagacctacccccctgattcaattaccttccaccgagtccctcccataacatgtgggaattgtgggagctacaattcaagatgagatttgggtagggacacagccaaaccatatcaccttctttttcttttcccgtggtgttccccacaaatagagaaggcattcctcttctgtactgttatttcacaaaccctgactgacacttaktctcgtgatccttgtctccatctcctgccactacagctgcagtgatgtcaatggggaggctgtctttttcaccttcaggctctccctctccccttgggyacatcatcagctttgataggaggtggagctgtgctttggccaggtcacagctcagtaagtgttctggcttcttggcagacccacagccacctgcgttcctccagactggtttccagggcttacagtcagcggcagaatctgtcctcctttgatggagagctgctcgtcattcttggggaacttggggcactgcagtgttgatttctagttcacagccctgcagagacctcgacacaggttgcatgcacacgggcccctgtactgttctgcagaattacgccagagctgagccattcctggggcatgagggtctctgggaaaacacaaattagaggcatgaggcccttctgcactctgtcaaatgcagagaagtgaagaaataatttcactaaatgctagagaaaaacagcaaatctcagaacagaatgaagttctgtcctctcataattactcttcatatgtcttgccttcagatatcttctttatgcttggctggagaaattccaggatggcactgtgccctgtgctttgtgtggagaaaatatgatggatgaatccctggtccactatttcccttttaaaggcagatacttgtatgacaatggaaaatgtaacaaaacttcatttaatcagcactgtgtgtgtgtgygcatgcatgtgcgcacacgtgtgtgtgtttatgtgtgtgtgattgatatgtgttatggaaaaagctcatgtctctggaaatactttccagcaaaaaacatctaatagcttaatctttatagcagtgctggttttggccctttaacttccccgaagttgtaaaccaaaaaattgcagtctccatatatgttttattgcatcctctaaaacaggagtccccaatcccctggccatggaccagtactccatggcccgttaggaagcagggcgcacagcaggaagtgagcggcgagtgagccagcattaccacctgagctccgcctcctgtctgatcagaggccacattagattctcacaggagcctgaaccctagtgtgaactgtacatgcaggggatctgagttgtgtgctccgtatgagaatctaatgcctgatgatctgaggtggaacagtttcatcccaaaaccagcccctttcaccccccacctatctaggaaaaattgtcctctacgaaaccggttcctggtgccaaaatgctggggaccactgctctaaaacatgtatttttttatttctggactgtcactcaaatgcctcaaaaaaatccatgcctcgtagttccttgaaacactttttaaaagaactagtagccactattagtacaaatgccactaccctactcggggcatttcattaggttggctggtaaccagctgtgcattttttgtaatgatactgtgttcactgagtctttttgatagcaaggtttcagacaactagccagtaaaaatacaatctagtcactattcccccatacactagtgcatcaagttcgttggtcctgcattaccagttgtcttttacaattgtgtcaattttcaaaatatcttttagcttttaactagtaattattactaataattattggatgttttgggctaaaaccttgctaaatgtttagcatctcatttaatgtagtaccacagattattggcaaatttgggcattgtttctcttcactgcgattggaggagaatggtgtattgaatacagagaacacgtgacccataagtagcactagtgctgtttgtatgtatggctccccaccttgcattgcataacattgctgtagttgaggaatccgctttttaaaagtgtttggcctgggctaatttgcaataaagcccgtgaactctcccacccctggacatgttgtaccttccttgtaccttcctcacccgatctggcctccacaatgcttgtgtacacattctcggacttgccctcacccaaactagaatagggagaataaccagtgaattcagcctcgttatgtttggggatttatgcgaggatcaaggtggcatttcagattgttgtgaaacagatggatcagtcaggaaataataccggggtagatgtcttgccagtggagagggggacataaaccccaaggctctggcttacttccaacactaaggtgaatmctactccaatcaaatattaacatgtaaaactcgaaccaagtctccttctggtgataggacctaagcaagctgcgctaactctccccttaagaacagtgagaaaaactggacaaaaactcgaaagcatctttttgaagggatctgattacccagcaggtagggaacggtgggaccctttacccctagagctgtccccagaagaagtggctaatgagaatgagaagcccgagtttgttttttgttttttgttttttctttttttggtttgggggcaggggggctgaggtgggagaatcacttgaacccaggaggaggaggttgcagtgagctgagatcacgtctcttatatagaacctagtttgaaaaggaagggatattttaagtcttttaagataatgttaactatttttctttctttagctctatttctgtgtgtagctgttttactacaccagaattcagcaagtgatagtttcttaagagttagttgctwtgtggaaattgaagccctatcagtaaccttttcctcctcgtgtatcttcaaatctattaccgagccttaaactttgaatggatcttgtatccctagcttattcaagggttaagaaaatacgttttctgtagaaaagaagacatgttctgtggctcatccagagtattatttgagctgcatgtctatagtttaatcacatactattggaggtcttcctgggagatgctggaggcccaggagtcaaggggctctgtgtgccgttctccaaacacagctctctagaaagaaggttccagcatgactcaggagaggttggtgcaaactgggaccctctgggcacctctcagggacacagactgtccagctggttacggaagcacatctcccacctgatttattcctaaataggagcgaggagggggacaatctttcccttcacccccacatcttcctttcctcttccctacctccctgtattaatactgagaaaccacacctgaacaatgaaatgactaggaactacggtttctggttgtgttcccaagtgggaatatgggctgttcacgacctcggaatgtagaatgccctcattatttattcagtagacatccaataaatgcggatcaacagcttgcctatctttgatagtttttggcagtgtgtgctggttttaatctttgtacttgtcccataagtgaccccatgactagagagtgggctcttccatcttgtaagagccttctgttcacgttctgttctttttatgagaaggaagttccagtgcatatcccaacataaagagaaacgttgaatacgtactgtttttctcttatatatatgctcaaaataacgactgtagtaaacagtcgtcatgattataggatgaattacgcagccattcatagatttttgtagttgtcatttacaagtggactatgcaatagttcataggcttatgaatacataatctaacaatattagctgggtgcagtggctcacacctgaaatcccagcacttagcgaggccaaggtagcttgattgctagagcccaggagttcaagactagcccgggcaaagggcaaaaccccatctctacaaaaactacaaaaagaaattagccgggcatggtggtgcttcccggtagtcccagctacttgggaggcaaaggtgggaaggtcacctgagcctgggggtgtcaaggctgcagtgagctgtgattgcaccactgcacccgagcctgggcgacagagtgagaccctgtctcaaaaacaaacaaacaatattatacttgtagtatttaaaaaacataattatctggtattcccatagctaatggaatgaaaggggagactttatctccctagacaggaagcacggtacctcctacactctcttctccccacatcaactggataggtgtgtgaacgcatttcaaagtcaagtatggttagtaattacttgatctttttccagccccttcagataagctgaattgaacacccaaaagtgatagtaacatcattttcctttgcaattacaaagaccattaacccaacagaatctccatgctttacctgtttgtgatgtttttgttccattttattaagtatgactcctgataaatgaatcactacacaattaattttttctcattctttagattcatacacacagacacatatatcaagcaaactataaattgctaaaatgacaggccagcagtgactacttgttatcacgtgtgtaacatctcttgagggctgctttgtaattcatttgtatggtgttgttgtaccagtgtaactgctaagtggtttctctggttccatgtgcatttgtacatgaagttgtgcaatctccacataccagcagtttcaaagaatgacagtttgcatgaggccatcttaatagcaggtagcatgtaaccaacccatctgaattaagccaccattgcagaataaaacatttgacactaagccaggtatttcagtggatgagttgtattttggatttccaaaaaaaaaaaaaaaaaaaaaaattaagcagtcatgctctcgaataatcttactagacataaacaatactgctagggtaggggggcactgcctttaacaatggtcagagtttcttggtaaatcagtggttttgcttctttgatgtttctaaaacactgatatgcccagttgccctgctctgacctcatctcaccctccccagcttccctccccacccacctcgtaaagcacagacctctcagcctgaccccttgctccctacctcactcattacttctggtttccttttggggccttgtcttctgcctgcccccagtacaatgtttatttttctgcatgtccatctcatcctgacaagcctctccacactggagtgcagccagtagctgtctctgctaagctcttccctctgcctgcatttctcaccccacacacaccttccatttcccagtggctacatacatcatgtgcgattatgcctgtctttcatgacctgcctctgaccagacatccctgagtcatcttccctaaacccactccttcaaatccaccttccaaatcctggtgaatggactgctgtccctgctccagaggactgtgtgcctcaaacagggctccccacagtgggcytgtattagcagggattccccagtgcatgtttcctgccttggagaccatgaactccagggaggctggagagctgtctgctctgctttctgtcttctgcctgcccaagacagtactttatgtaggtgttaatttcctaaaaatatgtctaacatgcttgaattgctgatagctattgattaaagcccagcttctaatataaatatgcatttctgatgaatctcacaaaaaaacaggaagaaacaaatgccattaatttgcagtttatcaatatcctggctagtaattgagatatttagtggcatagtcactagaatataaggtgctagtcccagtcccaacacgagcttgagtaattttaaacttcatagtgaattttttgtaacgtctacagaatggatcaccattatcataataatagctgatagcgacggagcatgtcccatctgccaagcactggatatcgttgattcattcatttataaaatttgaagttggtgggagggcatatttaaagactgctacctggaatagtgttatttgtcagagattcatttgtttgttctccacattcttcaatatatgaattattccatgcaattgaacagctccccaagtacgtcatagttatgaaatgttgtgtgttgactttggaaggttacagttcatttgtgatcttccaggcagcgggggtgggggtggggggattcttctctgtagtgaaagtgtttttctctgaaatcttcagctactttcctactctgtgaagccttcttctcctgggtcagtgggacccttccttgagagtggtttcagtaggttctccaaaaactgttcaactgagtaaaattgaatagaatagtccatgcattttgtcccaaggtataaaaattggctttggggaggtgaaaatgaaaccttacttttttttaatgtatcaagcaccaatacacatacagaaaaatatagtgtatctgtgttattataacatgttatggggatagactgttggggaaaaataactggaaaagcttttttgggggtgatcatgaatgaaatggttgagaaacactgagttagtcatacacagtatcagacaagtactgtgtcagtagccccagtaatttccaccctcaggccaggccccacatccagcacattctcgctcttctctagcccccacagccaggtcagtcttctagcccaggctccatcggcatctcaggttagagaaaggaaggcaagatgccttccacctctgttttccaggattgagaatatgctcacgcccctctctatctaaaggaaaggagagagggatggaccaggccctgtgttgccctcacaggtgccctgggcgccattttgtcatgagtggtcagcagagcccattgccgaggggcctagggagggtgccctcacagagctggtcccttcagttctgaattaagcagtagcctcaatgccatgtaagcaaccattcctgcaagaggataggcatttaaggtgaaatctgcctcatctgtcgttatttacaggtaagattcagaatagttcaagaaaacaaggcaaatgaattgcatttgcattgacgtgagtcatgccacattcagctactctttgtgaaaacgtccccaaaatagattcctcggagtgctgctttgcgggaccttcattgatttgctctgaagataggtgtccatgcctgagaggcctcagtgaggtttcaactacacagttatccatggcagcacttctggaaacatttctgtgctaattgtacatggcaggtccccagttcctcatttaatgggaggaatctcctttttctggaaaatttctctggactgctgtgtcacagaacattctagaaaccccttaccccatgaacattctactactagacaatttagaattgaacgttaatatgggcatgggaggccagtgaaaacaacataagcctcacctggtactgcaacacatctttgtttgggaaacrctgactttgcaaccacagctataaacaccggcttttatttcaggagtcagcagttactatatttgcaggaaggagaactgagggcatccctgtgaaaaccagaaaataaatccatcctgaagggcattggctttgtaggcctctcatcccctgttgagtaggttgctgggccatgcacaacgggtgtcagtatggaaaggaccaaggagaggaccgaagagaggcctctgcattgccagctgccacgtgctcaccacacagacagctcattggctcatccaccagctcatttaatcacgaagtcttttaatcccctccaggtccaatgaattccttaggcttttttctctgtgtttatcagttcccattataaatggcagcttcttctacatggcacatttggagatgacatggaaaaatcactcacacaggccagcaaaggcactctctttatgctgtgataatcctgtttggggaagccccctctgtagcttctctcaaaagcaggcaaacatcgctgtgcttttgctgtcctgacaatgtgtggagtcatattatacagcaagcataccacaagcaagtcacatctaaggcacctaaatgtggtttttccataacgaaagtgctgttgaaaataaacacaacttgctgctctacaggttagagcattttaatcccgtacatggctaatcttcccgagtctgtctgaagtcataatgtccctctaaacacacaaaaccgataggggcctcccgtcacacttgcggatcatgagtctcatgcagaaggctacgtaagatgaattgatttcacatgttttactcagaggatgtggaaaaagaaaatgattctagtgaccatctagaaacttgcggtttgtttttgactttaagacagtcagcacctttcagggccttgctgggttttcactggtttctgacagattggtggacgcggcatctgtaccattaaaagaggaaatcaggaaggttttttgagctgtcttgaagtcttttgctcaccacttaatttacatacatacactttaatatgcatgctaagagtgcccgtaatgtacttttattgagtaaaatgacacagagagaattcgttaggaagctttcctgcccaccccccaaccaagtcgttaaataactttttcaaaggctgttctctataggagaaggaatcaatttaggggtgtagttcattcatttacctagcttgtaactctaaagggttttgttataaacatgtttatatcaataatggttttatagtttgattttcagagcactatcgattcagtaaaacagtagctctgcggtgcacaagggatactgacctccacctcagcactattacttagaggaatgcagcaccatatgtagcttactagtaggtaggtggatgtttggatgaaggaagggagagcaggaggaagggagggatggatagattgataaatagggatggatggacagatggatggattgatgaataatataaacaaaagtactaattaataacaaaatacacacatacctcagcagtcattttgacagcagtacttaaaagtttcatgtttaaacaaacatctaatagtgtatatgtatccaacatgacaacattgtggtacttatttacagatcactgtctgacaaggaacatgaagtcaaacagaacttaaaccttagatatgagcactgccaatcaaaattaaaaacaaagtttaaggcccccttgaagttttgatgtctcaccatgtgaaaattgaacttcatattacaaaattaatgcataggaaaaaacctcctatgaaaaagcctggttttggtgatgagattcagatcatacatggctttataattgatgaatagttgtgagcagctgctgtactttctgtgcttccatgtaattccaggaccgcttctgggagccctgaaagtacccttcagtgacttccttccaaatgttgtatttcactaagcaaaagggaaagctttattccttagagatgatatagtaatatttggaaagctcactagttccaatgaagcacataatttaaaacagacacatcatagtttaaaaggtaaaatcggttacgaaatgtgatcccaagtaggcacgggcagcactctgcctgtggcctggaggaggtcccggtgtgcaggattggaaaggggctggctccttccctgctgtgactgttctgtctgcttcccgatgggacgtgctgttgatcccagctgctgagaagaaatggtgggcaagtgccacggggacaggatttgcagcagggaggagccaaaggtggaagcatcaccgggaagtgagacctggggaggaacacgagagcatcacaagccgcgggcccttctccttccctcttgaaaacctaacctagctcctgacactgcctcctactgtgttcccttcctgcccaaactgtacctagagctccatccatagacctcgtctgctcaccgcacagaaatgccagggctgccgggatcccttctcagcgctcctccttctgtstaatcaactgcttctctgctctgatgacacctgaccgcacctccagctcacagccacagtgcatggagaccccgagccttctacttgggtgtcccacgatggcctcaaacccaacttgtcacaaaagctacctctccttcctgccaccaaaatggcggccccaagacccaccacatcagaaacatgagaatcagcttctccatcaggcttaacatcccaggtatcatccagttccctattgcttctcagtttttcctctaatcccatccatttttattcattgctcttgtgtttggactgtttccctcccccaattcagatgctgaaatcctcacccccagtgtaatgcgttagggggagaccagggagccagagaccacrctggctccctgatctcacaccgcctggccccagacctatgggaaatccctgtctggggtttaagccacccagtctgtggtattttcttacagtaacctgaagggactaagacaccctgctgctgtcagacaaagatactcttatgtgcaacttgctagttataaaatggaacttttaagctatatgatatttgtcttttaagaaattaaagtacaaggactttttaagtcccctggacagagaccatccccaggtcgctgctgcgcttcaacatcgttggagaagtcagttcatcacctccaagtgataagccgccaaggtgcttcacctcccttgtcgttggaaatgtcatgctccctaaattaaatccctcaagctacagtttaattaagctcatctcctcgcctggagatggaaatcagatatattttagccttcagctgggtagagtgaaaagaacattggattctgcagacctggattctattcaagagttctgtcttccgcctgactgcatgacctccagcttgcctctgaacttcccttgcactaagcagaggagatgctgcatttgctctgtctattccctagcgctgactttccatggcccctttgtggctctaagtcctgtacccaggacacctccaccatcttcactaatttagcagacgttcatcagtgctcacgatttgccatggcatcctgggaaggtgcgtgaaaactgggccttgcctagttacagccgatatgtaggctgtacaagctgcgtcaagaatattcttgaccagatacttccttgaagatgtggaagtcagccttagaaggtccactaaatacactacaaaatgatcacaaaattaattaaaatcatatagaatatgcatgcatacacacacatccatgtgcatgtcctgacacagagatgatatgtggggtgaaggagggagatttcagggtaggccgcaggcctgccgggagcatgtgcaggtggcagcgccatcccctggaccaaaccccagttctccggcttcactgaaggtgcaggagccctgctagaaaagagaagggagccgtgggcacttccaccttccctgtccctggccaccaccctcaaaggagcaacccaccaagtccgtgcagagaaaagtcagtctgcctccactccccacttgcagaggctgaagtcccttggcttagagagaaaagtttctttctacagatgcaaacatacgaatccatgattcactgtatgggtggtggtatgaatgagttttaggtcaagtgtaattggtcagtcatggtgggacaggaagggctgccccctaagtgaaaacatgaggtgcttaaaaggaagcatgagagccaggtgcttaaaaggaagcatgagagccaggtgcttaaaaggaagcatgagagccaagttcagtcagggtgaacctcctttccctgtagctgggtgtggcagacggaaactgtgttgagatatttctgccttcgaagataagaaacatacttcttccttaattttatttgtgcaaaatataaactgtatttagcttatattctttctttttttgatgcttaagtcctgtgattaccagacacagttgttccaagatagcttttaaggatttattcttaaatccttaagtttcagtagacagacagccatgctgtgaacattctttaaatggttaggcttttagataccaggtacttttcttgtaggtgtggtcctatttacaagtgcattagatctttgggtgtaacgaagtctaaagacgacataaaaatcttttggggctgggcacggtgggtcacgcctgtaatcccagcactctgagaggccgagatgggtggatcagttgaggtcaagagttcaagaccagcctggccaacatggcgaaaccccatctctattaaaaatacaaaaaaaaattagccgagtgtggtggtgcatgcctgtaatcccagctactcgagaggctgaggcaggagaattgcttgaacccgggaggtggaggttgcagtgagctaagatcttgccattgcacyccagcctgggtgacagagccagattatgtctcaaaaaacaacaamaaaaaaagaaaataaataaaccttttgggacatttttaataggtgcttcaggacacagtagttgttctgctttataattctactgtttctaggggaaaaaaaccaaaccaacaaaacccaaacttccagatgctgtggcatgaccccgaatcatttcccacgtgcaggctgtgtgtgtggtgcagttgccatctgggcctagcaccagggggtttcttctcaggactcatgtttgatgtcttctctttgtcctgtgtctggggctttctttaaattttgtgtgcaaacaatgcctggtattacaggctgttttcctgtaaaccactcacttctgctccactcctgttctgttgagttttcctggcacgtttccatcatcgaccacctccagctgactattctatcagcttttgaaacttcaggttccgttttcaaattccatcttgatcaaatggaattctcgttagcggacatgaagtgtaagagtccggcaaatgttggggaaaggtatctcctgacagctgttagcaaagcggccacatgagaggaggaagaagagggtttcaggtgccaggggtgtcatgtatcccattgctgtttgttttgggctgagatcacccatggctgtttacatcagaggctgtacttacttttgaccttttagaatagttaactytgcaagggtcttgtgctggaaaacccaagccaactggcctgtcttcctaggtttcccctcaatcatttgaacactgagggttttacttactcacatggacatatttcaaatggcccttctgttgcataagcttattatgtcaccttctctctttttttctttttttttttttgagacggagtctcactctgtggcccagtctggaatgcagtggcacgatcttgactcactgcaacctctacctcctgggttcaagccattctcctgccttagcttccagagtagctgggaatacaggcatgcgccaccatgcttggctaattttttaattttttggtagcgatgtgattttaccatgttggccaggctggtctggaactcctgacctcaagtgatccgcgtacctcggcctcccaaaatacaggtgtgagccactgcgcccagcctacgtcaccttcttattgtgattgattgtgatagcaaccagttaccaaccttgacttttcgccactcttcatgcttattcgagtcccccttactttatgtacgacatttgtcttacatgttgtgtgtagtattccagatgtcagtgccattttggattattcttaaaaataggtgaggacagattaattgaacacagaggaaccagcaaaacgtgaaagccatgagaaacagtaaaaaggtctccaagagctggtgtcagctgctcctgctgtcagtgccgcagacacttgcaagtttccctcctcactcacagccctcacttagttgcctttaaacaggggctgcctttgaaaagatttctcaggtgtgaagggacaccatggggcctgcatttccctccactgcagaccccctgtattagtccattttcacactgctgataaagacatacccaagactgggtaaattacaaagaaaaagaggtttaatggactcacagttccacatgaatgaggaggcctcacaatcatggcagaaggtgaaaggtatgtcttgcatggcagcaggcaagagagagaataagagccaagcgaaaggggtttccccttataaaaccatcagatcttgtgagacttattcactaccatgagaatagtatggggaaaactgcccccatgattcaattgtctccyaccaggtccctcccacaacacgtggggattctgggagctacatttcaagatgagatttgagtagggacacagcaaaactgtatgaccccctttaggtgagtgcaggtgtattgggtgccttccattatctctttgggaacagccacagtcagctactgatttcccgtcccacacacctgtcttgctccttggaagcagcctcacgcaaatagagaataaaagctgctttcacaactttagccaagcagtgttaccccaggggataatccatctcttcctctaccccagtccacatttcacaggtggaccctgcacaaagcttcagaatccccggagaaggtgacggatattttgaaatgtcatttgacatttaagtgcctatctctggtcccagataaaaacagtggagggcatttagaatacaatcaagtcataacttttaaaaaggcaagggcagaaatatcatgaacaggtagtcactgaatgagataacagagaaaaccaacttggacagtctaagtggagtcatttcttctcgcgtcctacggtgaccagtgtctcacaggagaaagaaaccagggggcatcagaggctgttggaagggaggtgttgggacggactactgtggcttgcctgggactgtccaggktgtagcacggaacatcctgccccacagctgacccttcagttccaagcaaaccgaaacagctgggccaaccaagttccctctgtgaaagtaaggtagcattcacattccattgtcacatggattaactcacttaatccagggttcagccctgttgggataagttggctaatatgatattttagccccagattgaaggaaagaatggggtaatggaaagaaaaagggagggagggaaaaagaaaaaagtcattgtgctggctacagcacagaccactagtagttaagactgtgtgtgtgtgtcagtgttttctactgaaaacgccaaagaatgcagagcttctctttcagacctggcatcaggcttccgtgagccctttccaggacaccagtgcattgagtcgctgctatatacctggtgatgagccgaagaggacattttcataatgaaaggcaaagggggccaggtgtggtggcacacacctgtaatcccagcactttgggaggccgaggcgggcagatcacttgagtccaggagttggagaccagcctggccaacatggtgaaaccctgtctctactgaaaaatacaaaaaaaaattagccggcttggtgatgcatgcctgtagtcccagctgcttgggaggctgaggcatgagaattgcttgagcctgggaggtagaggctgcagtgagccragatcgcaccactgcacttcagcctgggtgagagagcaagactctgtctcaccaaaaaaaaaaaaagaaaatgcagagggacaaaggagacaaagaagagatgagtggagagctgaaaggccccacctcaacaactcstggagttctaggccacatgtggagaagagcaggggagactcctcagcataggtcgccatggcgaggacctctcttcccttacagatgtctgggcctctgcagagtctcagttaaaaagcatcagtacatctgttttcacatgaagtgtgtgccattctaggaatgcagggaagaagcttccttcctaagtgtatgtcttcctgagagggtcggtgatatgaagatagcacatgtggattatgcttgtttatactatggagcaggctctggggtgtctcctttggagggagccctcatgtgaaacttactgtaacattgtcaatgtggtggcacctttaggagctcactgataaatgcagtgtacaaacaccccattttatgtattggtttttcttttagtactttatttttttcctttttaattttaatttttattttaatagtctgtagggtacaggtggcttttggttacatggataagttctttagcagtgatttctgagattttagcacacacgtcaaccgaacagtgtgcactgtacccagtatgtagtcttttcttcctcaccccgctagtccccaaaatgcattatatagaattcttatggcttcccatcctcatagcttagattccacttataagtgagagcatacgatatttggatttccattcctgagttacttagaataatggcctccagctccatccatgttgctgcagaagacattatttcattcctttttatgtctgagtagtattccatggtgtatatatgccacattttctttatccgctcattggtggatgggcacttaggttggttccatatctttgcagttgccagtaggaaacaccccattttcaatgtgggtatctgaatgaagagaccacgggttttggatggtgttgtgtctgtaatcccaataataaagtggattttcgcgattatccaaaagagagcatgcacgcacactacgttttcgtgctcatttgtcacgtcacactagcacacacaggaactgaatttttaacttaaaagattctaaccatttaattttcaaaccacagtacataaaacaggagcagctctgaagtggttttatattttaagagcatgatttttagttttgcaattgcctctcacactctgaatgttcaattattgattgaacagattgttatgatcccaataaaataataaagttttaagctgagaatcttgcctcaccacacagctgcgctccatttcaacaatgctttggctgcaacagaaacctctcccctttaaaggagccacggcggggagacccccggagccagtaagaaacagcatgctgtcctcaccacaatctctactctggggagcccccactgtaattctgtctctttctgcacagttgcagagccaatggtgacgacgataataaacacttcatccacatgtctggttccataaaaggccatctcgactttctttttcttcctacagtgccttgtctttgaagatgctcccaatggggtggaggcggccctggcagctgggatgcaggtggtcatggttcctgacggaaacttgagccgagatctgacaacaaaggccaccctggtgctgaattccctgcaggacttccagcccgagctgtttggtttgccctcctatgagtgagagggagggcctcagtcttccgcccccagcccactctcatggtccacactgctgggggaaagggaaaggaaatcagcaactcttcaatcccaacctgcgctgtgattttagcctcctgagattggagtttccatcccatgttggtttgtcccagtctaacgtgttgataaaatgtgacttgacggttgagacaaaaaatacagtagagacagaaacgaagcccagaacaaagatgaaacttgaattaccatctcagaagtcaagctgatggagtatgtgataaagtgaatgtacatgtatatacacacacacctccatatatacaygtgtgtatcagtttggtaatatgcaggtaggcattacatgcatakgtatgtagacatatgcatgcatgtatatgtaaaatatatacttttccaagacaaaatggaacatcacttctctcttctagtttttctgaacactggctgggaaatgtaaactgtgtatgcatataagtatatgctttatgtatgcatatgtatgtagatrtgtttatatctatcgtctgcatcactctcctcagtgttgatgtcaacatgcaatgacaactgataaagcgagatggtagttctgcctggtttgcagtctgagtgggaaagtcctgtttttgatgagcactccttgttagctaacatttaaattctttttgtgacctcagaatgtctctggatctttcctcattgactgactctgtgccwcgtcatccatagtttattgttagtatgaacacaactgtaacatttacctggtatctacatccttacctgcattggaaaatgtttgctacctcacaacaaccatttgcctcctttaagaacactgatgggctgcactttttggatagaaatagaatttgatttcagaatgtatgcttggtgagtctcagtgcccaggaacacttttggaataatttatcagacattgaacttctgtgattaatygcttttatagatttactcagtctttaaaattcgtctctgatttgccagagaaaaacggtggtagccatggaaatcgggagtgaaggagcactgcttcattgtggctcagcccttcctaggggcctctgccctttgatgtccttgagctactcttcagctctggaagttgtggacaaacygtaggaatgtatgtgtgcgtgtggtggagtgattgtctgtgaatgacaggccctggctattgattgatgttgcatcaatttagcaaattcatttcctcattcttgatggcctgaatatatgtctgcacttttaatgctcctcttaaccagttgtaacatcttaccatttccctaacaaattgaattagtttaataaaatcttttgacacatgttgatatttgtatgagagtcatgattttaccttaaaaagaaaaaaacagtcttccaagaaatgtaaaatatatatgtgactaattaaattttttaaaaatcccaattagtactccaactgtaaacggatatttatatattttaagtgagccgtcctgctcctgcagtggtgaatagaggctttcaatgaaagacttacttctttgatttagtatcttctccttcccaagtatttatgttggtgttttctaatcattaagccattttgtatgaataagacaaatgggtgtaatgcatatctaagtgatgtgcatctacatctgggtgaatttcctacagggtaaatttgatctcatgtccgttactgttttttaaccaaagctgctgccagattcttatatttttagacaaaggacacacactgatgcttggccaaagcacatacgttcttttttattcttccacattagccaaattgcttcaatacattttagtgatgttactccattgaatagctcatggatttcacagagatatggtaatacaaatttacactagagtgatacatgccaaggaagtttaaagagtaattatactttcatagctcattgaaagtatgtcgtattagggacacacagtgattagtagaatgtatacaggtgtgctgtaactagcagctaatgtttgcttatatattgtgtgcccctaggaaggacctgttatactgctgatatcatccaagagatggcgctatcaacgtcatcttaatttcacttaaatgaaacatacacaacacttaagaacttactgattactacttattagactttttttccacctcataaatcctcagatggagtttggtgttttatataaaaaaataatctggaagacacctgtcttacacttgaaagaatcggcattctaaggaataggagtgatgctgctgtgcaacagtagtcagtgtctagacactgcagtttatatttctttgattacatttggcagttatgctaaatttggcacattttatatggtgtttcaaaattttaaaaaacgtgcacattagaacaagttttgtaatgaaaaataatgagttttcacctatctgtaataatgcctctgcagaacattgttctgtagtctgcactgtactcttctgctccacaagcagtcggctaaagctccttggtctcacatgagactctttgtctcacaagcaatctctagaactattatcttctaaaaagagaaaatgaagtgttaaagaacaagggatattagtatcatttcaaagtctgtagtattctctggtggttattgttggttggagagacttgctttacgaagatgttggtgagaatatttgttgactgaggagtacacgttatctctgaaagcagatcttcaggatggctcaaaatattctggttctttatgagtctcttgaatagataatattttgtacacataagcaatattatttttttctccttcattagccacacaatatttccatggattgtaattgttttcatcagaaaaactgttatccagatagaattaattcaggaaatactgtttacttacatgacagtcattgtagatgtacaaaactgaataagaacataacttagggtattttgtctgttaaactttagtcatgacatgttggggttggtttcgagatctttttccagcaccatggaaaacacaagggacagagagaagtgttggaattcgcagtgagatcattgtgttacctgttccgatttaattgctcctcaaattaactacatttttttctgtacatcttttgacctaagttgtttgtgaaggattaagtcgttgcctccctttccttggttcccaacagtatggcaggggcttctcacagagtccttttgaaactgtaaaactatcacccttgtattaaagcattggatattcttcattgcaaaatgcccataattttcaagttctacattaatttcaacaacatggtatatgaaatgaatttttttcatgaaaatattttcaaatatttaccaaaatgttaataattatttctctaggggacaaaatgtattttaaaaactacttgagaattttaatattccctaatctctgagcgaagatgaaggcttgggaagcatgaagtcatattcattcactgcttatttcaaaaccgtgtgaaagggatggtgaattcatccttcacataggcaaagtcacttaaaatgatgtattttcaaaattcactttaggaaagaattggcagtattccatattcagagtcaaaataaactgagaataaatagataaatataaagaatacctatctgtttgtaaaccaacagttaatactgtacatagtggtaaaatagtcattccatttaaaagtcagaaatgaactgtcttagtcttttccagctgccataacaaaatacctcaggctagagtatttaaacaacagacatttattctttcacactccagaagctggaagtctgagatcaaggtgtgggcagggctggttcctcctcaggcctctctccttggcttgtagacactgtcttctccctgtgtcctcacatggttgtccttctgtgtatgtgtctgtgtcctcatctcctcttcttacaaggagttcagtcctattggatcagagtccaccataatgaccttgtttaaccttaattacctccttacaggtcctagctccaaatacagacacattacggtggttaatgagcttcagtgtaggaattggagggaggtggagcaaattgagttcataatacaaacaaaaaagaattttcactatcaattttaattatcattcttctagaaactccagtcaatgaataacatcatttagtgtttacatatatggatccgatgatggcaaatcatctcagttgtttgtctcacagtgtctgtatttgactttcttttcaaggatgttttcactgcatttcactgcatattcaattccagtttaagagcaatattttttcatcttttaaatatgtagctttctttttacctgactcctgttttccattgaaaaaccagctcttggtgctgcagtcacacctttaaggcagtctctttttttctagctaccgttcaggttttgctcttgatctttggtctgttgaggtgtggcttactttgtgttgatcttgtttggactttttagatttccctggggctctgctttgttttatgtatggctaaacctctcagtcattatctctttgaatatgcccaggctcatctcttagggtcacttccacacaaccaaacagaaaaaaagcaaactccaagcagtccatataagcaggaagtcatgcccaggcatgggttatgccaccagccaagaggacaaggggacgactggggagcttgaatctgagcatatgcacctggaaagagttagactgcaagctagaccagaagcctggcatgcagataccagccaggtggagaccaacccctcactgccaggaatcaagtatgttagtagggcagaaatccaggaaacccagagaaccaaaagccagcgtgtattggtctgttttcacactgctaaaaagatactgcctgagactgggcaacttataaaggaaagaggtttaattgactcacagctttgtgtggctggggaggccacaggaaacttacaatcgtgctggaaggagaagcaagtaccttcttcacagtcagcaggacagagactgaaagagcgaagtgccagacttaaaaccattggctctcatgagaactccctcactgtcatgagaacagcatgggggaaaccacccccatgatccagtcacctcccaccaatcccatgtggggattacagtttgagatgagatttggggggggacacagagcgaaaccacaggggatctgtcaggcccaggacagaacaccctgaagggtaccattcctttaccactactcgggtgcatgctatttgtctcccatgaaggcaaaaccaagagctgctaagcccaccaaccaatagaaaagtgcttacctagcaaagaaaggcacagatgagatagttgctgaaatagggaaaactcacaggaaacagttagtataaagtattctcatatgctgatgatcatttgaaaatgacaaaataactctaaatttctgcacaagtaggtcacctaccacttgtcattctaatcccacactaggcactttaagaacatgcgcccctgggcttttgctacactcttttcttatgttggtacccaccttgtggtgactgagggtactcttaatatccccaagtctgaggaaactggggcacaattcgattatccacttatgaagtggtgaagctatggattaaacttataagacatatccacttcacactccagaaaacttcatcattcccaacattattgtcttcaaccattgggaaagaaatacttttcttggtaattagaggagaaaaggtgtttggtgtttcattgtcactttcctggtgtagaccagatacttgcgggtctttcctagggccagtgagtcctaacatgtttgaacatctacccatgctatttaaggcagcacaccaaacacattcctgcttcaactgcagtatctgtttcatcaagagtattttccttaaataagtttgagatgcctactacttggggaaatactaagcctttggtatgcttctgctcatctaggcatgaaacggctccctcattactttggtcttcagttttctgaatctgcttctggaaaacactgcaaaatgtcatttttgagaactgctgctttgcaaatacttttcatgcctatgtgatgtgctgttattctctctcatttccttgctaacatacagtcatgtttatgaagcaagttatgagccagttaagactggatctgagtcagttagatttgcatgcattttcagccacagtgcaggttcctaaaagtcatcacatgtctagtctcaaagttcttatagaatagcatctgattattattaagtagattttttaaggcctctcaaggataaagatccgaggtgttatatccattgctttcctccctcacactgtttttgacttttaattcttccctttctccactttaatttcttgtctcccactgctaattctccatataacccatccccaccaccaccaccctcaacagccaccagtgagaattcttactacttgaacttcactgtgacaaaaatcagccttggacctgtgggctaaattgttccaagagtcctgatgaagttctcagattcaggcaaagctaggtctcctgataccctgtcttaatcagttttgcattgctataaaggaatacctgagtgaggctggataatttattaaaaaaagaggtttatttggctcacagttctgcaggctgtacaagaagcattgcaccagcatctgcttctggtgaggcctcagggagcttccactcatggtggaacgggaaggggagctgctgtgtgcacagatgacatggtgagagagaagaagcaagagaaagaggagaggaaggtgccaggctctttctaacaatcagctcttgtaggattgaatagagaacccactcattaccatgagggcagcaccaagccattcatgagggatctgcctccatgacccaaacacccccctataaatccccatctccaacattggggatcaaatttcaacgtgggttttgcattttcctgtaaactcacgtgctgtgcactccctcatgtcatctgtgaatgatcacctgccccaggacttcttgaaggaatagctcaaatcatattctaagagttctgggggtaaaaaagcaaaaactaactctactgactcccttgtttgtctcccactgtttatggagggtggccggtgttcacagccctctgccaggcatcgcaaatacagaggtcaaggagatagacatagccctgcccccgtggaacttgtaatatagttggggaga

SEQ ID NO: 93571 - DNA, 49921 bp, Homo sapiens
  misc_feature (1)...(49921): n = A,T,C or G
nnnnnnnnnnnnnnnnnnnnnnnnnnnnnnnnnnnnnnnnnnnnnnnnnnnnnnnnnnnnnnnnnnnnnnnnnnnnnnnnnnnnnnnnnnnnnnnnnnnnnnnnnnnnnnnnnnnnnnnnnnnnnnnnnnnnnnnnnnnnnnnnnnnnnnnnnnnnnnnnnnnnnnnnnnnnnnnnnnnnnnnnnnnnnnnnnnnnnnnnnnnnnnnnnnnnnnnnnnnnnnnnnnnnnnnnnnnnnnnnnnnnnnnnnnnnnnnnnnnnnnnnnnnnnnnnnnnnnnnnnnnnnnnnnnnnnnnnnnnnnnnnnnnnnnnnnnnnnnnnnnnnnnnnnnnnnnnnnnnnnnnnnnnnnnnnnnnnnnnnnnnnnnnnnnnnnnnnnnnnnnnnnnnnnnnnnnnnnnnnnnnnnnnnnnnnnnnnnnnnnnnnnnnnnnnnnnnnnnnnnnnnnnnnnnnnnnnnnnnnnnnnnnnnnnnnnnnnnnnnnnnnnnnnnnnnnnnnnnnnnnnnnnnnnnnnnnnnnnnnnnnnnnnnnnnnnnnnnnnnnnnnnnnnnnnnnnnnnnnnnnnnnnnnnnnnnnnnnnnnnnnnnnnnnnnnnnnnnnnnnnnnnnnnnnnnnnnnnnnnnnnnnnnnnnnnnnnnnnnnnnnnnnnnnnnnnnnnnnnnnnnnnnnnnnnnnnnnnnnnnnnnnnnnnnnnnnnnnnnnnnnnnnnnnnnnnnnnnnnnnnnnnnnnnnnnnnnnnnnnnnnnnnnnnnnnnnnnnnnnnnnnnnnnnnnnnnnnnnnnnnnnnnnnnnnnnnnnnnnnnnnnnnnnnnnnnnnnnnnnnnnnnnnnnnnnnnnnnnnnnnnnnnnnnnnnnnnnnnnnnnnnnnnnnnnnnnnnnnnnnnnnnnnnnnnnnnnnnnnnnnnnnnnnnnnnnnnnnnnnnnnnnnnnnnnnnnnnnnnnnnnnnnnnnnnnnnnnnnnnnnnnnnnnnnnnnnnnnnnnnnnnnnnnnnnnnnnnnnnnnnnnnnnnnnnnnnnnnnnnnnnnnnnnnnnnnnnnnnnnnnnnnnnnnnnnnnnnnnnnnnnnnnnnnnnnnnnnnnnnnnnnnnnnnnnnnnnnnnnnnnnnnnnnnnnnnnnnnnnnnnnnnnnnnnnnnnnnnnnnnnnnnnnnnnnnnnnnnnnnnnnnnnnnnnnnnnnnnnnnnnnnnnnnnnnnnnnnnnnnnnnnnnnnnnnnnnnnnnnnnnnnnnnnnnnnnnnnnnnnnnnnnnnnnnnnnnnnnnnnnnnnnnnnnnnnnnnnnnnnnnnnnnnnnnnnnnnnnnnnnnnnnnnnnnnnnnnnnnnnnnnnnnnnnnnnnnnnnnnnnnnnnnnnnnnnnnnnnnnnnnnnnnnnnnnnnnnnnnnnnnnnnnnnnnnnnnnnnnnnnnnnnnnnnnnnnnnnnnnnnnnnnnnnnnnnnnnnnnnnnnnnnnnnnnnnnnnnnnnnnnnnnnnnnnnnnnnnnnnnnnnnnnnnnnnnnnnnnnnnnnnnnnnnnnnnnnnnnnnnnnnnnnnnnnnnnnnnnnnnnnnnnnnnnnnnnnnnnnnnnnnnnnnnnnnnnnnnnnnnnnnnnnnnnnnnnnnnnnnnnnnnnnnnnnnnnnnnnnnnnnnnnnnnnnnnnnnnnnnnnnnnnnnnnnnnnnnnnnnnnnnnnnnnnnnnnnnnnnnnnnnnnnnnnnnnnnnnnnnnnnnnnnnnnnnnnnnnnnnnnnnnnnnnnnnnnnnnnnnnnnnnnnnnnnnnnnnnnnnnnnnnnnnnnnnnnnnnnnnnnnnnnnnnnnnnnnnnnnnnnnnnnnnnnnnnnnnnnnnnnnnnnnnnnnnnnnnnnnnnnnnnnnnnnnnnnnnnnnnnnnnnnnnnnnnnnnnnnnnnnnnnnnnnnnnnnnnnnnnnnnnnnnnnnnnnnnnnnnnnnnnnnnnnnnnnnnnnnnnnnnnnnnnnnnnnnnnnnnnnnnnnnnnnnnnnnnnnnnnnnnnnnnnnnnnnnnnnnnnnnnnnnnnnnnnnnnnnnnnnnnnnnnnnnnnnnnnnnnnnnnnnnnnnnnnnnnnnnnnnnnnnnnnnnnnnnnnnnnnnnnnnnnnnnnnnnnnnnnnnnnnnnnnnnnnnnnnnnnnnnnnnnnnnnnnnnnnnnnnnnnnnnnnnnnnnnnnnnnnnnnnnnnnnnnnnnnnnnnnnnnnnnnnnnnnnnnnnnnnnnnnnnnnnnnnnnnnnnnnnnnnnnnnnnnnnnnnnnnnnnnnnnnnnnnnnnnnnatatgattgacaaggaggaggaggaggaagaaggaggaagaaggaggaggaggaagaaggagggagaaggaggaggaggaggaagaaggagggagaaggagggagaaggaggaggaggaagcagaaaaaagaagaagaataagaattatcatctggtcccagcccccagtctcaaggaaaatcctgggttgcagagtttcccaaactgcttagtgggatgcttagtgcttgttgtgggaccaacaagaccgcaagtcctggatggctgggcctcctggctcagaaggagagggcagataagaaggtgtggctagcattgggggtgcactgcttttctggcttgctctccatcctggggctaggcaggggctgaggggctggagttcctcatcacctgcggttcctgcaaaagcagctccaagtgccatgttgagcacccataaggccaagggggctatggtgaaaatacaccccaaagcccagagcagatggatggagttcctccgtcattgcacagcagcaatagcaacctaggaggtgggccatcatcacaggtgggagcacagaccctgatctccgttcaccagtttcaaattctgtctttgcaacttgtcttgggcaaattcttcaactactgagcctgtaaagcagaaacagcagtagctgccccacagggttaatgaaggaaatgaataaatgagacagtgcctgcaaggactgcccactgcctggcctgcctggcccagaatgaatgtgacaaagccagagctttgccttggccatcatctcatcaggtcctgggtacagagagggtcccttctgccatggctcctgcctggttctctcttctgcccaaatctcttcattccttgtattttttcattacaacataacaaatacacaggaaaaaagaagacttatttgctccatgctgtcagataggcaacactaaaagatataaatccttcatcagttaatgaattcaatgaaattacagtaaagattttggggcgggcacggtggctcacatctctaatttcagcactttgggaggctgaagcaggaggattgcttgagcccaggagttccagaacagcctgtgcaacatagcaagaccctgtctctacaataaaataaaataagggaaaaaaataaatattctaatttatttttttttgcttctccagaaacttttaaaattgatatggaggcatatagacctcaaatagctaagtcaatcttaatgaaagagggcatacaggaggtggaggttgcagtgagtcgagatcatgcctgtgcactctagcctgggcgacagagctagaccctgtctcagaaagaaaaaacagaaagaggggcatagaaggaagacttgacctctagacataaagatattacaaggccagtttggtaaatgcaacgtggtgtctgtgcagggataggaaagaagatcagtggaacagcacagagtgctcagaggcagacccatggacacctgggggatttaatacgtgacaaaggtggcatcattattttcagaggaggaaatacctaaaactaacacattagttcatgaagacacatttaaaatcattagtcatcagagagctgcagactgaaatgacaatgagacctcattgtatccttattaaactgatgaactagaaagctagatggtaccaatgggcagggacgatatgggagccagggagagtctagactgcttcagctgcctggagaaaaacacagtgcttctgctgagccagcaatcttgctactggttgtttatcttgaagaaacattcttccagatctagacccctctagacctgtgtagcattgtctgtgatggaagggagctggtagcaaatctgagtggtctgtccagcccacccaatgtctgctggggagttccctcaagactgccccaaaccgtcaagaggtagggccagttggaattccaaagaaataaacactaagcgccggggtgatccgtatccatccaaagcatttattagggaaacgtacatagggaaggctgtagtgttctcatgacagacagcaagaagggagatgagtctgttcataacgaggaggtgggtttatggagtttatatgagtgtttaagggattcggttcagggctggggcacgtttagcatttgtttgatctttccatgtttccagcaacaacctaaacaactatcagtgcctggggacattgaaagctccctctagaacacctggacaccgagtgcccgtcactggaaggacgaagaggtaataagtgtggatccacacaataacgtggagagatcttaaaaacacagcccttcatgaaaatataagaaccagaaggatatatttgttcagtctcatattaaacatatattaaaaacaccagcatgccaaacaatactcattttggaaaaaaaaaatacacatcagaatggttactttatagaggtgggaaatgaaagtgggtatgaagagaaaaaggaatgaataaatatgtaaaaggaatgaagtgttgcatagggttgaaaaaggacaatgaagcctatgctgcatcccactagcataacgcatcacctgttttcctttctcctccctcctcccttcctgccttcatcccagccagttccccacagaggtaattacgagttgcttagcaccaagtctgaaatactacacacactgtctcgtgagctctccacagtgcaattgatcctttagcaccaagtctgaaatactacacacactgtctcgtgagctctccacagtgcaattgatcctttacagcttatttttatggctgcatgatattccagctgggagggggaacatcattctctattcatgagaattgaggcaattcctaagtttctagcagtaacactaactgtgcaaacttgtcagcacagtgacagtctggattccctcctggcagccctatcccctgaccaaaaaaggcccatgcacccctccctccaaaaataaaacagtgaagattatattttaggactgtattggtaaaaacacagatataattcagggcagattcacacttatatagtcattattattctcatttttttcttctgaatttaaaagaaattaaacattttcatgagccactagcctaatggataggttttccccgtacttcgaggtaatgttctacatcacagctccggcctggactagaacccaggactcagtcaaggcagcctggttctgtccaccgcagctggcagctactccaggccccacactggtttctgtctgtctcgatcaaggccacattcggcatgccgtggggcaggggctgtgctgtgctggtaaatgtttaacaactggctggctcagaggaaaagccctggtcttggcgtttgctaatttttgtggtgtaaataaccccatggccaattttttttttttttttttttagagaggttctcactatatattgcccaggctggttttgaactcatgggctcaaaggattctcccgccctggcttcccaaagtgctgggattacaagtgtgagccaccgtgcccagccctcttaatttttaataatggctgtgtttcacaaaaattttggaaagtttaacaactatcaagttgatgccccactataccagtgcaccgctggcagaaggacccatgaaacctgggaagactacatttcccagaagcctcctctcccaggaccggcgttcagcttcccaggttgttaccatggagatggctaacagctagagcaggctgtcctcggaggggtgaggagggagcaagggacttggggtggctggaccctgtctggcagggaaagggtgaggctggtggcccccttctgcctgggggcctccagccctgatctttctggggaagttgttggtggggtgtgtgtgcgtgtttatgtgtgttgggaggaggaagttgctggtggagagggggtgcagggaagggccggtgggttggggcagaatctaaggaaccttgagataagactgccttccccacactgggctatagctgaagaggccacctgtgtagggaataaagtgctgtgggttcttctccccagctctgcctctgatggtgttctgggactgacacgtcggcttcctcttcagcctacttctttccttgcccaccactcccccacccccaccatcccttctagcacttccccatctcatatctcttccagcctgagacacacaggtttcacaaccagaaatacaggggttcaaatcccagacctgctacttactggctgtaccttaagcagtgcacttaacttctctgggccccaatcttctcatctgcaaagtgggtgtcctcagtgtctgcctcatagagtcagtagaggataagtgagatgatctccgtacaaccctcagcacaggtctgacacacagtaggcattcagcaaactgtaaatgccttgtaatggtgatgactgcccttcctgggctcattgtctctgggaccaagaggccaacaaatggatctgatcactgagaagtgctgcttggctagaggttctcccctgaggatctggggtcctgaatggtgttgggctacytaggccttgggtggcttccagccagatgagcattcgtcccctcctgagtcccagagcacagaatgtcagaattggacagaaaatatctgccctcccttcctactataaagagaaactraggcacagaaaggcgcagacagtgacccaagggtccagcaggagctactggcaaagccagggtttccccaaccaggctcagtcgtggctggtggccagggactcacctccctaggaggccgaggtggcccatgtgggtgtggagttggaaattggggccagcctttatctgctgctcccttctgccctcttgctcctggcttcacccagggaagtgggggatgattagaaaatcaaggggattctgctttttttccttactactcgccccctttgtcctgtgggtttcgtttgttttcctcatctctggacccccatttgccgtaaggaaaacagatgttcgaggacagaaatggaaagaccccagctgggaggctgcagatagtgcatcagctgggatggcgttgggtggtgtggaacagggacccccatagaagctgaggtttcttatataaggaaaggctagaggtggcactccaggcctctgtggcactgctggggaccccagctcccccatctctcggccctgccgtccatagcaggcagctttagccctcatgtgtggccacctcatggtctcgccttggctgccccacctcccactttatctccacattccaggtgggaggaggagaagggcagagggctccccaatcacttctgcccacatctcattggccagaaccgggtcacatcgcagggccacctctagctgcaagagaatctgggaagctgagcaattcaaaccaggcacactgctgccccccacacaactggggttctgccgtatagaagaggagactggatctttgggtaggtgactagcagtccccgctcagtgtggctctgctctgtgaccacaggacatatggtgagcacatgtggcgtctctgcgtggatcacagaatgaagcctgttctctgggccaacacaggccttggccaagagagagtaggctgtgttacccccaccccccactccctgtttgtatgccctggtgcaggcaccttcactctctgtgcctcggttcccagtttgatcaggtgagatatcattcacctgccatcctcatttttgggtgggttgtagatcatatcaccttaccgttaggattttctttaaaccaatctatttatttattatttatttgagacagagtctcactctgtcacccaggctagagtgcagtggtgcgatctcaacttactgcaacctctgcctcccaggttcaagtgattctcctgcctcagactcctgagtagctgggattacaggcgtgtgccaccacgcctggctaatttttgtatttttagtagagacggggtttcgccatattggccaggctggtctcgaacttctgacctcaagtgatccacctgcctcggcctcccaaagtgctgggatcacaggcatgagccaccgcacccagccaattcatttatttaaataagaaacttgacaatactatagtaatccccacagcattcacagtacttgtcattgataactgtcagctggcacaatggctcatgcctgtaatcccagcactttgggaggccaaagcaggaagatcgcttgaggccaggagtttgagcctgggcaacatagccagaccctgtctctaccaaaaaaaaaaaatagccaggtgtggtggtgtgcacctgtggtctcagctactggggaggctgaggtgggaggattgcttgagcctgggagtttgaagctgcggtgagccatgatcgtgctgctgcactccaagcctgagtgacagagcaagaccctgtctcaaaaaaataaaaaatttaaaaaaaaagataactgtcaaatatactaaaagcaaatcgacacgtgcctttccctgtcctgtcctgaggatggcttccaaccggaggcctgctttgtctttgttgtaaaggaatatttgccaggattagaaaggtgttacagatggggtagcaccaaacagagactttctccatgtttgaaaggaagtcaaagagggaatcactccctatgtgttcgacacctcctcaaaaccatctcccaggcctcccggggatgcccagatggtgttggtggctcctgcctgggctgacagtcggccatggagtatacttacccttccccacagagacattccatctccagacacccagagacgctccagaatggaggtcctgagggagaaggtggaggaggaggaggagsccgagcgggaggaggcggccgagtgggctgaatgggcgaggatggagaaaatgatgaggccagttgaggtgcggaaggaggaaatcaccttaaagcaggagacgctcagagacctggagaagaagctgtcagagatccagatcactgtctcagcggagctcccgtgagtgtggcagggtgggggccctggcaagggtagaccggggctgggcacagggagacccaggcagagtgctggtgcctggtctggtagggtgaccaggagatagagggaagcagttatgagtgaaggctttctgctttcaaatggcctgggccgagtgtccatgctctcccaactagctgtgtgaccttgggcaagtcactcagcctctcggtgcctcagtgcctttatctgtctaaaagtgcaggtgctggccaggcgctgtgtctcacatctgtagtcccagcactttagaaggaaaaggtgggaggatcgcttgaggccaggagttcgagaccagcccgggcaacatagcaagaccccccyacccatgtctacaaaaaatacaaaaattagccaggtgtggtggtgcctatagtcccagctacttgggaggctgaggtgggagggtcacttaagcccaggagttcaaggctgcagtgagctatgattgtgctatcacactccagcctgggcaacagagcaagacctgtctcttaaatatatatatgaaaatgtgcagatgttaatgatacctgccttctcagtagccgtgaggattaaatgaggaaggggtagagccaatggcaactcagtggaaccagggctcctgtgtgccaggcatggcttccctaatgccatccctgttgtggcacagggcctttaccaaggacactattgacatctccaagctgcccatttcctacaaaaccaacacacccaaggaggaacacctgctgcaggtggcagacaacttctcccgccagtacagccatctgtgcccrgaccgcgtgcccctcttcctgcaccccctgaacgagtgtgaagtgcccgtaaggctggcatgttgagggcagggctggggagcctggrgctggagagcagagggcacarggaagtggggcaggttctccaaggtcactgggccaaatcacggacctcctgtgggccagagcgcttctagtctgggggcaacataaagtcgaacgccagcaggcctcagcaggctcagtgcagattaccctggagggcggtggtggtctggagaccccatgcccccgcctaaagaggcagctgctgattgctgcggggaaactgcaggcctggggttacctgatcaagaggagactcgggatttgtgtgggagtctctggtttttaaatgctggcagctgacataaatgctaaacattgccacgtgggccaaataaagcgggtctgtgggtccctgtcagctcgtgggcagctgtttcccaccccctggatgaatcccatgtcattccatctacagatggagaaactgaggcccagaaaggctcagagacatgctctgggtcacagggctggaaggaaaaagccagagcttaggttcttatgcctgtcctggtccaatttgtcttatttctctgtccttccctggacaggctgacctctgaggcttcagactgtactggtcgccagctggccccagcccagaacctctgtaggccccagggagagcatcgctcctgggaggagagcacagtgctcccaggaaccccaggaaacagacctgatctcctcattcagccctgacttgctgggtcacctcaggcagctctcaagcctgctctgggcctcaggtgtctccacaatgccctaggggttgaaggcggcaaaacttcaaagcccttcaaagtccagatccagaatatgcttgtgctgtctccgggtgctggcaacatgataagggcctcccagtcattgccactgcgccactgatggctgccatgtgccagatctgggcatcaccttcccagccaagggctgctctgccaccccaggtcatgtgggcctggcctcctgcatttgctcaggcctctagggtccccctgtggattcaaggaaggccccaagcttgatctcacaagttcttattgccttgaccccactggcaccatctctctccttgcagaagttcgtgagcacaaccctccggcccacactgatgccctaccccgagctctacaactgggacagctgtgcccagtttgtctccgacttcctcaccatggtgcccctgcctgaccctctcaagccggtaagcaccactcacaggctgcatgcctgagcccaccaggactaagatggtgtgagaaacaaactcacccatccaaacccaaagaatggacttagaggccgggcgtggtagctcatgcctgtaatcccagcattttgggaggccaaggcgggcagatcacaaggtcaggagtttgagaccagcctgaccaacatggcgaaaccccgtctctactaaaaatacaaaaattagcagggcgtggtggcacatgcctgtaatcctagctactggggaggctgaggcaggagaatcgcttgaacctgggaagcggaagttgcagtgagccaagatggcaccactgcactctagcctgagtgataagagcaaaactctcaaaaaactctctcaaaaaaaaaaaaaaaaaaaagaatggacttagagacctggagaacagcgaaagtgagacttttaatgatggtcttgcaagattgggtgtctgataggcagacacacccagcatagttttaacaagcagtttatcccctagtgcgcaggtccctcccctggttcctcacaggctgagtactatggggtcacaatcttcccagacatcgcctattgattgttaggcaggggctttaggtgttttttctagggttgttttgcagcattttattgcaacccacaatgcattgcaatcctagttagctcaggggctctttaagtatttgacttatgacctgagtagctgggcaggctgataagaacagacaaagcgagctattttgcagactagtaaacttttatcttaggctaaacttttttggtttgagtgagggcaactaaggcggtaggtaagggggaggaaggagaaggctgacaaacaggcattggctattcaagcaggggcctagtatatcctggggtttttgtagtttgctgacctaagcctattcaaggcactttgccttggaaacggatcactgtgtacatgatttccttcaatgggatgtcaggcacggtctgggaaaaggaagctcagccaggctcagggtacagcctctcagggcccctaagggcaaacaggcctagagagagacagccacttgcctgaggacacacagcaagcctgggcttctggttcccacctcttttctcctttgcattcagagcttccctgccatggcttcaagcggtacaggaaagagagaggggaggcccggctgcccgtggccctaaccccatctttgggcttctgaccaaattcgtcagcttctccttcagaatagagggagggaggaagaaagggcaaggtcaacagtggagaactgataaagggaggaggaggaaaggtgggtatmgaaggaagggggagcattggagcaaaacagtaaacttaccagtcagagggcattagatcagacactcctacagtccagaaggtttccccctatcaggaagtccatagccccttcaaatgacaggcaaatgtgaatggcatggtgtctggttgtcattccattcttagcaggctccctgaccccacaagggttaggggcccaaagcaggtccagcctgtgcattggtcctggctccccaccctgacaggtggtgggctgtgaccggtggggaggacaggctggggcagcggggccccagctgtgctgaccgtcccactgtgaccagccctcgcacctgtactcctcgaccactgtgctcaagtaccagaaggggaactsctttgacttcagtacgctgctctgctccatgcttatcggctctggctatgatgcttactgcgtcaacggytacggctcgctggacctgtgccacatggacctgacgcgggaggtgtgcccactcactgtgaagcccaaggaggtatrgtcgggcttgagctgcccgggtttcccaaaggatgaacattcccggtgctgtcgtgccatccttagagacgtccatcactgccgcctcatccccagccctggccacgcggacacagatccctcaccaccagcccttccgctgccctggagttcatatttcaaaccaccagtgatttatgtcctcggtgtcttaacacatccagcccagttttccaagctggctgttcttctctgtctgttgtaactcagttttcagctactatgctccctgcttggtaaattttatgaatgccacatagcttatatcttaagtcaaacgattccaaatttaccctatgcatttgataaaaatccagccagccatttttatataagaaaataggccaggtgcggtggctcatgcctgtaatcccagcactttgggagtccaaggcgagcaaatcacttgaggtcaggagttcgagaccagcctggccaacatggcgaaaccctgtctctatcaaaaatacaaaaaaattagccacgcatggtggcatgtgcctgtagtcccagttactcaggaggctgagacaggagaatcacttgaaacccgggaggcaaaggctgcagtgaactgagattgcgccattgcactccagcctgggtgacagagcaagactccatctcaaaaaataaataaaagaaataaaaaataacagacaagtgaacagacatttggttctcagtcccacactcccgaggtaaaaagcctgctttttttttgagacagggtctcttccactctgtcactcaagctggagtgcagtggcatgatctcggcccactgcaacctcaacctcctggactcaagccgtcctcctgcctcagcctcccaagtagctgagactacaggcgagtaccaccacggccagctaattttgtttgttttttataggttctcactatgttgtccaggctggtcgtgaactcctggactcaagcaatcctcccgcctcagccttccaaagtgctgggattataggcctgagccaccgtgcctggccctcaaggcccctttttaatagcaaaaaaaaaaaaaaaaaaaaaaaaaatcaccaactgttcagtggctggtggctgtgtttttagatctgctcattaagatctccataaggaccacaggctgctacagacacaagaaatactctggaatgaatatcagaatcacaaatgcatctctttacatttagaaaatagtcatgctacagacagaaaatgctcttcatgaggtggattaattccaggactctgggatcagggtcaggctcctgtgggtgtccgcagcttggagatggggatccagggacctgaggcatccagcaggatcactgtgtacctgggttatacctgggtgagcacccagggaccccagggtgggtgctctggtgggagaagggcgagacagaaggggaagcacaagaagagccttgctctctcaggcccacctccccaagagaagatggagcacgagctccgccatggcttttggcttcaaaagcctctggctgggcacggtggctcattttgggaggctgtaatctcagcattttgggaggctgaggcaagtggaccacttgagcgcaggagttccagaccagcctggccaacatggcaaaaccccgtctctactaaaaatataaaaattagctgggtgtggtggtgcatgcctgtaaacccagctactcgggaggctgagccaggagaatcgcttgaacctgcaaggtggaggttgcagtgagctgagatcgcaccattgcactccagcctgggcaacagagggatactctggctccaaaaaaaaaaaaaaaaaaaaaagcctctgagctcccacccgggcatctcagctctcagctcagccaaaagcttaatgattaacattatatcaataacaaacagatgcagagaactttcgggtttaaaatccgctttcatgtccattgtgcttgttgctccccacgatggcccagtgtggtagatattgtcacttttatgttacagatgagtatgttgatgaaatcaaaaggtaacataatgtggccaaagtcacacagcaggaaaatggagactcagggaacttgaaacgctggagattcactatttctccttcatgactatcacaggcccacctctgcagcctctgcagtgctctttcctgggannnnnnnnnnnnnnnnnnnnnnnnnnnnnnnnnnnnnnnnnnnnnnnnnnnnnnnnnnnnnnnnnnnnnnnnnnnnnnnnnnnnnnnnnnnnnnnnnnnnnnnnnnnnnnnnnnnnnnnnnnnnnnnnnnnnnnnnnnnnnnnnnnnnnnnnnnnnnnnnnnnnnnnnnnnnnnnnnnnnnnnnnnnnnnnnnnnnnnnnnnnnnnnnnnnnnnnnnnnnnnnnnnnnnnnnnnnnnnnnnnnnnnnnnnnnnnnnnnnnnnnnnnnnnnnnnnnnnnnnnnnnnnnnnnnnnnnnnnnnnnnnnnnnnnnnnnnnnnnnnnnnnnnnnnnnnnnnnnnnnnnnnnnnnnnnnnnnnnnnnnnnnnnnnnnnnnnnnnnnnnnnnnnnnnnnnnnnnnnnnnnnnnnnnnnnnnnnnnnnnnnnnnnnnnnnnnnnnnnnnnnnnnnnnnnnnnnnnnnnnnnnnnnnnnnnnnnnnnnnnnnnnnnnnnnnnnnnnnnnnnnnnnnnnnnnnnnnnnnnnnnnnnnnnnnnnnnnnnnnnnnnnnnnnnnnnnnnnnnnnnnnnnnnnnnnnnnnnnnnnnnnnnnnnnnnnnnnnnnnnnnnnnnnnnnnnnnnnnnnnnnnnnnnnnnnnnnnnnnnnnnnnnnnnnnnnnnnnnnnnnnnnnnnnnnnnnnnnnnnnnnnnnnnnnnnnnnnnnnnnnnnnnnnnnnnnnnnnnnnnnnnnnnnnnnnnnnnnnnnnnnnnnnnnnnnnnnnnnnnnnnnnnnnnnnnnnnnnnnnnnnnnnnnnnnnnnnnnnnnnnnnnnnnnnnnnnnnnnnnnnnnnnnnnnnnnnnnnnnnnnnnnnnnnnnnnnnnnnnnnnnnnnnnnnnnnnnnnnnnnnnnnnnnnnnnnnnnnnnnnnnnnnnnnnnnnnnnnnnnnnnnnnnnnnnnnnnnnnnnnnnnnnnnnnnnnnnnnnnnnnnnnnnnnnnnnnnnnnnnnnnnnnnnnnnnnnnnnnnnnnnnnnnnnnnnnnnnnnnnnnnnnnnnnnnnnnnnnnnnnnnnnnnnnnnnnnnnnnnnnnnnnnnnnnnnnnnnnnnnnnnnnnnnnnnnnnnnnnnnnnnnnnnnnnnnnnnnnnnnnnnnnnnnnnnnnnnnnnnnnnnnnnnnnnnnnnnnnnnnnnnnnnnnnnnnnnnnnnnnnnnnnnnnnnnnnnnnnnnnnnnnnnnnnnnnnnnnnnnnnnnnnnnnnnnnnnnnnnnnnnnnnnnnnnnnnnnnnnnnnnnnnnnnnnnnnnnnnnnnnnnnnnnnnnnnnnnnnnnnnnnnnnnnnnnnnnnnnnnnnnnnnnnnnnnnnnnnnnnnnnnnnnnnnnnnnnnnnnnnnnnnnnnnnnnnnnnnnnnnnnnnnnnnnnnnnnnnnnnnnnnnnnnnnnnnnnnnnnnnnnnnnnnnnnnnnnnnnnnnnnnnnnnnnnnnnnnnnnnnnnnnnnnnnnnnnnnnnnnnnnnnnnnnnnnnnnnnnnnnnnnnnnnnnnnnnnnnnnnnnnnnnnnnnnnnnnnnnnnnnnnnnnnnnnnnnnnnnnnnnnnnnnnnnnnnnnnnnnnnnnnnnnnnnnnnnnnnnnnnnnnnnnnnnnnnnnnnnnnnnnnnnnnnnnnnnnnnnnnnnnnnnnnnnnnnnnnnnnnnnnnnnnnnnnnnnnnnnnnnnnnnnnnnnnnnnnnnnnnnnnnnnnnnnnnnnnnnnnnnnnnnnnnnnnnnnnnnnnnnnnnnnnnnnnnnnnnnnnnnnnnnnnnnnnnnnnnnnnnnnnnnnnnnnnnnnnnnnnnnnnnnnnnnnnnnnnnnnnnnnnnnnnnnnnnnnnnnnnnnnnnnnnnnnnnnnnnnnnnnnnnnnnnnnnnnnnnnnnnnnnnnnnnnnnnnnnnnnnnnnnnnnnnnnnnnnnnnnnnnnnnnnnnnnnnnnnnnnnnnnnnnnnnnnnnnnnnnnnnnnnnnnnnnnnnnnnnnnnnnnnnnnnnnnnnnnnnnnnnnnnnnnnnnnnnnnnnnnnnnnnnnnnnnnnnnnnnnnnnnnnnnnnnnnnnnnnnnnnnnnnnnnnnnnnnnnnnnnnnnnnnnnnnnnnnnnnnnnnnnnnnnnnnnnnnnnnnnnnnnnnnnnnnnnnnnnnnnnnnnnnnnnnnnnnnnnnnnnnnggatggggagaagttggatgtgggagaatggtgggaggagggggataggggatgtagaggggggttagcggtatttgggtgagttggggtagctagatagtgatggttggtgggagtgagggtatggggaggtagggggggagaggagtgcgtgagaggtgatagtggaggatatgggggaggagagatggagggtgggagaggtgaagggatgtggggtgagaagggaagcgtggatggggatgtgcgggggaatgaagtgggggttgagggaggtggagtaggtgggggagtagggtgtggttggaaaggtgagtaatcggagtagtgggaatggggtagtgtagtggagtggatgtgggaatggtggggaggggaggaagaaggaagtggtggggagggatagggtagtatgtgggtgggaaatgtaagaaatggggaggggggagagaatgtgtgggtgagggaggaaaaaataggtgtgggtgttggaagtgggtgtggaggtgagaggagtgggagaagggagattagtagttggaggaagggggggtgaaagagggggggtagtggtggcgggggggtggagaagaatcatgtgtggggcagtcgtgcggatgcagccatcctcccatccacccatcctcccatccatccatcctcccctctctcctcccatgcatcctcctatccatttttcctgccatcagtcctctcatccatcctgccagccatcctcctacccatctcccatctcttcttccaactccacactcctatccttcctccaatcctctttccccactcccttctttcctttccttccatagagtattccttgagcttcttttctggtccagacctatttatacataacaatgaacaacaagacagtcacagttctctcagagggaggcagataagaaaggtacttggtctcccatttcctttctgtggatgaaacctcacccaaagtcataacatataaagccggtaacccccagatgcccagtgccccaaagagtccgatttgtaaaccacagatctagtcagactctcccattgttttgattttacaaatgggctcagtggttgggtgatgggaggggagatgggccgtcacactccggttgatggtgcagtctacatcagaactcagctctcctgctggttccccagycccagggagwtgtctgggcccctgacactcctcttccagccatctgactygtagtcacccacctttccttggcaggaagcggagaaggcaaagccggatgccctgcacggcctgcgggtgcactcctgggtccttgtgctatcggggaagcgcgaggtgcctgagaacttcttcatcgacccattcacaggacatagctacagcacccaggatgagcacttcctgggcatcgaaagcctgtggaaccacaagaactactggatcaacatgcaggattgctggaactgctgcaaggtscctagggagggggagctgsgtgggtgtggcaggcacagtgcaggtgataggaatagagggaagcaatgrcagccagaccttggggagagcgagacaccaggccaygagggctttgaaccttctccatagctgcgtctccatggcccactcccttgcccatgaataaccattctgatacgattattgtctctcctgatttgtgtatccttctaaagtgtggattgtttgaatgcattttttaaaaactctatattgaagtgtaacctacatgcagaaaagtacactcatcccatgcatacatasagttcagtgaaatcccacaaatttaacacaccttggtttcctacacccagaccaagaaatagaatattgcccaaaccccacaaagtccctttgcacaattactatcttcctccaaatgtatttttaactcacgtatgtggcactggtacacacacgcgcctacaagagggtacagaggaggtcacaatcctaagtgtacataccattgaattatcacacactgaacacacctgtgtagccaggaccattagaagccccctcatgtctcctcctggccaccaaccctaccatcgtccccagagttaagcactatcttgacttctaacgacatccattagtttcatctgtttttggagtttacatcagttgaatcacacagtgattcaatactcttactcttggattccttcactcattatgtttatgaaattcattgtggttttttgtgtggtttgttcattttcattttttattactttccattatttgaatacaccagaacttatttgtcctttctacagttgcacattgagactgtgtccagtttgggactattttgaataatgccgccatgaatatttgtatacatatatttcagtgaacacatacacacatttctgttgggtaactactgaggggtggaatcgctgagtcacagggtgggcacatactcagttttagtagatactgcccgatttctcaagtgattgcatccatttacactcccaccagcaatgtatgagggttctcagagctccatccacmtccttgccaatactggatactttcttttccattttagctattgtagtggacatgtaatggtattgcactgtggttttatttaatgcaattgatttttggctgagtgtgggggctcacacctgtaatcccagcactttgggaggctgaggagggtggatcatttgaagtcaggaattcaagaccagcctggccaacatggtgaaaccccgtctctactaaaaatacaaaaaatagccaagtgtggtggtgggcacctgtaatcccagctacttgggaggctgaggcagaagaattgcttgaatctgggaggcggaggttgtagtgagcctatattgcgtcactgcactccagcctgggcgacaaagcaagactctgtctcaaaaaaaaaaaaaaaaagcaattgctttttgcaaactgttcacatatccagtaagttttaaacctgcttattcattttaaaaattaatctgtaaagactttggggttttctgcatatacaatcagttctatagctgaatgatggccgttttgtttcttcatttttaatccttatactttttcatttctttttcttgttttatttctctggttagtacatccagtataatgtcaaattgaagtggggattctgaacatccttgtctcagtcctgattcacaagtaacgccttagtatcataacatttcactatttgtgtgatgtttatcttgactgtagggtttttatagctagctaccctttatttaactaagggatttctttctcagttcactagcaggtttttttttaatcaaacaaaatttgtttatatcaaatgtttttttcatctattaaatgatcataattttttcttctattaagtggtaaattagactgattgtgttcccccctttttaaaattgaggtgtaattgacataacataaatccactaaagtgcacaagttagtggcttttagtatatttacaagattgtgcaactatcaccactatctaattccagaattttttcatcaccccaaaagaagatttttatttttgagacagggtcttcctttgttgaccaggctggagtgcagtgatgcaatcacggctcactgcaacctctggactcaagcaattcttccacctcagcctcccgagtagctgggactacagactgcaggcatgtgccactatgcccagctaatttttgtattttttatagaracaaaaaatgggttttgcaatgttgcccaggttggtctcaagcaagccacccaccttggcctccaaaagtgctgggattacaggcttgaaccactgtcccgggccccaaaaagaagattgtggttgagattatactggatccatagatcaattgagagagaaccgttttcttaacaatattgaatttttcacccatgaaccatggtatctctcttcagttatttaagtcttttaaaatttctatcagcaacattttgtaggtttcagtgtacagttcttgcacatcttttgtcagatttattcctaaatatttcgctttttgatgctatgatttttttaaatttcaccttctgactattctttgttagtgaatagaaatgcagttgatttttacatattgatcttctatcctgaaatcttcccaaattcacttatttgccctaatagcctttgcgtggattccatcaatgtttatacagataattatgttatctgtgaataaaaacagttttacttcttttcccatctggatgcttttcttcccttatcacactggctggaatcatcagtaaatrttaaacagaagtgatgaaagcaaacctgtttattcctgatcttacggagagcatttagtctgataccattaagtatagtattagccacaggtttctcttattggttcccattatcaaataaaggaagtttttctccagtcctagtttgctgagagttttttcagaaatagatgctagatttttgtcaaatactttttctgagtctattgagattattatgatttttcttttttagtttatctacatggtaagttacttggattgattttgaatgttagactaaccatggttttcctgggataaacctcatttcattgtgatggttaaatcttttatatattattggtgttgaactgaaaattttgcttagaatttctgtatctttgttgaagagagatattgttctgtagttttcttagaatatatttgccaggttttggtatcacagtaatgctggcctcatggaatgagttgggaagtttcccttttcttcagttttctggatgagtttctgtagaattggcatgatttcctttgtacgtttgctggacttcacaagtgaagccatctggggctggaattttctttgtggaaggattttaaggtacaaattcaataggaagactcaagctgtttttgagtgaggtttggtgtttgtatctttcaagaaatttgtccatttcatttgttttcaaatttattgttatgaaagtgttcaaaatagctccttattttccttctaatatgttaaagtctttagtgacattaccccattcattcttaatattggtagtttgtgtgttctctcttttgctcctgatcaatctggttagaggtttatcaattttgttgctcttgatgcaggggcaggccccaaaatcagggctttgccagtgaggattcgtggctttttccaggaaagaattcaagggcaagctggtggtgttagaggcaactttacttgaagtggcagcgtacggcagcagcagatggactgctccttgtggagcagggctaccccataggcagtgtgcccagattgtaaccacccaaggggttcaccttgccagctgcctagacagagctgattcaagactggggaattgcaatagagaaagagtaattcacgcagagcaggctgtgtaggagaccagagttttgttattactcaaatcagtctcccagagcattcgtgcattcagggagcagagtttttagggacaacttggtgggttgggggaygccagggaaccaggagtgctgattggtcagagatgaaatcacagaaagtcaaagctgtcttcttgcaccaagtcggttcctgggtggggctcacaagatcagatgagccagtttatccatctggtggtgccatstgatccatcaagtgtagggcctgcaaaatatctcaagcactgatcttaggagcagtttagggagggtcagaatcttgtagcctccagctgcatgactcctaaaccataatttctaatcttgtagctaatctagtccctaagcaagaaggaggtctgctttgggaaagggctgttattgcctttgttttaaactataataaactaagtttctcccaaagttagttcagccttcacctaggaatgaacaaggacagcttggaggttagaagcaagatggagtcgattgagatctctttcagtgtcttagtcataattgtgcaaaggcggtttcaagagtagcggctcagaggcagttccacagtcacatttatatccactttaatcatatgcaaattaaggggcagattatgcagaaatttctagaaatagagtggtaacctctggttcactttgtcattgccatggaaaggtgtaatttctgggtgttgccttggccccgttttagctagtcctcaatttggtccagtgtctgagcccccagcttggaagtcaagtcccaccttctggtcagtaagtcccaccttattgtcaataaaccagtttttggttttgtggtttttctccgttgtttttgttttctatctcattgatgtccactctgatctttattattttatactttatgcttactttgagcttcatttacttttttctagtttcttaaggtggaagctgagatgattcatctaagactgttttttgttttgttttttttttgagacagagtttcgctcttgttgcccaggctggagtgcaatggcgcgatcttcactcactgcaatctccacctcctgggttcaagcgattctcctggctcagcctcctgagtagctgagattacaggcatgcaccacgcccagctaagcctgttcttttctaacataagccttctttctctcggaagtactactttagtgacatcccacacattttactctatcatgtattcattttctttccattcaatatgctctccaatttcccttttaatttctcctttaattcatgggccatttgaaaatgtgtttagtttacagatatttagaaactctctagagatatttctattgttgatttctaatttaattctgtagtgattagagaatataacttggtatgacttctattattttacacttgctatagtttgttttatggaccataatatggtctgtctaggaaattcaccaaattcttaatatagtgaattttctgtgtgtacttgacaagaatgtgtattttgctgttgggtggaatgttctataaatgtcaataatctcaagttgattggtagtgttattcaaatcttatatatctttgctgattttctgcctacatttctttcaattattgacaacattattgaaatgttgggctacaattttggatttctctatttcttctttcagttctatcagtatttgcttcatgtattttgaagccctgctattagatgagtaaatgtttgagattgttatgtcctcatgatgaattaacctctctatcggtatgaaataatcagctttatccctagtaatatttttcattctgatgtctattttgtctgatattaatatagccactggagctttgatttgtattagcattggttatcctctttgcagaactgtgagtccattaaacctctttttctttgcaaattacccagtctcgggtatgtctatcagtgctctttcgttgtctcgaaggcactctgtttctgaccaggccagtttcccttgggccctttttaaggtgaccctgaggaacggctcgctcatttgtttggtggcttggactgtctgtccatctgcatggcggacgtagccagtctgctgctcctgaactcccgtctcaccatcctgtcccagctgccctcatggtgtatgagcctcttcctgcaacaacaggtcagaatactttggggcagyaagtaggtcagctacctggtccctttagttacactcagtacattgccagcattgatgggaggtgcaggttgttcacaggcttaacaccaaaactgcctgggagtccatggtcaagttttgcagtagtcaggacctggaaatgtacagaaagctgtctcatcttcctttgaccgagttatcatggagataactcaagtgataatcactcgttctgttgctaccgccatcacacatcccttctgcatgattactgagatttgtggtacaattcactgacagagagtccaagtactgtgaactttgtgactccatagtaaccatctattgagaagaaggcatcctaggatttctcatgtgtcttattcctcacctcctaggcaacatcatttctttatggctctgtaactcactggcctacctcatcaatacctatgcactctggtggggcatggcggcttacgcctgtaatcctgatactttgggaggatgaggtgagaggatcgcttgagctcaggagtttgagacaagcctgggcaacaaagtgagacctcgtctctataaaaaaaaattcaaaaaaattagccaggcatgatggcatgcacctgtagtcccagctactagggaggctgaggtgggacgattgcttgagcccgggaggtcaagggtgcagtaagccatgattgtgccactgcactccagcctgggcaacagagagagagagtctctctctctctgtcacacacacacacacatacatatgcactggacagtgaggtttctatcgggaatgaaatgaagagtatgaagagttattctcaagatgtcacagcactgtttgccagtatgttgacctatccctttgtgcttgtctctaatcttatggctgtcaacagccatgggcttgctggtggacccccttcttccttcccagtatatactacttgcatacattgctggtgcatgctacaaaaagagggaaatatgagccgaggaaatagcttgtttttcccaaagcatccctttgggaagacttgttgtgacctgagaatgctaatttgaagatgtagggcaggacagtgacatttctatagtcccagatgcaccaaattatgggagacaatgttgatttctatatagttttccacacttttattttattttatttttgagacagactcttgctctgtcacccaggctggagtgcagtggcgcgatcttggcacactgcaatccccgcctcccgggttcaagtgatcttctcacctcagcctcctgagtagctgggattacaggcatgcactaccacaagtggctaatttttttgtatttttagtagagacagggtttcaccattttggccaggctggtcttgaactcctgacctcaagtgatctgcccaccttggcctcccaaagtgttgggattacaggcatgagccactgtacctgatgacctgcttttttaatggtcatttagtcttggggaatgaataaataagtaaataagtgtcagaggggcgactgccagcccctgcgggagacaggcagacttgatgcatgattgctttgccggttgctctgtctttgtgaagaagtcagaagctctgagatgagaaacttctgccttcagcaaaggagaygcctctcrtcactctgcctcccttaggcactgattccagggttgtgggaagtaacactcagtagatgcttagaatagtctctagctgttcaataaatgttaactattgttgctcccatcttacaggtaaggaaactgaggccaagtaaagtgagrtcatttctcccacgccacacagagggggcagagccgacactgccctcccccagggcctgggctcataagcaccayggtggtcggtgtcctctgaaggataacagcccttcagaggatgctacagtccttcagcccctcttccagcctgaatgtcctcatctcatccatcaggctcygaggtgaaggtggaagtgaggccagaggggcagtgctgtgccaagtgagggcatgaggaagagatgatggcataggctgtcacttttaccagcacacgaacattggagcagctgctttgtttcttcaaagaaccttgaaatagcgaggggttggaggaggatggcaaggcatccacagagtgactgcctggcgcaaacgtaccctgggcacatggatgtggctgttgtccattcaattatgctttttctaaagaaatagaacttaagttaaagtaacaaagcataatatctaactactgcttacactggtttacaaaagtaacaaaatttaggccaagagtgcgaataggttggccgggcacagtggctcacgcctttaatcccaggactttgagaggccgaggtaggtggatcacttgaggccaggagttcaagaccagcctggccaacatggtgaaaccctatctctactaaaaatacacaaattagctgggtgtggtggcgggcacctgtaatcccagctactcaggaggctgaggcatgagaatcgcttgaacccaggaggcagaggttgcagtgagccgagatcatrccactgcactccagcctgggcaacagagcaagactccatctgaaaaaaaaaaaaaaagagtgaaaaaaggcaaatatctatacaattgggttcctatccactaagcccattaagctttgccacagtcgctgtgacatctaccagcagttctctccccaactctcctctgctgtgccccccacttctctcccctccacccacgagctagggcagagaaatactcaggagccctcccaggacccacacatgacagtgagtactaggcttagagttggcttcaggacagcttaatattaacacccctccaggcagctgttctgcagcctctgatttcctctggaacatgatttagggtggggagaacaccttgctctaggaaggttgattagaatgtgaggtgctccccaccttctaggaattatctgacagatgagccacttttattgaggggactgaggactcaggtgggctgggtgaaaagaggtcaggagtttgagaccagcctgaccaacatggtgaaaccctgtctctactaaaaatgcaaaaattagctgggctgtggtggcgagcacttgtagtcccagctactcaggagactgaggtaggagaatcacttgaaccggggagatagaggttgcagtgagccgagatcataccactgcactccagcctgggcaacagagggagaccctgtctcaaaaaaaaaaagaaaagaaaaataaaagaaggtggcagacacactccatggaggagaaattcccacccacctgctgttttttttttttttttggagagacagggtcttactctgtctcccaggctggagtacagtggtgtgttcacagctcgctgcagcctcaacttcctggaatcawgtgatcctcctgcctcagcctcccaagtagtcagaactacaggtgcataacaccatgcactggcttaaaaaaaaaaaaaaaggccaggcacggtgcctcatgcctgtaatcccagtactttgggaggccaaggcaggcgtatcacttgaggtcaggagttcgaaaccagcctggccaaaatggtgaaaccccatctctactaaaaatataaaaatgagccaggcatggtggcatgtgcctgtaatcccagctactcaggaggctgaggcaggaaaatcgcttgaacctgggaggcagaggttgcagtgagccgagatcacgccactgcactccagcctgggcgacagagtgagactctgtctcaaaaaaaaaaaagaaaagaaattgtggagatgggatctccctttgctacccaggctggtcttgaactcctgggctcaagtgatccttctgtgttggcctcccaaagtgctggaactacaggcatgagccaccatgcccggctctccacctgcatcttatgtataacttccacgtgtgcctgcctatttcccttgttcctggcatgggtaaaataaacaggaggaagcctttttaaaaaaccttccacttcctgggagttgctagacccttctgccatcaaatcttgctggtttgttttcattggctctaagcactgcccagccgatgcggaaagacctgcacatccaggtctagcccaggccagagagcctccttgtctttcacagaggtcaacacgagatttcctcacagggaggctgartgatgggcagggagttctgctccccctcggggcctcagtttccctgttgggatgaggagtgtgggcatggactctcagagccacctgggactgacgttctgcttccccaagccctgggcccaggtcccttctctgccccggagtagccatctcccaactccccatggatcaggtggggacgtggtggctgtggggtacactcakttgactgccctcatccccaacaggacttgatctttgacctgggtgaccctgtgagatgggagtacatgctcctggggactgataagtctcagctgtccttgactgaagaagacgacagtgggataaacgatgaggatgatgtggaaaatctggtgagtctcagcagctcgagagcccagggaatgtgtgtgaaggcttcagggagcctgacaagtgtccccagcagcatatgtgtggcagtgggggatggcccaagtagaccagtgatgggttcctcaaagcaggaaggcttgagcaattcccttattttacagatgggcacattgaggcccagaaaggccagaaacctacccaggmcctcccagtgggttacggaagggacaggacttgacgtcaggtcttctgccccccatatcgtccaccttgttcaggagttgccctgctcctttggaaagcatgtcccttgccagcctgggcaacatagtgggaccctgtctctacaagaaaatttaaaaattagctggctgtggtggcatgcacctgttgtcccagctacttgggaggctgaggcaggaggatcacttgagactgggaggccgaagctgcagtgagccatgttcatgccactgcattccagcctgcgcaaccccaccccaccacaaaaaataaaaataaaaataaatttagaaaaagaaagttgcagagcggggtcataacaccccgctctgcaaccccctgggagtcccagagctggctgttctcagttctatcccaagtagccatcatgagccccacatgctgccaggcctttcttgtctgttctgtcagttcctctgaatgtcgttggccagggccttacccacatcaccagcctcccttctctgaattcagtttcagcctttatgtgaaatggaggcagaaggatcatagttgtattcatagtaattctaataagtgcattcgtctggcatcacaargcaccacagatgcggttgcttaaatgacagaaattaattttcttacagttctggaggctggaagtctgagatcaaggtgtggacagggttggttccttctgagccccctgtcctcggcttgtagatggctgtcttctccctgtcttcacattgtcttccctctgtacaaatctatgtcctaatctgttcttataaggacaccagtcatttttctttttatttttttttgagacagggtctcctctgttgcccaggctggagtgcagtggcacgatcatagctcactgcagcctcgaactcctgggctcaaatgatccttccactttggcctctggagtagctgggactacagacacacaccaccatacccagctaatttttgtttttcagagagacatggtcttgctatgttacctaggctggtctcgaactcctgggctcaagagatccccttgccttggcctcccaaagtgttggtattacaggcatgagccaccatgcccaaccaacaccagtcatattgggttagggcccactctartgaactcattttaccttaatcacctctctaaagaccctgtctctaaaaacaatcattcaaacmgtaagtgatcaagacaacaacaacaacaaagaaaaaataagaaaaataaataaaacaaatacagtcactttcagggcttaaaacttcaacctatgaattttagggggatgccattcagcccgtagcaaaaggtagcactcacatggtccttactaagcactgggatccattgtatctacttaacctgaagtaactcatttaaatccccacagccacctggtgaggtgggcactggtattaccacctgtgattaatattatcccattttaccgatgggaagactcacacacagagaggttaagtcacttacccaragcgatacagctggtaagtgacagagctgggatttgaacctacacagtctggctccacagtctgggttctcaatggtaactctgttctacctcctggggctgcttgatgtgatgtgcttggcacagcagtgtagaccrtctcaaaagggtgctaaatgttctcagcatcctcatctccagagactggggayatcttgtgtgcagtaaatccaggcataggtgccccctgctggccttggggcatggaccagccagggcctgagagcccagccctgcaggcagccggctgagcacccacatggctaataatcaaacagttccagtcacagagtcctggtccaccctggcccaagagccctcattacagcaaagacggacagagggcagcccaaagagtcagaacccagtcatggacccccaggaaaaaccagaccccgggtgacagcccacccacctgaccatcttagagatttttgacaatactaactgctgactgctcactcatttttgtcccctgcaaaatgtcacaattagataaacagttgtcagaggtatgagcaatgtttgtggaaaaaaggttttaagtcgagaaagtcttatccaagtttctgtgattatctagtttgaggaccatttatctagatcgggccttatttcacaaatggggaaattaaggctcagagaggaaataataataggccgggcatggtggctcatgcctgtaatcccagcactatgggaggccaaggtgggcatatcatttgaggtcaggagttcaagaccagcctgggcaacacggtgagacaccaccctcctcccccggccgtctctactaaaaatacaaaaatcaactgggtgtggtaggtgcatgcctgtaatcccagctactcaggaggctgaggcaggagaatcacttgaacctgggagacggaggtttcagtgagccaagattcactgcactccagcctgggcaacagaacaagactccatctcaaatgataataataataataatgtcagccaatcagagccccaaggcctttacagacattatatcatttaatcctcctaaaaggtccagtttacagttaagaaaactaaggcttagagcagttaaaggacttgcccaggaccccttagctggtcttggagagagggtggggcttgggtaccctgactccagaaacacctctctaatcacgaagggcctgcagccagggcagggggtgctgctgtcctaagccaggcaagtatagggaagggctccctgcccagagtcgactcctccttttccacatcatgggtcgtgctcatgacctccagttcccctgcggaagccaacggaccaccttggcttggctctgcaggcagagacagagctttgaccataacttctgcttcaacaccctgaccagcaccacctcccccacccccttctctcccatcagggcaaggaggatgaggataagagcttcgacatgccccactcgtgggtggagcagattgagatctccccggaaggtattttctatttgtgtattcacttatcctctccagatccagttcctgggcctccagagaggtctgcaacagcgaggcagggggacacagcagggaatgccatgccccacatttccacccttctcaccttcagctgcaccctccctccctccctccccccttcctgccacacgcactcagctctgaccccgagggcctgacgaccagtctggcacacggggcgatgcagttcagtgagcatgtgtgggatgatggcgtgtaggtgacagcaaggcctggaaacccagcccattcccctctcacactcttctacccagaggaggccatgggcagtgcccagatggtgcggggggtctcaggaccggagaggggcaggtagagaaggcaggagggcagggactgtcatgctccatgtcaatatctgctggtgcccacctagggagcacccagacctatggggagggcatgggccacttcaacagggtgggaagtgccagagaggctgtcatgggaacccagargggggcgcacccagcccagcactggggctagggcctggggatgggtgagcagaaaggggtaccagaagtaggctaggggtcacctgggtgaagtttkgaaggatctgaaggagtcagtccaacaaggggaggaggggatgacggtgtttctggcagagacctgtacaagcaaaggcctggcaatgtgagagtgtggttggctgcagggcagaccctctgatggggctcaaatcccattcttgggtggatctgtgcttctgcctggcctgagaacccctctagggctggagccacccctggtgattattctcctcggcctccctggatcaggcttggggctggaggagttcagtacacagagaacgggcagtggatggatgaatggctgggcrgggctggccctccmttcccccaaactagcaagaagagaccacagctgactgtgtccacagcatttgagacccgctgccygaacgggaagaaggtgattcagtacaagagggcaaagctggagaagtgggmcccgtacctcaatagcaatggccttgtgagccgcctcaccacctatgaggacttgcagtgtaagggggattgctctggacatgggtccaggccagcccaggggcgggggcggcttcyactctctctggggtcattgytggcctctgtgtgcctggaataaggggggttgaaggctaggggagctggcctggctgcggcaagtgtccatcggcmccacaggtaccaatattttggagataaaggagtggtaccagaaccgggaagacatgctggagctgaaacacataaacaagaccacagacctgaagacagactacttcaagcctggccacccccaggctctgcgcggtgcgtggctcccctttcctgggccacccaggagcctggggtagaggcctcacacaccctgtggcaggtggtatgtggtggcaggaaccagcatacatattatacatgggttcttgggcagcaagcagtagaagctgccctgcctccctcagcaaacccgatgtgtgggaggtcagggaaagctcagaaattctaaggaaatataacaaatgctcctccaggaaagctaaarggggcgccacatacccgttctgtggttggaatcaggccggaacctcaccatggggtcacacggtggaggccacatttaaaggaggcagtgccggacacaggggctcacacctgtaatccaagcgctttgggasgccaacatgggcagttgagcccaggggttcaagaccagcctgggctatatggtgaaaccccatctctacaaaaaatataaaaattagccaggcatggtggcatgtgcttgtaatcccagctactcaggagactaaggcaggagaatcacttgaacccaggaggtcgaggctgcagtgagccgagattatgccactgcactccagcctgggtgacagatagagatcctgtctcaagaaaaaaaaaaaaatcctgaccaagaaatttacaaaagaaaagcataggagtaatatacatttttttaaatgatcaacctcatttggaagttgataataaaaaaaaagaaactaataaggtccctaaccaataaaggaccatcttataacccccatgttggcaaagatgaaaaaaatggtcctactgggtatgaacaagtatgggagcaacagtcactctgtgtcactgttgatgggacagcagattggaacttttctggaggacagttgggcaaaatattgataatgaccataaaacgtgtacgcttttggctgggcacagtggcgcacacctataatcacagcactttgggtggatcacctgaggtcaggagtttgagaccagcctggccaacatggtgaaaccccgtttctactaaaaatacaaaaattagccaggtgtggtggcaggtgcctgtagtcccagttacttgggaggctgagacaggagagtcacttgaacccaggtggcggagactgcrgtgagctgagatcacaccactgcactccagcctgggtgacagagcgaggctgtgtctcaaaaaaaaaaaaaaaaaaaaagtacacttttggrcccagcaattccactgctgagaatttattcttagcaaataatggacaagaacaaaaaatgcacgatgcagatgttcatcatggtgttggtaataatcagaaaaagttgtacgcaacctaaacacccagcaataggggactggttcatagctaacctcatccataatgtgggtctgtcttctccctgggcctggggttgggcgaccaagccagcagccatacttcctagtgcttatgaagctgtctcctcccamctcccgctmcccacccagtgcactcgtacaagtccatgcaacctgagatggaccgtgtcattgagttttatgaaacggcccgtgtggatggcctgatgaagcgggaggagacacccaggacaatgacagagtactatcaaggacgcccagacttcctctcctaccgccatgccagcttcggaccccgagtcaagaagctcactctgagcagtgcagagtcaaamccccggcccattgtggtaagagctcrcgggggctggggacaggtcrccctccttctctggcagctgatgtcacctctgaatggtgagagccctggctctggggtggcattaaggcctgagacatatccaagggcaccaatgatgaaccaagcattttaccaaatgtattagtctgttctcatgctgctttgaagaaatacctgagactgggtaatttataaagaaaagaagtttccttgactcacagttctgcatggctggggagcccttaggaaacttaaaatcatggcagaagggtccttttcaccttctgcctagtgaaaagggtcctttccaccttctgcctagtgaaaagggtccttttcactagaatcagggcagcaggagagagaataagtgctgagcaaaggggaagctgcttataaaaccatcagatcgtgggagaactcactcactatcacgagaatagcatgggggaaaccacctccatgattcaattatctccacctggtcccgcccttgacctatggggattacagttcaaggtgagattttggtggggggacacgaaactaaaccatatcaccaaatgcgccatcctggggttgtctggtgtcagactgtgccctcagccatggggccaaggatgtgttacttccttattgttatacaaaaatacacactcatgactaaacatttggaaaatatgtaaaaatgtagagaaaagtaaacatatctcagaatggcatctctcatatgttgccacggattataggtttggttttgagagttttttctaatgtaattgagatcgggacccagggattagagtccctgtattacccacttaacatgaaattgtgcattttccccttcatgtcattacaaattagttggcaactgtgtgtaatggcagcatgccaaagaagctctttctagcagtaagggatgtctagcaatggagtaggctgcctggagaggtggtgagctccccatctcttgaggtaggcaagcagagtcttgaaggagctgaggaggggcccagcaccatatgggagtggagtggcctggccctgagaacccacgaaatccattgtctggctaggaggggytattccacgtgaatcgccaaacgaccccagactccagtgtcctgaacgttcgttgctcctgcctgcgggcatgcacagaaatctcctctcacacgctcatcctttgctcatcctttgcatgttctggcctcccagaaaatcacagagcggttcttccgcaacccagcgaagcccgcggaggaggacgtggcagagcgcgtgtttctggtcgcggaggagcgcatccagctgcgctaccactgccgtgaggaccacatcacggcctccaagcgcgagttcctgcggcgcaccgaggtggacagcaaaggcaacaagatcatcatgacgcccgacatgtgcatcagcttcgaggtgggcctgggggccacggcgggcaggggtcggctgcaggaggaaccggggctctctgtcttattccagccasttgggagaaccaggatgggcgctggtgaatcccggcgaggaaattcatctttgctctttgggaaaaccaaaagttcccatctggggacccttctctttgagctcctctgaaaatcttccttttccaccaaaaaagcgaactcagcaggctaagacgactctgcagtcctggtcagggcaaacctcagatcctagggaggctctgtgggaggggaagagtctcactacctctgaggggctagcyttcctagtcaaacgctcactctcccggcacagtccccagcttttctgagtcttcagttcctcttttattattatctgtatttttataagtgagaaaattaaggctcagagaggtttagcaacttgctcgaggtcacacagctggaaagtggcaggggtagatttgaacccaggtggtcctatgcccygatcatggcagcctctctgtgttactaaggtggttgttgtcccaggtggagcccatggagcacaccaagaagctgctctaccagtacgaggccatgatgcacctgaagagggaggagaagctgtcyagacatcaggtctgggagtcagagctggaggtagggtcctgtgggagagtgagcaggtgggcggtatctttgtttttgagayagggtctcgctctataacccaggctggaatgcagtggcgcaattatggctctacatcccgggctcaggtggtcctcccacctcatcctcccaggtaactgggaccactagcgcacaccaccatgcctggctaayttcttgtttttgtttttgttttttaacagatggggttttyccattttgcccaggctggtctcaaactcctgaattcatgcaatctgccctccttggcttcccaaagtgctggggttacaggagtggaggaggggtgtctccatcacgccctccaacacttctcatttcaggtgctggagattctgaagcttcgagaggaagaggaggcggcgcacacactgaccatctccatctatgacaccaagcggaatgagaagagcaaggaatatcgggaggccatggtcagtcccaatcccttctccaggccccagcttttcctagacccccctggtctccagggtggtggggaccatgagggattctgctgagaaaccctctgtgggggatacggttattgataccatgcggtcatccttgctgctgaactgaccatttctatggttcatcccaaagagtacttgggatttgggcaaggtttccccccatccccaggggctgtagccaagccaaggcctgtggttgggaaaagaattaaaattatgtgcccacctctactcagggctcccactgaggttgcaccctgggccagtggccccagtgagctacctctggctccaggcctgagctctcctgctctccagcacagggagggcattcaggttacaccttcmggttgcaaggccccgcctggttttcagggccggcttctgaatccctttcaccaaccaagttgagattttagtttgggggtcgtgaggcaggatgggcatcagatgactgttctcagatcccaggggagggtgtcagcccccacgtctccaacttcactgccccctgtctgcagatggaggacacaggccccagggtggaaaagaaaagtgaagggagttactggcagtttttaactaacatcgttaataaccactaccgttgactgaataagcatctactatggattgtcaggcatcaggctgcgtgctttacagacatgatcctgtcagatcctcagatcctcagagaaggaaaccaaagctcaggtagtgagatacaaattcatgtaagaaaaaaagagttggctgtcaccagtaaacacaggtccagagaccagcatgtgggcccttctaaggcccatcttggaggcgccatgcactggaacctggctgtgaggtctggctttgtgctggcacactgctgatgcagagctggtggagaggtctctgtagttcctgctgatccagctatctgcccctcacctttrcaggagcgcatgatgcacgaagagcacctgcggcaggtggagacccagctggactacctggccccattcctggcccagctcccgccaggagagaaaytaacaygctggcaggcggtgcgcctcaaggatgagtgcctcagcgacttcaagcagcggctcatcaacaaggccaacctcatccaggcccgctttgagaaggtgccaccagggcctttgttggggagggggggatctcagcatctgcatccaggaaatgggcccacggctgtccgcccactacctcacaggcttgtgagggcctgatgacgggatgaatatgtcaatgcttggggtttccaaatgactgagttgttcctcctcacacttgtttatcggatagatgaatcgatagggagatggatggatgtaggtatggataggtgggtgggtgggtgggtggatggatggatggatagatgggtggatgaatgcatgggtagatggatgaatagatagatgggtgggtggattgatgggtagatagagggatgggtgggtgcatgaacagatgggtgggtggatgggtggataaatggatggatagatggatgggaggatgaatggatgggtgagtagatagataggtgtatgggtataggtatcgtatcggcggaatgcagatgctggcgcctattattcataacatcttaaatcacccccactacactataaataaccacatatataatacaaaactccaaaattcaaaaaaccttaaaatatctacaaatataataaatctgcaaaatatcgtaaaaaccccaatatactaaaattcctaaataatctcaaatttttacaaaacttgaaaaactcaacaaatactacaaataccacaaaaatataaaattcgtaaatcatcgtaatatatcaaaccaacccaaaaaatacaaactccattatatatataaccattaaaatccttcaattctacaacccttacaatcttaaaaatactaaacatctcacataacaaatacttttaaaaatacatacaatctgaaaacaatagaaaaacacatataactcaaaacacttactaatatttaagaaactgtaaatacatcagatcaacaatcaccactaacaattacaacataaataattaactctacaataccaaaccacatataatgaacacttactcacatgtgacctaaagttactttaatctaactacccaaacatctgttaaacaactcggcaataatacaatataaattactctgaataaccactctaattacaagatcaaaataaactaaacatacagaccttactacctcacaaacacattcacaacattactcaacacaaactctaaaacatttcccataatacacaccattaataatacgattcaatataccatcttaataatcactaaccataaacctccttatatacatcaccacatataaattcaccgataacaaatagacaacatataatgttaaatataactgctacatacaaacattatctataaaagacttgtcaatacataatatgaaataacaaataccgccctgatatataacaccgataaatccatccacctcggattctacacaacagacaatatcatacgtatctatacagacatctctcacagataaatcatacatatctaataactaactctgcacacatatatctctcgtcctaatagcatgtctctcaatcgaatatattattcatatcaacaacaaccctcactaagatcatgtacatcttatatacaatacactattcgagatatatttctctacctacatatatacaatatgccaacaatactgcgcacatataatcaacacactcccgtaatacagtcactagaataagtatcaacacctattgggctatacatcgtcgtctgctacaaataatatctgcatcgtataacaaatataatacacgcaatgatatatataacgcgttgcatacatgatatcgatgctacactgaaataccatcactatctacattgcaccatactacttcacacgacgtaacnnnnnnnnnnnnnnnnnnnnttgttgggtggatgtctgggtctggtgtatggtatgctggatcagtggatgattgtattgagtgtgtgctgtgtgcggtgtgtaatacgtggcggatgcgttgggtggttatatggcatgaggaaattgtgggcgttagtattgtgtatggattgtggtttgattggtggttggttggctgattgtttgagtggatgggtgaattgggcatggttggttgtgtgttgagtgagtgggtgggtgtcggggtgggtggttgtttgagtgtggggctgggttcgagtgttgatagatggtggaatggatggttggagggtgggatgctggtgtgtgtgggtgatggattggttggtgggctgtatgcgtgggtgaagtgttgtggggttgagttgctgtatggctgttggtctggatgcgtgatggagtgggtggatgtatgggtgggtgggtggatgggtggatggttgcgtggatggatgggtgggtgggtgagtgggtgggtggttgggtggttgggtgggtggggtggttgtgtgggtggttgtgtggatgggtgggggggtggttgggtggctgggtggttggatgatggatggatgggtgactgggtgggtggatgggtgagtgagcaggtgggtggatggatgagtgggtgggtgggtgggtgggtggatggatggatgagtgggtgggtgggtggatgggtgagtgggtgggtggatggatgaatggatggatgggtggatggatggatggatgaatggatgggtggatgagtgagtgagtaggtgggtggatggatgagtgggtgggtggatgggtgggtgggtggatggatggatggatggatgggcgagtggatagatggacggttggatgggcgagtggatagatggacggttggatggatgagtggaaggacggatggacggatggatggcagggatgggtggagggatgggcagaggaatagatgggcagatggctgggtagacagagagatggtacactgtaacaactcctagtccttgacccatttttgttggtcaggcacacaccatgtagttcccgtgcactactaagattatgtcacttaatcttcacaaggagctctacaaggggaggggggagtacaatgaccctccttttgtagacaagaaattgcaggttctgaaaatgccagtaacttgtccagagctacatggctctctcagtcttgccccgttctgatctcatggacatgacatccctataaacatgaccccactggctcccacccaagatattttgtggcccctgcctctgtggcaggtatggataggtggcttgtgtgagtggggacactggggccaaccgtcatggtgctgtctagtgacccatgggattgcagcctgcagcctgggtgaaggtcagccttgtcagtcctccttctctgtctgccctatgaccacaggagacccaggagctgcaaaagaagcagcagtggtaccaggagaaccaggtgacgctgacacccgaggatgaagacctgtacctgagttactgctctcaggccatgttccgcatccgcatcctggagcagcgcctcaatcggtgagcaggcagggcaggtggagagaacccactgggaggctggaccaccagctttgtaacccctcaccctctttccttgcctctctgacttcagacacaaggaactggccccactgaagtacctggctctggaggaaaagctctacaaggacccacgcctgggggagctccagaaaatattcgcttgatgtccctcctggggcctcagccagagctgccagagaaaggaaacctcttcccgcagcctggctcctgtgttccctctatccagccaatgcctgtttacacagacacctggcctcactgccagcccacctcccctacagccctgtttgttcctgcttctcatgattttcctgtaaataaacacactcttaatttgccatttgtgccttgcgcttcacaagctccagcagcagcctttctcttcttctgttatctatagcctgggaccacccccttcctccccttggcctgtcgtttgcttcctgtccttctctccgttggaatgtcaggtcttcacagcacctctgcagatggtcccacagccatctgcaaacaactggttatatctcaatgtgactagggtggcccacctcaccaagtgggatggggaaggctaagatgcatgccccagaatttgaggactgaatcccagctcctcctcttaccagataccacttacccatctgtggaatggggtagcattgttgcattaaataagacttatggccaggtgtggtggctcacacctgtaatcccaacatttagggaggctgaggcaggaggatcacttgatcccaggagtttgagaccagcctgggcaacataataagaccccatctctaaaaaaaaaaaaaaacaaagagccaggcatggtggcatgagcctgtagtcccagctactcaggaggctgaggtaggaggatcactttcacctaggaagtcaaggctgcagtgagccatgattgcaccactgcacttcagcctaagcaacagagcaaaaccctgtctcaaaaaaaagaaaaaaaagacataaattataaagcagggaggctgggaatggcacatagaaagcagtcattaaatgttagcttacaaaatagccaaaaaacacatgaaatggttgtcaaattcatgagtcatctggcaaatgaaatgtcacaacaccctccggtatgaaaaaaataaaaagtactggtgacgatgagaaacaactggaactcccaaatagccttcctagtgaaagtataaatcagtacaaccattttggaaaactgcttggcattatctattaaagctaaactaaagcccaacaattctactcttaggttctactccaatccatcattcatcaagtaagaatgatgaacaactcaaccgaaatgtagatagatagttatctgctaaaaggcatgtgctagaactttcatagcagcattattgataatagcaccatacttggaagttacccaaatgcccatcaagagcagaatggatacataaattgtggtcttcagatattttgggttgtctttaactgcttagggagaactgcttagggagaatgctactggcatctagtgcatacaggccagggatgctgctaaacattctacaatgcccagaacagccccccacagcaaataattatctaggtctaaatgccaataatgttgaggttatagagtatattagtctgttttcacactgctgattaagacatactcaagactgggtaatttgtaaagaaaaagaggtttaatggactcacagttccacacggctggggaggccccacaatcatggcagaaggccaaaggcacatcttacatggtggcagacaagaaagaatgagaaccaagcaaaaaggaaaatcccttataaaatcatcagctctcgtgagactaattcactaccatgagaacagtatgtgggaaacccctcccatgattcagttatctcccactgggtccctcccacaatatgtgggaattatgggagctacaattcacaagatgagatttgggtggggatacagccaaaccatatcatagagcaatgaaaatgaatgaactgcaacacaactatatggaatgatatggtcaaactgcctaagtataatgtcaaaagattcaagacacaaaagtacatactctattattccatttatggaaagaacaaaaataaggaaaattaattggtgatattagaagtcagsacaaccgtcactcttggagtgtgagggttagtgaatggatgtgagcatggagccctgggaggggaggttctggtttctagtcacgttctgctttttgacctgggtgtgttcggtttgtaaaaattcatcaaccttgtgcacttacaatgtgtcctctggagtgtttttgactgcttgttgtcatgaatctaatcaagcctttagccctaacttaagaaattcaagggaagaaatgcatttaagaagaacgtccatctaacaagaacttcaggaaattcaggtaaatgatactaaaaggaaacattcctaacgtgggacaatctaggtaaatggcctgatctcttcaaaagatcgatgtcataaaaataaaagtttggggacagaaatggaaagaacttaagagtcaagtgtggtgaatactgattggttcttagttagaaaaaaaaagtcctaaaaggtttttgggatgactggggacatacgaatatggactggttgttacagaattaaattttcttagcagtggtgataacaatggttattgtagaataagggctttatttttattttttgaaatggatctcactctgtcgcccaggctggagtacagtggccccatcccagctcaccgcaacctctgcttcccagtttcaagtgattctcctgcctcagcctccccagtagctaggattataggcacgtgcgccaccacgcccggctaatttttgtatttttttgtagagacggggtttcaccatgttggccaggttggtctcggactcctgacctcaggtgatccgcccgccttggcctcccaaagtgctgggattgcaggcgtgagccaccgcgcctggccaagggccttatttttaagagatacatgctcagtatttggtgttggggtgaaatgtcatatctacaattttcaaatggttccgaaaagacacacagacgaagcaaatatggcaaactgttaacaagtactggaatctacgtggtatcattatattgtcttttaaagttttctctgtttagttttctttttataatacaaaattaaggggaactgcaggctagacagttttgatccgatgttattctgctaatcttttaaaggtgtcttgcggtgactcacgcctgtaatcccagcacttcgggaggctggggcgggtggatcacctaaggtcaggagttcaagaccagcctggccaaaatggagaaaccccgtctctactaaaaatataaaaactagccttagcccgtcgtggtggcgggcgcctgtggttccagctacccaggaggctgaagcaggagaatctgaagcagaaggctgaagcagaaggcagagtggggactcccccacgctttggctttcagaacaagggttcgaattctggggctattactttctgaccgtgtggttttctgcaagcatcttaacccgggcctcagtttcctcatctgtaaatgggaacaggaattcctacctcttatggttgtactgggcgttatgtgagcccaaggagccctgacctgcggtgagaggctggaggccgaagggcaaggttcgaggggctctgggtgcctgggacaacctctgggcaacagggagaggcggctgcggggccaagtccctcctaagcggccacgcgagaggccctgagtcgagaagggttacggcgcttcccagagcccaccccgcccaacgtgtcacaaataaagctggcctttctccgattccctgattgcagccattcagggagcagccccttgcccacgcatccattagtcgaggcggtggctgcgtgtgcagtgctacagggttcagcgcctgcctcggctccggaatcaggctgtttccttctagacctcccatgggggattcaagccggcgtccgggtcaaagaacagggacaaagtcctcctgccaygggggaccatctgcaggcaaagtgaagaatgaggagcttcggcaaaatgccgactaaggcctccttaggttttgccccactccaagatggaaggcctgaggcttcacactgcccccgaagttcctttcccattggctatctgggaattgagttttccaataatgcggacgctgattggtcaatccaggacggttgctcaagccattggcgcagccgccattggagggcggctctcaaaagttttcagacacaaattaggttcgagggaggaaacggagaggaaagggaaaacttgagacggaggcgggactaaggaaacggcagcttgcattggtttattagaggccaaggggcggctcttgaacgttccttcctcttgattagtcctatttaggaaaagagggcgggtactgaggaaaagcggcagaagcgcctkcttccattggtcagtcctggcaggaggcggagcacccgcggcagctgattggtgcgggaggcaaggtgggcggggctctgagccggaggttttgttgtgagggtcggttgtcaagcagcggccaatcaaggcaggggatggaggcaagtgggggtcgcgcctggagcggagcctcggcctccggagccgcagctgcaggtggagtgggcaaggggacgaggtggcgaggggacggtgggccctgggctgggccgagccaggcggggctggctgggcttgcgggcagagagctctgagcgtggggaggctagagcccgtactccgcaagcagagggttgggaggatcagccgtggccgagggacctgcccccgcccccggacgagaggggtcggggtggaggccggagggggcaaaaccagggaggccggaagcagagctgggggtctgcagaaggacaggtaatgaatagggagaagagaagtaggagaatgaatgaatgggagaccccgcgagcatatgggaaagggcagtaacgggagtctggcgaggcaggggccacgtgagggatatcgggagacaggatgtgcataagtgggagactcagggggcagggagaaaagggggtgtgaacggaggactagagaggcagacccggggacccaggagaaaggggacggaggggagcgggctcatgggaaagaggtgaagtggctgtgggaaggaggtgggaggctccatgaggaggccttttagagttgaagagtcatagccacttacgcccagactggaggcctagttcctagctctgtccttgggaatcgcagggagcaggagcggttcccttgccaggagctggggaattggaccatcagggtcgtcttcgagattctttccaaggaggacttcagtggccgtctctgggatgcctttcctaggcccctaagcttagcttctgactccgctctcccacatcccacacgtcagacaaaaacaacgactcgcaggaaatctatgtgaattgcagacacgtggtcttctccgccccactgcggctgctgcactttaggcagccagcatcccggaacagagctgcagctcattatcctggcctctgggaggagtttctttttccttacgttccaaatcaccctacctgaggtgccccctctgcagattcccaaacctaatttgcagtgcagcttctgactctggtggctttggtgggtgtcagtctttatcaagtggtcttggtgatccagggarcaacagctcttaccaagcattttctaacatgacgtcacctcttgtttgtattgcagccctgtattgagctgagatggctcgagcctaacattccatgatccaggatcgtgacagatgtgcacaggctgctgctgttgctgctgtgggtaatttggaaccacgaggcaccccagggccagaagacgaggcattctgtctgcctggatgtgtgggaactctctgccaacttgattggtggatctggggggggatccacccccaccccacgaggaaagcacagtttattttgtggktggggcttcaggtgccasccagctgaaggatggccacccctgtggtcaccaagacagcctggaagttgcgtgagtggttttcatttttctttatcaccccatttattctgttagcggcttgttgctgggaggcctgaacccacagctttgtttcctgttcttggcacaggaggagactcctagacttgggagtaagatagaccattatgtaaatcatgactgtggcacttcttagctgggtgacac

SEQ ID NO: 93572 - DNA, 77502 bp, Homo sapiens
  misc_feature (1)...(77502): n = A,T,C or G
aaagttttaatgtgaatttcctcaaataagttcaacagtatcaatgcaagggaaagattatttctcttgtgcaaacctgaacattttaaatttattttatatttctttgaatgtcagtgaaccacataacgtatgtcaggcactctttcattcctaatgtgagaatggtaatccctcataaccgattcagtaactgcccctcccagcacttctgacaaatagaagccatgagaatcatctgataattgggaaggtgaaggccaaaactggtgtgaaaaaacagaagagtgggagggaatggtgggagcctgtatgtgcatggatgtgtatgtgtgtgcccagtgtacatgaaaactagtttgggagaaacaaagaaagccaagctgatggccctatggttaagatgcatggggttgacccacacacacccatggatctcactctgttttagtttaggagataatgatgtcagtgtccacctaggggtctatcacagagttgtttagtgacccgttaagcaccaggcaccctccccctcaatcaacttaagtctcttctggatcaactatctcagtgcctgctgcatgtaaagaacttgggaaggtgcatgtatttttctttccatgacaaaaccgtaagttaaaaattgtagagttatagcaagtccttagagtccctgagaagagcaggagaggaaggaggaaagaagcatgccttcttaaagagataggaaagtgcagttagctcttttggaaagtctgtcaataggctgtcataaggcctcctctgccaccacggtatggaggaagaatttccttcactgctattctcatccctttactatctgaactaatgtggtcacctcggtcacatggcttggtaacaagtcatctactgctgtcttggattatcttgcttcctttaatgtacgccttgccccctttcacttgcccttagtccactgtcactctcaaagacctgccaaaggtctttgaggatccctatggctgttaattaaccaatatcaatattaaccaattaacagccatgtgggctcttgcacatttgggtgaaacctgtttgatattactgtccaggatagtctagggttagaactgtaaccaccaagtaatgtgcagcctgaagcatgtatcaaaggaggcaactgataccaactagcagggtcagtcccatctgatgctgtggggtcttaggaacttttagcaccagcaggcgacagcctcttcaactactctctttgctcccatcccttgagtcattgaggagttctggcaacattatatgcatagcaactagactccccgaagtgtagactggagataatcaccccagtttaatattcttggagatgtttcaatggggggctctgcaatggaactgtggaaagggcactatgctcattcagccaaagagacagagggcttcccaatgtccttggcttgcagtgctgttgtgtttaagagctctgctctggagtcagactgcttgggttcaaatcctaactccatcacgtaccagtgctgtgatcctagacaaatttcttaactcccatatgctttattttcttcatctataaaaatagagataattatctacttgtgccagttttaaaactaattctttgacactcctgtcattgagaggtggggcctgtttctcagccccttgaatctggatgagcttcacactacttcaatgtaaaacgtggtggaagtggtgctatgtaacattcacagttaagtcagaaagaccatgcagctttcacccaccactcttgagatgttcattctgtaaggaacctgattaccttaacattgccttgctggacagccacatgcaggtgctctgatcagtagccccagctgagtttccagacaacagccagcttgagcagtatccttagatgactgtggtcccagccaacatctgactgcaactgtaaaagacatcccaaattacaatgaccaactcatacccttcccaaattcctaacccacaaaattgtgagctaaatataatgtttgctttattaccaccattaagttttggaattttttatagtgcacaatagtaataagaacattacttttatctttattataaacatttaacaatatatgtgtgagacttagaacaatgtctagcattattaacattcaataagtattaatatttattctccaggttagaaaccattgcatcagtagaatgcaaactttctgcttctgcttcccttttaaaaatttggaaagctaagtattaacttcaacacttttaggtatacaaacaacatttttcatcataaattaagtagtcatgagccacataatgacatttcagtcgatgacatactgcatacatcatggtggtcccataagattataatggtgctgaaaaatttttataaactagtgacatcatagttatcataatgttgtagtacaaccattaccttttctgtatttagatacacaaatacttaccattgtgttataattgcctacaatatttagtacagcaatatgctataaaggtttgtagcttagtagcaataagctctaccatatagcctaggtatggaataggctataccatctaggtttgtgtaagtgcattctatgatattcccacaagtatgaaattgcctaaggaggcatttctcagaaagtaaccctgttgttaaggaatgcaccactgtagttgcaaaggatgcaatgtctagcatattgtacatactagtatttttaaataaagtggttacatcactatcttaaatgtatccaatgaaatttaaatcccatagctatttgatatctatcattatccattttaaaaattcatgaacaagctcttctttagcagctggaaatttaacattcttcctttttctccctgaactatttttttccagtcaatttctcacccagaattttaatatataatatttgtatacttgaaaatgtctcacagatgaccctgtcaaataattttgatgcaatgaaagtaatataaataaaaatttaaattattttttatgaccataagattgttatcagatatcttagggatcgtgttatcttgacaactataatcagacataattgatcaaatgcagattttataaattttgataaactttgcttaacataaaaaataaaatttttttggaaatctgtcttttaatggcttgtatagggctgcgatatattttctgaattaggtcatgtgttcatggaggtatgttatttgttgggagactgagacaggtaggattaagcattaattctattccctttattttttcatttttaaaggtacatgttgtgagaatcttgtttacataaataataaaaatggaactttcttattatagtaaaatcattcagttcttttaatgtcttctcaaatatatataaaaatcacagtgatgtgtcattttaaaatgatatatgtatattttattgatgcataatagatgtacatcaattcagggtacatgtgataatttaatacattcatttaatttgtaaagatcaaatcagtgtacgtgggacatccatcaccttaaatatttgtctttcctttatgctagaaccattgaaattcttctcttccagctattttgaaatacacaatacattattgtaaactatagtaaccctactgatctaatactaggttaatgatacatttttaaatataaatataaaaatgatgatgtatccacccccagctatgagatggagagcttcttagaaggctatgacagaggagtgaaatgatcagagttacgtattcaaagaatcattctggctacggcgctgagaccaggccattgggagtcaagggaagaaggagggtgatttgaaggctactgcgatgatcttggtggagatgagagtggcttagaacaggttggtgaacactggagttcaatgtgtatatatagtttgcaagtagaaaggataggacttcctggttgattggtacaagaaaagtaatacaaaagaataaggggagttgagaatgacccaaaggatcgtggcctgagccacttgccaggactgggaagatgcaggaggatgaatttttctgggtaggtgtggagtaatcaaagggttatttcgtatttgttcacggattcaccatgttttcacgctctttatttcttcctgaggatacaagtttccatctattatcattttccacaatctgaagaacttcccttagcattacatatctaagagcaacaaattcttctttatctaaaaatatcttttttcaactctgtacctggagttctgttcatctttttcattcttgtttctttattcttcagattagataatacctgatctgtcttcgagctcactctgtcatctccattctggtaagtgtattcagtgacttttaaaaatttttcagataatatattaatcagttctagaattgtcatctggttattttctacagtttccattattccgatgggattgcttatctttcattcactgcaagtatatttttctttacctcattgagcatagttataaaagctcactttaaaatccttatctgttctttccgtttctaattataccaaaatcgtattcaatctacctacctgacacatatatttccctttaaaaaatggggtgagggaaatctaaatctaaatatgtctctttcccttgctcaaagtccttcagtggctcccttgtacccaagaataatattgaaatccaccaaactgattttgaaggcctccaacctactttgtcaactttatatctaactggtttccttccttccttcctttcctttcccttccttccttcctccctcccttccttcttttctttatttctttttttatttcagggtctcactgtgttgtccaggctggagtgcagtggcacaatctcggctcttggctcactgcaacctccgcctcctgggttcaagcgattctcctgcctcactctcctgagtagctggaattacagaagcatgccaccacgcccagctaatttttgtatttttagtagagacgaggtttcaccatattgtccaggctggtctcgaactcttgaccttaggtgatctgcctgcctcagcctaccaaagtgctgtgattacaagcatgagccaccatgcccggccatatccaactgtttttctgcacaaagaatgagtttcaactattttggtttacttctgctttgtttcctgttcgtttaaagtacctattgttttatgcctccttgtttttatatttcttttcctttccccctatgaaaaactctacctacccaatttacagttttctcattgaaattccaggctatcataaggcctcctctgccaccacagtatggaggaagaatttccttcactgctattctcatccctttactgtctgaactaatgtggtcacctcagtcacacggcttggtaacaagtcatctactgctgtcttggattattttgcttcctttaatgtatgccttgccccctttcacttgcccttagtccacctctcacacacaccttcagcatcctgaagcaacattcgacatgatgttggatttctccccttaacatcaacaagatatcttaaaggccggtggtggaaccagaaacctgaaatagaaaggttttgttttgatttctagaaacttctgttaagatagtaaggagagaattcaggtttatggccctgcgggttctcagaggcaagttccgaccatgctgttttcttctcacagatcccaccctttcttcctggaaagaagacagccttgggtcctgatgggtggggctttgaagaggccaggagtgggaatttctagaatttggaatcgagtgaattttctgacatttgagtacaggacccaggggttcttggagaagaacttggtcccagaggagcttgactgaccataaaaatgagtcctgcagaagcacttgatgattaaaacttgtttaaaatcttagttgcaacagatattgatcttggatttatggagaaagatgtagtcagaggaaatgatacatgtgtaacgcttgatgaaattttaaaacttgcccaggaaaatgaagtggattttattttgttaggtggtgatctttttcatgaaaaaagccctcaaggaaaacattacatacctgcctcaagttattaagaaaatgttgtatgggtgataggcctgtccagtttgaaattctcagtgatcaatcagtcaactttggttttagtaagtttccatgggtgaactatcaagatggcaatctcarcatttcaattccagtgtttagtattcatggtaatcatgacgaccccatgggggcagatgcacgctgtgccctggacattttaagttgtgttggatttgtaaatcactttggactttcaatgtccgtggagaagatagacattagtctggttttgcttcaaaaaggaagcacaaacattgcactctatgatttaggatccattccagatgaaaggctctctcgaatgtttgtcaataagaaataacaatgttgagatcaaaagaagatgagaactcttggtttaacttatttgtgattatttgtgattacagaagtaaacatggctaagtactaacttcagtccagaacaatttttggatgacttcattgatcttgttatctggggccatgcacatgagtgtaaaatagctccaaccaaaaatgaacaacaggtcaggcgcaatggctcatgcctgtagtcccagaactttgtgaggccaaggtgggtggatcacatgaggtcaggagttcgagaccagcctgaccaacatggtaaaaccccgtctctactaaaaatacaaaattagctgggcatggtgccacatgcctgtaatcccagctacgtgggaggctgaagcaggagaatcacttgaacctgggaggtgaaggttgcagtgagccaagatcgcaccattgtgctatagcctggacaacaggagtgaaactccatctaaaaaaaacaaaaaacaaaaatgaacaacaactattttatacctcacaacctggaagctcagtggttacttctctttccccaggagaagctgtaaagaaacatgttggtttcctgtgtattaaaggaagaaaaatgaatatgcagaaaattcctcttcacacagtgcggtagtttttcatagaggatgttgttctggctaatcatccattttttaacccagataatcctaaagtaaaccaagccatacaaagcttctgtttggcgaagattgaagaaatgcttgaaaatgctaaatrggaacatctaggtaattcttgccagccagagaagtctcttataccactgcgartggactatagtggaggttttgaacctttcaacgttcttcgctttagccagaaatttgtacatcgggtagctaatccaaaagacattatccattttttcaggcatagagaacaaaaggaaaaaacaggggaagagatcaactttgggaaacttaccgcaaaaccttcttcagaaggaacaactttaagggtagaagatcttgtaaaacagtattttcaaactgaagagaagaatgtgccactctcactgctaacagaaagagggatgggtgaagcagtacaagaatttgtggacarggaggagaaagatgccattgaggaattaatgaaatgccagttgtaaaaaacacagcaatttcgtctgggcgcggaggctcacatctctaatcccagcactttgggaggccgaggcgggtggatcacaaggtcaggagatcgagaccatcctggctaacacagtgaaacgccatctctactaaaaaatagaaaaaaaattagctggacatggtggcaggcgcctgtacttccagctacacgggaggctgaggcaggagaatggcgtgaacctgagaggcggagcttgcagtgagccgagatcgcaccactgcactccagcctgggtgacagagagagactctgtctcaaaaaaacacaaaaaaaaacaaaaaaacaaaaaaaaaaaacacagcattttctttaagaacgtcatattgatgccctagaagataaaatcaatgaggaagtatgtcgattcagagaaaacagacaaaaaaatactagtgaagatgatgacgtccatgaggctattaacagggccagaggtctcagatctcaatcagaggaacctgcttctgcctttagtgctgatgaccttatgagtatagatttagcagaacagatggctaatgactctgatgttaacatctcagcagcaaccaacaaagaggctgaggaagaggtggaagaggaggaagaggacagaattcagcatcagaggagggtctcaaagaggaagagcaggccctggtctggagacttctactcatagcaggaactcaaagaccatggtgccagcatctagaaatatgtctattacagaagcctttaaatctacaagacagcagccttcccaaaatgtcactaaaaattattcagaggtgattgaggtagatgaatcagatatggaagaagacatttttcctrccacttcacagacacatcaaaagtggtccagcacatcatccagcaaaaacatgtcccagagccaagtattgaaaggggttgattttgaatcagatgaggatgacgatgatgatcctttttatgaacattagttctttaagaagaaatagtagataatatatttagtggcactgagaaatttgcaaaatacaggaaaaatcaaaacgttgcaagctaaaagtttacagtttaagattttaagtattgcttcctgagaatgactccgtaagtaagaaacttctcagcactgattcatcttgttttttaaccacgttgttattttaagagctttgtttaaatataattattctttttgttttgttttgttttgagacagagttttgctcttgttgcccaggctggagtgcaatggcgccatcgtggctcagtgcaacctccgcctcccaggttcaagcaattctcctgcctcakcctcccaagtagctgggattgcaggcatgtgctccaccatgcccagctaattttttgtatttttattagagacgacggggtttcaccatgttggccaggttggtctcgaactcttgacctcaggtgatccacctgccttggcctcccaaagtgctgggattacaggcgtgagccacccccacccctaaacatcattcttgagtaaagattaaaataaatctaccattttacatttctgcttcatgatcatttagttttctgcatttagttttctaaatgtagctatataaatggttgcatttagccaaagttgagggaaagagcttataaaatttaacttcttcataatataataatttcctagaggttctggatttcctgaaagtaaaacaaactatgtgaacctgggcctgaactcagtgttcgttactatgtatgtttttttctaatgctccctgaaagactgaatgattagaagtaacttatagtttgaacagatatgtttctattaaaacagtagaataaccacaaaaaaaatagtaaggagaaagcttagagcgtaaaggcatggagtggagaataatatttgattatgtaagtattactttccttctctcctttcccttaggcaaaaaagaaacttgaggcaggatgaaaggatcagagtggactggataaggtttgagttgccactgggcctgacctaccctgtgtccaaggaagcatctacgtgaaagggaagtggaagattatggcaatrtaggcctgagggcagcctccctgagtcttgtaccctgagcaattgtagaatgtactgcgaaactgggacacttttgagcaggaagagggctattaatagtcacatagagacaacaggcaaaaactggcaaagtcttctgcaaaccaggaggtataatcatcctacgcatccccccagcatgatgtgggacagcatccaaacgtttctctagcagcggtccctgccatcaaaagtcrtgcaggaatgcctgaggaagccagcagctgcgaaagctggggtcgagatcaaggggatacgaagtgcacaaatggggccctggaggcccacagatgtgaggggagaaagtttcatcccgggggcatggattagcagccctgtcatgtgggcccctgaggactgaggatggcacacagaccaggtgctctgccccggcttagatcacagatcacccctatggagaagggaggtgaggagagaatccaaaactgactgagtttaccttcaaaggtgactgtttatcttgaattgccagaatttttattctgtaatcaatgcgaattaaggtttcatgagctagacactgaggaatgagtgatgtttttgtattcctggccactatgatgtgtaaaatgtaaaattatttcaattttcgttctaagatgatccacatttgtttccaatgtcccctgcatcctctgaacttagtagaacatcagactattcccaagtaagtaaaacacacacatcttcagacaagcaggttgtagatatagaccataatgggcagagcctagcgggaggagcatgaggatacagacctccaaatctcagcacaaagaagttcaaaccagggctgctacatacagtcagaataacagcaataatgatcacaataactaatacccatctagtttgggatctgaaccatttttacatgtattctcatttcgttctccatttttagatgaggaaatggaagcccaaataggttgtatgacttgctctactttaagcagctttcagggactcaaaccctgatgctgtgtttcactgtccatatattccttccaggtcccccagctgctgactcaaggaccaccacccaaaagcatagagaagggtattttcccacacgaagagtatggaatccttccagccatgaaagaactctgtgcattaactatgtttcgagagatcaattcctttcactctcacttaatggtattggtagatagcacactggctatttgctccgctaatgccttggattttttccttacccgtctggtgcaggcaaagaaaaaaagatttcttctttcctgttaatttgctaaacatgaattactgttggtcatctttatcgccttttacaaacctatcgctgtgtaaggagttgctttgtatttttacagcatttttgctgcataaatatgccacacatttcttttagaacatcatcattgaaagaaaacacagttcatcttggtaagttttagaacatcgctatttataaagcatggagcaactctctctaaaaatatttaagtgtttggcaartaaagaaaacacactgaagccatcagcaaaatatgtgctaaaggctatgctgtccttgctatcactgctttaaagaaacatcaagaaaaaaataatattctctgtgagcctttagcagcctcttatagaaatcatctgcttcttcaccacctcctctcctttggaagagaaaaagaactgagcatgatcccaaaaaggaaaagtagagagtgtgtaaaatgggaagaaattattttcttgtttttaaaggtagacaagttgtgataatgatcaggcaaccagaatcgatgacattttgtgatcttacaggaaacatttgggatgtcagactatcagtaagcctggcccaactagtgccctttattgctataatgttctcaaagttcttttttcaaaacttgaaatgctctttattaatagactcaaagggcatttctaattcacaaaaactattatgggggtccaatatctaaatccgtttctcccttgtcagagttttgatgctgtgattactttggtccatttcttgtttatgtaatgttgccttagtttcaatcctagggactgatcaatcattcataattcaatcactcaaataaattcagtctcaaaaattcaatcactcccaataaaaataacacactgaggctatgtgtgactcagtacaaacttaaatatttcttcagccctacagtgaaaaaacaaataacgacccacattttggatgcattattcccaccgtttatacactgatactgccttgctacctggtagaaaaaagaaattacttcatttgtcacccattcctgacatagaagaatatcattttgtgtagggtttaaacttgactaaatakttcaaagaaacctcccactaatattttccaacatgatgatcacattgccttaaggggaaccttattaataaaaaccacaaatattgggaatgagaaagtaaacagcaaaactaaaacaatgcatgcgttcagggaagcggttgtctaatgaaaagggtgcctgagagaactgttaatctggagaggcagaaggtgtttaacaggcatcagacagaggcgggtggacccaggctatgctgcatatgagctgtgtaaaccaggcaagtaattgatcctttccgcattcctgtgtccccactggcacaaaagtacagattcaatgtttctgtgaggattacagatattgaatataaagcatctagtcatagtaagcgataaatgaaacatcttgtcattcattgttatattatttccattttaacacctagagtgtttttaaaatgtgtcaaagcatccacacgttttatttaaatgtaatgcacattgaagcatttgacccaattttttttccagcttctaaaagctgatttgtacagtgatgacccagtacctgtgaagtttaggccatatcaccagggaactctttattccaaaatgtcagtggcctgatttaggatacactttgcacaggctggttaacggtaaggagactggaagcatagaggttcccctataactatttaaggcacaataagagggctaaggtgctgtgattagttacaacataaattaggagaaggcatgagacagggccagtaggggcagcagacctgaccacactaagaataaagcaaccagagggacccaagcatctgcggggctgcagactcctcagagctgctcacagcacttccaccattcctgtaacaagtcctggaaaaggctagggcacattgtggaactttcagttgctataaaaaaaacactggctcattttcttttcacactcagattatccatacaaggagtttttgcttctcaaaagtgtgctccaagaaccagctgcctgggcagcacctgggagcttattagaaatgcagaattggccgggagtggtggctcacacctgtaatcccagcattttggaaggccgaggcggtcggattgcttgaggtcaggagtgcaagaccagcccggacaacatggtgaaaccctgtctctactaaaaatacaaaaatcagcwggcatggtggtgcatgcctgtaatcccagctctttgggaagctgaggcaggagaatcacttgaacctggaaggtggaggttgccaggagccaagatcgtgccactgcactccagcctgggtaacagagtgagactccaccaaaaacaaaaaacaaaaaaaacaaaacacagaatcaccccagacctactgattcaggatctgcattttaataaaggtgtctcagttgattcgtatgcacatcgaagtttgaggctttagtttgcacatattggggtattgtgtgtatggagtggctgaacagggtgaagaagccataatttttgagtggtacagaagaaactgagacctacagagttttagtaacttttctaagtgcatctatccctgagtgattccaaaatccatgctctttcactattattccacaattttcattacttgaaaaataggaactcttcaaacttgagctgcatgcctgttaaagaatacatatgtctttgtctacggccataccaccctaaacgtgcctgattttgtcaaatgcatatgttttctatataaaatttcctccagacaaatagtggttagcaggattagtacagatcgtcccaggtgggttgggggaagggagagtgggagtagggatggaaataaaactcaaaccagggcaagtaatttccccataatgcagcacagactcttctattaatagaataagactatatgtgaattctccttgtctcaaaccctaagacctgcttctagccttgagcttcttaagacactgcttcctgcctcaatggtacatggaacatgccttcctttgtcttgatgccattctgaccacagcatactctattaagtgctgacgtaccatatttaaattttcccattgatttcttttgtgagttataactaaaaagtaactgtggaatgttggcattaacaatgtttgacaaactaatcagtttcttaattcattttcttcctgaaatataacttttcaagttttttttgtttttttgagacggagtctcgctttgtcccccaggctggagtgcagtggggtgatctcaactcactgcaagctccaccttccagattcacgccattctcccgcctcagcctcccaagtagctgggactacaggtgcccaccaccacgcccagctaattttttgtatttttagtagagacggggtttcaccgtgttagccaggatggtctcgatctcctgacctcatgatccgcctgcctcggcctcccaaagtgctgggattacaggcgtgagccactgcgctcggctgatatgatcttttaaacagatatgctacccattcagagcttgatagaacatgttttattcttggcaaacaggaggtgaggcagggaggaagccagaacataagcagctcaactttcctctcctcttgccctctcattcttctgctggtgcttcccttggccaagcccaacaggaagccagaggccaagggagccagatgatagtctgtagaggttggacaatcagggcacagaaaagacataggtagagaatggatctgcaggagaaacagaataatcagcaagtggaggatgttctaaaatggccactgtctccacagtggatgaaagagctgcctgggaatggagcctgcctgaagttggaggccatgaatttatagtggcacttgccagtgcagacctgtgactacctcctggagtgcccagaagtccaattgtaagcctggagaaatgggacggtttggctgacttggagttttgcaggcaggagaaatgaaagcacagtggaggtgaggaatttgacactggataaacatcagtgatggacaatgacatgtaatgtttgtgaataagatattgaaaagaggaagctactaatagaaaaaaaagtcaaattcctggaagtgagacccgggggtacactgctgtgcttctcagcggtctctggagagtcacagcgtctctgagtggacaggaaactgggccaaaacagggatttatttctattgctgagcctcctcctgtcatgagcatctcttcaggtcgtgttggtttttgtctggcacatctttttgtgttggtgaatggcagcttcaccaagatatcatcaaatatcatcagactataaatcacaatgcccacctggctcccggtcacactggagcattggattttgagcactgtagcatgccatttacatgctaccatatgctcatgcaaggaatgagcacatagctaacaaaatccaatcagagcccttccacaggactgacatgtggacaaggggagagagaagacctctattcctgttgtattgtgtcttatcgtattgtattgtattctactgtattgcactgtattgtatccctatggcactgtaagccaaagtctgcaagcctaggtctgccaagatccagcttggctctcaggyggagaaaatctatcagaaacaggaggaaaaatataagaccaacattcaaaaagacagacaagaagaacaaaaagatgtagagataaaatgccctgacaacatcatttgaggtcctcaatccagtagtgtatggatctagccctttgattgccaagattaatgagacaataaagtcccttttatgctgatttttacagggttccaactggtttttgtagggtttctgctgcttctcaccaaaaggaagctgagtaatacaatagtctggatctgtcaccagtgcctagcttggtcctggaactggttggttattcggaactccatgtagggcttgggctgaatctccctgggctgttctcctggccagaaggactcaggatgttacctaccctgagtccctctaacttgaaagttcctcaggcccagtcaaaagtcactctgcccacgccacccagatacctgtggtcattccacctttcacctggagctaattcaattcagcgtcattgaatgacgacaacataaagaatcagagactcagagacttttcaggcctgatacaaattacagtgtgtgaagagctggctaagccccttaattttacagatgggtaaactgagaccagtaagtctcagagacttgcccatgggcactcaactataaagcactggaggaggctggggaagggacctaatatttatctaaatgtattgagcaatcaccatgtgccacattgtgagctttacaaatgtcccctcattctccaaaccaccctgcaaagttgggcttactactgccattttccagatggggatggcgaggatcacagatttttaataacttgccagggacaatttaatggctaaggtggaatgcatgccttggtctctctgcttcaatgccctcccacatttgtttgtttgtttgtttttgaaagagggtcttgctctgtcacccaggctggggtacagtggcatgatcacggctcactgtagctcgacctccagggctcaaaggaytttcctgcctcagcctctggagtagctggggctrcaggcaagscatacaccaccacrcccggctaattttttgcatttttttttttttgtagaggcagggttttgccatgttgcccaggctggtgtcagactcctgggctcaagcaattcacccatctcagcctcccaaagtgctgaggttacaggcaggagccaccacgccctgcaccctcctgccttttttaaactctgcagtgttagctccccattccaaagatagaataaaaatctgaagaagttataatatagctttaattttaagatatcccaagtagatactgtctgggttatactggaagctggtctttccaataatctctccaccataaaatatttctcactgtgacctttaaggaatattttaccatacattatagccctaagcagtgaaatatgttacaaaaactccaaatttctgaatactttcttccatgagtatgacggaacaggaagaaaagggaaaacaaaagactctccctgtcaaaataaaatgtagctgacttctgccaaagcagttattcccggaatgtctaattattaaaccaggagctgggatagagaagtcaactatttcattctcttcactcctgcaaaaagccctctagaagctctattcagcaacagaagaaaaaattcttctgaggactatgcaaaattcggttttatttgaaagaaaatcctgccatctccttggcaagagctgtatgccctgcacaggagataaaacagggtgatccaaacagcccaatttcmccctggggcctccagacttcctcccgggcatgggccttccccaactcagctttaaagggctgccagttgcaaggcacagaatcaaagagtaggcacattgtccctctgactccaagaaccctagattcttgaatgttcatttctgttattattaatgatagctaacatttattgagcactargyatgtgctatgcattattctatgtacttaatgtgcatcatctcatttaaatgccacaacaggccaggcaccatggctcatgcctgtaatccccgtactttgggaggccaaggtgtgtggatcacttgaggtcaggagttcaagaccagctcggctaacatggtgaaaccctgtctctactaaaaatgcaaaaattagccaggcgtggtggcacacacctgtaatctcagctacttgggaggctgaggcaggagaatcgcttaaacccaggaggcggaggatgcagtgcacagatcacgccactgtactccagcctggatggcagaatgagactctatctcaaaaaaataaaaaataaaaaataaaataaatgatacaacaattctataaaatagatagcccccattatctttattttataagtgaggaaattaagtcttggaaaagtaaagtaatttgtttgagagaaacatctgttttgtgcctccagcatggagccatcttgggggagatgaggcaggaagggaaggaagtcagtctttttagcatctactatgtgaccaacaccaaactagtaactttgtttcttatctcttcttcatcgtaaacctggtttctataagacagccctattttgtgtaagagttaactaagaactcagagaaattcagtaactagactttagctagtagatgattgagtgatgatttgacacagatcacctgttcctaatatamctttctatatacaacatatgtgtgtagattatttgtatcctggctctgtgatactagctgcataattttgggcaagtctctgcgctttagtttccccatttttaaaggaggaatcatattctctcccaaatagaaattgggagccaactaagataatgtttcggagcgcttaccatgttctataatattttttcctacacacatctcccttctctgatttctgtggtgcctggttgacaccctttttagatccctccctgctcatyaatgcttcttagtggcttatgggagatgtaggraaagggatactataatgtgagtccctgggggcctattcgttctgcaaaacccacatcttggggtggacttgtcactcaccggttatgcagtaaatgttgatttttaaggatctcctgctgtcttcaatcatggaaactacaaatgtccttagaaactcccaaatctattaatgagtcatttggcctattggtcatctttgggagacttcagactctgcccctttaggaatcctggccataatcagtcccctctataaaatccaaactcccaaagcaatcccccaaccccaatatccattatattctcctctgaagaactacttccttcaataaacatgggattagattttactcttttaaatttcattttcaccaaagattttggaacaatatataaaggaagggatattcgtacccactcctgtggtattcagccacagtaagaattaggcagtaccagagctatagatttgcctttctgctccttaagccaaatggccttcttggtgttcatgtgagccacatggatgagaaaccattgcattaactatgtagtgaccaacagtacagattagtccggtagggcatttacagaaaggtattctagaggatgatgctgtgtccggaattggtgggttcttggtcttactgacttcaagaatgaagccgcggaccctcacggtgagtgttacagttcttaaaggtggcgtgtccggagtttgttccttctgatgtttggatgtgttcggagtttcttccttctggtggggttcgtggtctcgctggctcaggagtgaagctgcggaccttcgcggtgagtgttatggctcttaaggtggcacgtctggagttgttctttcctcccggtgggttcgtggtctcgctggcttcaggagtgaagctgcagaccttcgcggtgagtgttacatctcataaaggcagtgtggacccaaagagtgagcagcagcaagatctattgcaaagagcaaaagaacaaagcttccacagtgtggaaggggacccgagcaggttgccactgctggctcatcagcctgcgtttattctcttatctggccccacccacatgctgctgattggtagagccgagtggtctgacagggcactgattggtgcatttacaatccctgagctagaaacaaacgttctccacaaccccaccggattagctagatacagagtgtccacacaaaggttctccaagtccccaccagagtagctagatacagagtgtcggttggtgcattcacgaaccctgaatcagggtgttgattggtgtgtttacaaacctggggctagatacagagtgccgattggtgtatttacaatccccgagctagacacaaaggttctccacgtccccaccagactcaggagcccagctggcttcactcagtggatccctcaccggggccgcaggtggagctgcctgccagtcccgtgccgtgcgcccgcactcctcagcccttgggtggtcgatgggactgggcaccgtggagcagggggctgtgctcgtccgggaggctcgggctgcacaggagcccacggagtgggggggaggctcaggcatggcgggctgcaggtcccgagccctgccccgcgggaaggcagctaaggccctgcgagaaattgagcacagcagctgctggcccaggtgctaagcccctcactgcctggggccggtggggcccaccgccactccgagtgcggagtccgccgagcccacgcccacccggaacccacgctggaccgcaagcaccacgcgcagccccggttcctacccacgcctctccctccacacctcctcacaagctgagggagccagctccggccttggccagcccagaaagggactcccacagtgcagcggcgggctgaagggctcctcaagtgccgccaaagtgggagcccaggcagaggaggcgcccagagcgagccagggctgtgaggactgccagcacgctgtcacctctcaatgcctgaatcaatatcactgtgtacatttggtgtttagatgataaactttagatctgcattgctcttgagctaggcattttaccaatatttcagtaatgtaagaacaaaatatctcaaaggattacaaagaatacaaccattcacaagacacacagtttcacaaaaaaatcatcggttctcaaagtgttttcctgaccagaagcatcaatatcgcctggaaacttgttagaaattaaaattatcagacctcagaatcaacatgtcagcatcattctggtggcctgatctcatggcgtcctataagagagataccatgccatccagtggaagctatctgcttgccaggatgcccttctagaactgagaaatggagggaaataaccccataggtgtgagtcctgaagctcctgtgagacaactggtcaaccgcacaaataggagaagtgagagtgtgaagagtcagagagcaccctgaaggtgagaaaggaaggccagggcctacactgggcctcatttgggttcagagcaccctgcccagatggcactgccagccctggcaagttctaagcaccagaaaggcacttagaaaactttgacgaagagacttcagagcacaggagtccctgaggctggggtttgggggaaggacagtggatggcatggagcctggggcaaaagccctggtggcccaggtctaagcatactattgacctccgtctacaaagtgtctccacttattgctaaacaccagcctctactttccctcaggccagtctttgtacatccatagatcccagcatagcattttgcatgtaagaagagctcaataaagtttgttaactgttccacacataaatcttatggttattttaattaaaagaaaaactacactatttgtggtctgaattaataccacctgctgtggaaagcttatctgagtcacaaggtgatcacagcaagtcaacagcagacttgagatcaggaggttactaaccaggtccttctgactctgaacaccactgctttctactataccatgtggctctgggcccatcaaaagtcayagagacctgaacttgggaagattggattaggtgaaaatcaaataagagaatggaatcaaaaaaaggtctctggtagaaatccctaaaataaagagtatacaaccaaactatggctacaatgataggtctcctggaggagagggatcatttgacttcctgcaaactattcatccagactgctgtggttttaaaacaaatcatttgatactcttcccacagaagatggagtctaattctccctccttgatgtgggctggctttggcaamtcatttctaataacttgaatgtagcaaaagagacacttagtatcttctgaggtaggttagaaaagcaacacagctccctcctagctttttctctctcttgaaggacatgtcttgggagtctccaatcaacatgtgaaaaaaatctggctactctgaagccaccctactggggaaatcatatagaaatagacagagatggccatagggcaccaattgttccagacctcggttgtttgcatcaaccaccaaacacatgagtagggaacattcaaataatttcattcccccaccttcagctgccaaagctgatatcaggtggctcagagacagggtgctccccccaagccctggctagttacagattcataagtaaaatatgggtgtctttagccactaagtcttgaagtgatttgttccatggcattgcataactagaacatagtccaaaccaaaggaggtaaaagattcctgtcaaacagagaacaactgctaaatattattacttagaaggatggttttcagcatctataaataacacatttttgcctactttctccagtaaaggatatggacaagtatacacattcctccctgccaggaacaaaaagccagtaaaataggggaagtgtttagtgcctattagagctgcccatgaaatttgaacatgttattctaaatgagattttcacattcagttcataattacttgaaatcaattcagcattttttttccccctccaggacttctcttttgctgggattttaccagattttcgggttggaggaaaattttactttgtggtctatttgtgaatattctgttaatgttatttgtttgctctacttagaaaatctgttgatttttttcatatctckggaatattctttgctgttcctagggcctagcctgttgtatctcatgtagcttttgctccctactcatatttttcctgttggtgcctcttttagaataactgactctcagttttctcagttttggttcctccactaaactctcttggatcattcaagcattctgtatttttaagtcctctctcagccctgtgccattcaacccccaaggcccctgacctggtccagcaccctgggcatctcttcttttatgccattatcactctcctgtctccatcttcttaatttctttcatgagtaattacaatggtctcctaactggtctccttgtttccaatatcttcctcctgtaatccaggcaccccgttgctgtatatctttctaaaacacccatctcatcaagtcaggggtttaacacatccagagtcaagtctaagggcacaatagcccaaggctattcctgacctaatcactatcctcccctccaggttcatcactcctttcctctccccatagcaaattttctagtcataccactctgcatatggtttcctaaatataccatgtttttctgggctccatcacatttgaaaatagtgcgctctctcttccccacccttcctgctgcacaatcacctgtggaatccctgtttatcttacaaaaatacaactcagttgttacctcttctaggacaacttccctgacccctctagaaagagttactagctcctctaccttgcacatgattctgttgctgcacatgtcacagtgaaggaatctgggtatttacaagtccatctcccctgctaaaccatgagctcctcgggagaaaccgtcctattcatcacctaacacaaagccatctacrccgaagaggcttaataaatgttttttcattacataggacagaataaaattaacagccaatcagtggaagattacctgaatgatagaccaaatatctctttgaaaaaacagcctctggaagctacccaggcaaacctaaatgtataaagtttatgtcaccataacaaaacttaaacttgatccatagctctgtggaaagtgactgagctgattcagtaaaaagggtatatacccaaaggattacaaatctataaagatacaggcacaggtatgtttattgcggcactgttcacaatagcgaggacttggaaccagcccaaatgtccatgaatgatagattggataaagaaaatgtggcacatatacaccatggaatactatgcagccataaaaaaggatgagttcatgttctttgccgggacatggatgaagctggagaccatcattctcagcaaactaacacaagatcagaaaaccaaacaccgcatgttctcactcctaagtgggagttgaacaatgagaacacatggacacagggaggggaacatcacacactggggcctgtcatggggtggggggctaggggagaaatagcattaggagaaatacctaatgtagatgacgggttgatgggtgcagaaaaccaccatggcacgtgtatacctatgtaacaaacctgcacgttctgcacatgtaccccagaacttaaaatataataagaaaaaaaaaaagaaatgaggagatgcagggccaactcaatataaaccatctaaaaagtaagttttgttgttagctcgtgtaattctggttaaaattaataaggattatgagctctaagaggtggaaagtcattcctatcttgtccttaactctggtccaatcctttcttagattactaggtctgagcttaattttcaaactttcataaaaatggaatgaagtcacaaggggcccaaagaagaaaaatagaaattattaagatttgaaaataggagtgataagaaaacattaaagatattagagaaacaatctcactagtaggaattatccaaaaatattaattaagaatgtgtgcaaaagattagctacaagaaagtttatagaagcattattttaaattataaaaaaagtaaattaaaaacaagtgaccaaaataggagatcatatctttacacatcaatactttgatagacaagataggaaagtataaggatggaattatgttcaatgatatagtcattgaacatcagattatagtatatgtagtaaaattctatttttataaatctacatatgtataaagtatgcatagataaaagtctgaaagagagtacagcaaaatgttggcaatgattatctctggaatttgatttatttttttcattttgctcatctacattttccatgttttctaaaatcatcatgtgttgctgtatagttttttaaatttaaagtaatttaaattaaacggtagaaattggcacgagttagcagtggatataatcaggaaacctctataatcttagtttcctgggagcataaagtaaattagacataaagccaaaggtaggctagggtgaataaagggagatctcacaatgtcaggcaaacaagttgggtcattattgtgtaagcaatatggaactttgaaactttttgttcacaggaatggkctctaatatagttgttatttagacagatatttgatggtaacactgggcttggtgactaattgggttggtagaaagacaggaaagcgaaggcatgtttactactataaggtttgaaggctaagacattgggcagaaggtgatggcttaaataggctagagaaagaggagaaaataaaaattgcaaatgcagaaggaaagcatgagtgagctggactccggacttttgctctagcagccaggcaacagctaccgttgaccaggggtccccaaccccctggaaccagtacctggcctgtaaggaacgaggtcacacagcaggaggtgagcggcaggcaagccagtgaagcttcatctgtatttacagttgccccccattgctcacattaccacctcagctctgcttcctgtcagatcagcagtggcagcattcgcataggagcacaatcccttttgtgaattgcgcatgcaagggatctaggttgaatgctccttatgagaacctaacgtctgatgatctgtcactgtctcccatcagcccctgatggctgtctagttgcaggaaaacaagctcagagttctcatttattctttattatggtgagttatataattatttcattatatattacaatgtaataataacagaaataaagtgcacaataaatgtaatatgcttgaattatcccgaaaccatccccaccaccctggtctgtggaaaaattatcttccaagaaaccagtccctggtgccaaaaaggttgggggccactgctgttgattcttgggaacttgatgtggatcctttttagaggacaaaagtgtgttaatacatgtgaagtttacacaattcttgtaaacttctgattccctagaccagtattacatttcagagaccaaatttaacaaagcaactctgaatccacataaatgtttagtaatttgagataaataaattaaatgaatgttgttgatattctgttttgatagtgtcaaattttcctttycacaatgaaggattcctggaatgaaacccakagaaataygtcaaggaatcagaagaaataatacagacagtaatttctttaatctgaagtatctaaagctgaaaaggcattaaacaatcacaaaaactggagaaaaaaaagcaaaggaaaatgagaagcataatactttaattctctttgttgatattttaagatagttctttactaatttattctttgctcttttccaaagagatagcttgtttcatcacyttaatgtatttatagtcatttataattatttcagaaaagcttttttggtgaattccaaactggattttagtgagaaagcactgagtggaatgctgatgtgtcttctcattgacttcatgatctccaatccaaaaattggtacaatgaaacttcattctgtataatcactaacctcaaaggacatgttattgattaaagtacgtaagtctagtttgtactccaaatwtttaaaagaatgagaggtgttcaaatagaagagtctgtccacttataaaaaaatagactatcagtctattttacactagactactcaagaagaaatctctcaatgttctttcaaaaagccatttgacattgataccctgtgaggaaatgacccactcaccactcagcactataatgaggacaggcagatttaaatttagaaatttgaattcgtttcttctctaacctttccaggaagagagaaggctgcagacccacagagatgttcaagctttgattatgaataccacccagtcccctttacgtgatccaagcagataaattcatcatctggattgaataragatattttttaaaagacagaactgcgcccacccaacatatgtcatcaaagtatcagtttccaaatgagatatcagagagaagagctgagaagaagatctgagaagcattacccaccagtgatagggagaaacaccttaagaaatatagccaggcgcaatgattcacgcctgtaatcccagcactttgggaggctgaggtgggcagatcacctgaggtcaggagttcaagagcagcctggccaacatgatgaaaccccatctctagtctctacaaaaatacatctctagtctctacaaaaagacaaaaattaggcatgatggcgggtgcctgtaatcccagctatttgggaggctgaggcaggagaatcacttgaaccagggaggtagaggccacagtgaggcaagatcacgccattgcactccagcctggtcaacagagcaagattctgtctcaaaaaaaataaataaataaaaataaataaataaatagaaatgtcgtattaccattattcacattctatagatgagaaactgagtctgtgggacacaaaataacttgaagttgcagagccagtaagtggcagaatcagaattcaaatccatatctatctcagtctagaccctggaatgtcactacgaggcttataatattctccttatatcatggattcctaatagagcagctgtacttgaaaacacctcaaaaggaacacagtcctgtagctttacccagtgctgtaatgcttgccacaaactgtatgtctttccacaagctgcatcccttgcccctgtctagtagcttctactttagtttgcctcccacttctcaggaccagaggaatcattgaagtcaaaacttctcagtcccatcctgagtgtctgttggctagaccttgttggaagtggctctctcaggctcctctctttcatatgatacacaatctagttcatggctcctgtatgcagagcagagatgctgaaattgatcctccttaagacacatacacaggccagaccttcatctgtgctcgacacctctatgcctgtgatcaccactttggcttggtctaggagtcctcagattcttacaactaggatcctttaggagttcaaggtccaaggaccttttgccaagcccccagaagaagggccatggagaaaaactctagatggttatacaagcaaagcaacagggtaaatacatgcatgttcatggagttttcattttattcaaaggcttagagaaacaaaatgtggaaagtatctgataatttaaaacaattttataaaagttaacatggatatattacagactagaataaaaattcacatatatttttkagataaaactagaggagcaacagatatgtcaaggacctgcttcaggtcaggttctccatctccttacaggagtgcatgccttcttctccccctgcggaagtgcctcagggatgaaagtagagagaactctcagggcatgctcaaggccatcacttctactccagccatgtgctttttctgccctaaggagtttgctacatcaaaccttacagggaaaaaaggcattgggtgaatgatttagataagctctctgcaggaaggacctctacttctttttctcacaaagggaatggaaaattttcaagaggaaactatcgagtgtggacttaagggaaaagagcccctaagctgttcctattccagacctgactgaaagaaccaagaaaatcctcaagatttcacacatggatcagcccaactcatcagaaagggtgtccatttagggctctgcattaataaggacagtttgatccagttaattctttgttgtgagggggctatcctatgccctttggaatgtttagtagcaaccctggattctacctacaagatcctcagttgtgacaacccaaagtgtctctagacattgccagtgtgcccagggttgaaaaccactgagttaggggaagagagttgtagcttggctaataatcaaatatttgttttcttagagtatcttctgtgctatatatatcacctaggccttagagagggtgctatggctatagtagatggagtgaaattcaggatgtgatgattcagattcctatgctggccaccatcttcagaactaacactacctgagctgagtacctcaacaaaaggcagagggccatgtacagctgcacaggctaggcactgcacaattccagacagtgcccttcacacagtttatgatgtgaaaggagctcctggagtcgtgcaatgaagcagccttggatgttacagtgtttcagccatctgtctcctgtctgtagaaaatgtcttggaagaaggaaaaataaaactagtaaacagtatatatgggtcaggaaatcatgaatcactgtctcagctttaaaatgggataccacttccagatggcatcacattctcaaaagttaaaacggagcttcaaatctgaaaaatcttgtaaaaatgtttctttttaacacttctgttttgttgccaggactctactgggttactggaaagctgtagagaagctacatggtgcagtgsagtgagctggggattccctacgaggaggctaagatttgaatcatgtttctacacctaagaggtgttttggtcctttgacaagttacttgacccctgagccagctttctactgatacattgaagaatgataacagttattcctgccccagagtgttgtgaggattaacaaagaaatgataccatgagcgcacacatgtcttgtaaagggtaaagcaaaacacaaatgctgctcaatttgacagatagatggggtcactcgatagcttgctgaagatttgagaccgttctttcagatgtcaaagatttatattttaaaaggtgttcatttttaacattttttgaaatcttctcacccatgtaattttaagtaccattgttcacagcttgtattattttatgcttatagattatagaggttatcttattgacagagagctaaatagtctaatcactagaatattgaaagaaaatagcattttatagaaacttcttcaaagtttacccaaaaggtacagttgtctgtccttagcttaataatactttttttctaattacaaaagcaatatatgaccattcattcttcttttctctaccgaaaagtagtcatttaaactctagaaatatgttaacagttatataatattctgcaaatgaatgttccatatttatgaactattatctcaccaactttttatttttaccttatatccatctttttttttaacttccaaattcctagaagtagaattmcaaaattaaagagtttgaattttttttttttttgagacagggtctcactctgtcacccaagctggagttgtgcagtggtgaaatcacagctcactacagccttgacttccctggggaggatcaagcgatcctcctgcctcagcttcctgagtaactgcacctacaggcaagcaccacgatgcccagctaattttttctatttttcgtagagatggggtctcattatgttgcccaagctggtctcaaactccttggctcaagccaagtattttggcctcccaaaatmctaggattgcaaacgtgagccactgtacctggcctgaattttttcaaagatcctggcttcaatttgccttccagaaagaattatatcaatttgcacacattttagcaatatgagaatgtacctaaatatttttaacatatttattctcctaatttgcatatttaagattttattagtcattagtatctcttcttatgtttatgtgctctgcatatttattttatggggcatttgtgtttataactgatttttatgaatctttatatattaagtatattaatcatttgtctctcatatttgggtaatgggcttcccagcctattatttttttagttcaatattatgtgctttcttaacactaaaaagtttagttttgatgtaatcaaaactattgctatttttcctgtgatttttttctattgcttttaagttagaaaaccgtttcttatcctgggatcaaacattttaaatcacctctgtgatctttatgctttgcacagtttttttttttttttgacacctaaaattcatgttggcttactgcaccaagcaagaaaggatttcaaaacagataaatacaaacaaaatgataaaaaatatccaaattcttgtctttgaatacaaaagtaagctctataaattcagagtggaagcagcaatcttgaaggcaaagtcctttagattttttaagagctgaatatttcaagaggtaaaagctttgggttcaaagagcaaaagcctgaaagacttggggcacagattttaaatcatgaaccagaaagcagagaagcaccagagagatctcataaggatggaaataggaagtttttctgaactgggaggagctygaagacaatcacaagagtatcaagatatggccgggcatggtggcttgcctctgtaatcctarcactttgggaggccgaggtgggcagatcacctgaggtcaggagtttgrgaccagcccggccaacatggtgaaaccccatctctactaaaaatacaaaattagccagatgtggtggcacatgcctgtaatcccagctactcgggaggctgaggcaggagaatcacttgaacccgggaggcggaagttgcagtgagccaagatcacgccattttactccagcctgggcaaggagagtgaaactccacctcaaaaaaaaatgagtggcgagatagaagcttacttaagtctgcaaacagcaaactctccaaggattcaggtttgcagtgcccagrgccacytggggcagccacagtagagtagaaatggcagyactgtcagtttaagcatagcatcccccacaaatgctcctgatggggtgaaaaagagatttggttaccttccattggcttctgagggatgtgctgaaaagatctgagaatcaaaggccagcgtgcctgctgagggctcgctgctgttacggcaagggcggcctgcagcaggggctgtgcgatggacagccaggccgggtgccggctgcagtgaggctggcccgagtcaaaagagggacagcacccctcatggaagagtcactgtttctgggaggacagagcatagcttcctcagccagggacacatggagcagatgctgtggacagataaatcaatcacccagactggcagtgcaaactccatcataatgaagccaacaggacagaggatgagcttagatccgggcctctatcccccgaggccatgcccatgcctgagagaagtttatggtcccagtgtgaaggaaaagtagagggaataaaatccctaagagattgagtttatatgaaaagtgactgaattacctagtagtaaccagattacattttctattctcagagaaaacagaaacttacaagccatattaattattataattgtcacataatggtatgtgaatatgaaaggtataaataaatatacatttaagtatattcaacatatattataaatatgtataatatgggattaatatatatgcctcttttccaccgattgggacaccaccttcatcctgtgtcaaatatgatgcatactgacatctgtttctcagaaggttgattccattcatctgtctactagctgagatggtatttagcaggtctaggcccagaaactcaggtttgctcagtcttgcagctttcattttgattgcattccgattctgtattttcctgcagtccttttcctagaagctgcccactccctaaatcctgtggggttttcaggtatcctccattaataagcctacatcatcctcgcatcctcagcaactgtgtatctgttgattgacaatgattaggggtgtgctgaaaccagctcctaccagaccacaagagccacttctgtgcatctcctcccccaattccacattcagtaatgtcacattgatactttgatatttgctatggtgaaagtatttacaccacagagatcagcagatgctataaatgtggacttttgtttttagagagccagcttgccagcataccatggattagaaagtctctgaaaggccccaaggtccaggactcttcaacagaactaactatactataacaattgtattaaaaatctaaaatggatggtataattatctgaatacttagtttcactgcatcaacacccccataaaaatgtaatttgaaaatgtgtgagctaaggtgttctatgtatagtccttttttctctttctctccttgataggcaggattcttaaagactactaaatattagatatcatctgcattaaaatcaggaggaaaataaagacaagttttgacctagaacaatgtgatactttggattgtaaaagaggaataaataacatcttgtatcagattctgtcccaggaggtcttacgttattaaatataactgcttcaaaaattagtatctctgcccctgggagatctggttcttgttctgctactcccagaacaagatctgcaaagccaattggccaatagcctgtgtcagattaaaaccctctcttgacttccctggaaaagcctagacaggtctcagttagaatcaccgcagacagccttatatatctggagcacaaagccaaccaaaggtagccctgcagcgtgggcctgtgtgtgagtggggaccttgcacagccatcagaagactccacagtggtgggctctccatcttttcagtttcaaatattcctcactcatcatggccctctattgaggcagctccttcaaacaccctcacctttatccagtctctatggaccacacaagtcctcaaaatttgtctctaaaatcatagactagtagactcagccagagtctcaggggtattttgctttcgttttccttttacagataaggcccagagaaaggtggtcatttgcccaaagtaacagcagatccctggcaaaggtagaacaggaattcaggactgccaagtcccagcccagggccctttctactgaaattctgcccttctctcttccactatctcccttgaaggtggaagggagaagtagcatccttgggggaagagaagcagcatctttactatctgtgttctacagcagtcacaggttttggggatccctaaatccatgagaatgtcaagggtcccccagaagcttaactaatgcacaaagatttcatagagtttaatttttagtgtgactattccttttaattaactgattgagtcatttttctcaaactttctaatatctcccccaaataatagctgaattacaaagccacaaaatggagagtatttaatcaagtgcttccttttagaaataattcaaggaaaaataaacaggatgtcttacttcattcacctaattgggttaatctcccaataggccctccttccattatgcaagtaacagaaaagaaaacagaatcctctgtttttcaatgttaataataaatcattcctaaacaacagaccttaaggaatcatttcaccctcaagctagctagctcaagctttaaaaaaagactgttacattacttaatttttttttcaaatttctttttagaacacacatcataaattataaaaataggctttcgtgtggcaatactaacattttaatggaagaatagtgagtctatgccttcatttctttattatttgacttatatttagacgattcccattgtctgaatgggataagctaaggtggttcatttttatatcatatacagaattgccaaattacaatactacattctgcgtggtgtgtgtgtgtgtgtgtgtgtgtgtgtgtgtgtgtgttagaagtcccagaaaactgtctccctcaccttacagacaagagaaatgaaatacggtgaggtcatgggcatacccaaagtcatggagctaattagcctcggagccagaaatagaacctacgtctcctgactccccagaatgcatgctgctgatcattctcacagagtgaataaagcatccttcatcaccaatttctattagttttcacttgctatatgaaaattatagtaccactatttctaagaaatgtttagccctcataattatacacccttagtttatacattgtgtaacatcagaatagatataccttgtcaatgactcttcttcacctttaaaatatcatagttgttatagggcagagggaatagagcccaggtttaggagtcagaaacagaatttaaaccccaattctgttgtttataagattggtaaagttgtgtaagttayttgagatacttaagtcttttgagactccattttctcatccaaaagtaggataattaataactacttttgtaagattagtgcaaatccccaaagatagtgtctggatttgtggtaggagggtcttttttgatatttgaaatctaccaattttctggtctaaatttattaactcattaaatatttattaggtgcattttatatgccagacattgttctaggtgctggagatagaatagtgaacaaggcagacaatattctgccttctttctggtaaagggaagacaggcaacataaaaataagaatatatataaggaaacaattataacatacttaagtaaacaacataatatcagaggatagaagttcctatgaaggaaatagcaggatgctggaaacccttgggatggggaaggattgtaacttagtagttaaggaaggccactctgagggaatgacatttgacttgaaacctaaaatatgagatatttttctccctgggaaaagatggagaaaaaacatctcaggaacaggaagagcaaatgcaaagaataaaagcaagaataaagttgacatatttaagaaacaagaaacgactagagaatgatctgagaagacaaagtgttgggcaaagtccagatcatgaggactttttaggctacagaaaaaagtttggatctgattctgtgagtggtgagaagctgtggaagggttttaaggaagagaaggcatgagtaggctattagctctcagactactatatgggaaagactattaggagacattaatggagcagggatgccaacagaaggttactgtggctgtccagaatagaggtcatggtgccttggactcaggtgacggcaagtaagatggagagagggggctggatatcagatgtgtttcagagacatcacagacagaactttctgatgaattggctgtgtgatgtggatgaacaagaggaatcaagaatgacacatgagtttttagcttgagcaacagggtaattatacttggaaggaaaagatggtgggcaaagggtttgagaggatggaagtcaagagaaatattctggacatgcaaaagtttagctgcacatgcaagtggaaatgctaagtaggtagatggatatctattaccggaattctagagagtttaaagatacagatttgggtgatactggtatgcatatggtacgtaaagccacagaacaggataaaaacacctaaggaaacagaatacatagaaaagagaaagtggtttagtgctaagtactccaccactataggttgtggagagtggagaggagtctgcaacacagactgaaagagagggacccctgccatggtgggaaaactagaaaattgtggtatctctaaaatggagtgagacattacaaaaacagcagcactatcttctttaaggaatttgttcctttctatgtcaactatacacagtttatggagaggacgtttcacataggattcttcacactatttgcagaacacagtgagaacctacatttcatcctttctactttcagatcctggacacaccactactgctgtaccagtgagggactagtttcactagttatttcagcagagagaatttaatgtaaataattgttaactcggccgggcgcgttggctcacgcctgtaatcccagcattttgggaggccgaggcgggtggatcatgaggtcaggaaatcaaggccatcatggtgaacctcgtctctactaaaaatacaaaaaattagctgggcgtggtgcctggtgcctgtagtcccagctactcaggaggctgaggcaggagaatggcatgaacccaggaaggtggagcttgcagtgagccgagatcaggccactgcactccatcctgggcgacagagcgagactccgtctcaaaaaaaaaaaaaaaaaaattgttaactcgatactgaaaaattgttttagagaaagcaagcactcttaaaggaagcaaacgcagtaagaagctgccacctggaggccttaagggtatgaagggaagaggttggaattattaatatgtagacgattagaggaggggcttcttggagctgagccttatgcctctgaggagtaagtactgctggctgctgctagtgcccctgagttcagagatgagactcacagcacccagatctcaagttagggatatcagccagctggtactggtgtctctgagagcataaaataaaactgggtttgcttgtattagaaaaactgcaaactgaactcaactgctactaagggaataaactctccttgccagggtaaagatgtgttgctaggatgatgttctcagaatcagaaagcaagaaagcaagtctttctcccttctccaactaccaggcatcccctaatgacagagtctagcagaaagccagctagcaaagcagaaatggggttagcagtcccagccccagtgtcatagagcaaacaagcatggtttgggatcatatatatatatatatacacacacacacatatatacacatacatatatacatacatatatacacatacatatatatacacatacatatatacatacatatatacacatacatatatatacacatacatatatacatacacatacacatacatatatatacacatatatatacacatacatatatacactctatatgtgtgtatatatatgtatttatacatatatatatacactttaagttctgggttacaagtgcagaacatgcagttttgttacataagtatacacatgccctggtggtttgctgcacccatcaacccatcacctacattaggtatttctcctaatgttatccctcccctagccccccacccgctaacaggcccctgtgtctgatgttcccctccctgtgcccatgtgttctcattgttcaactcccacttatgagtgagaacatgccgtgtttggttttctgatcttgtgatagtttgctgagaatgatggtttccagcttcatccttgcaaagtacatgaactcatcctttcttatggctgcatagtattccatggtgtatatgtgccacattttctttatccagtctgtcattcatggacatttgtgttgtttccaagtctttgctattgtgaatagtgccacagtaaacatacatgtacatgtgtctttatcatagaatgatttataatcctttgggtataagcccagtaatggaattgctgggtcaaatggtatttccagttctagatccttgaggaatagccacactgtcttctacaatggttaaactaatttacactcccaccaacagtgtaaaagcgttcctatttttccacaacctctccagcatctgttgtttcctgactttttcatgatcatcattctaactggcatgagatggtatctcattgtggttttgatttgcatttctctaatgaccagtgatgatgagcattttttcatgtttgttggctgcataaatgtcttcttttgagaaatgtctgttcatatcccttgcccattttttgatggggttgtttttttcttgtaaatttgtttaagttccttgtagattctggatattagccctttgtcagatggatagattgcaaaaattttctcccattctgaaatatgggactatgtgaaaagaccaaatctacgtttgattggtgtacctgaaagtgatagttttggatcttaaagacaatattttaataactggcatagaaatgtcctgagaaagctaatcactcggctccctttaatcataaggcaaggtgactcagccctctgtcttcccatgcaaatttgagatgtgcaacgctttccaactactgctttgagttttaagtcctttgctgagaaacaccagttactcaaaacagagcacacctgtatggtttattttttccaaaaaaactctctctatgggtttatctggaagtattttaatattgaaatattttaatcaaataccatgtgagaagaggagaggagattaagagattcagaaggcaagacaggccagtggggaaaggtctgtgaaagaacgctttgggaactgacagtgaaaaagaactttgggaggagaaccaaagtctctttggaggattcttcttaaatcttaccaagaaatatgcaaagactagtctagtaaatctctttacaaaatctgcattaaaattttcaacactcacagatgttttacggacttagattttattaacagtagtaaaatagataatgtatgcattggtagaaaagatgaaacaaaagtatacattataataattacgtctttctcccactctatcctccagccaataaattcccctcccgaaagatacaaacagatgccatttttatttgtcctttaacaaacattccacttgttatttttattattatcatggatctgttttactctttttatagctacataatattccacaatatggctgacataataaattattaatatttaaatatgatgggtatttggctggtttacaattctttaactatcataaataatgctacagtgacttttcttatatatatatatatatawaattttgtatatatatatcaacacattgctgatagtagcataaaatgcacaatatttatttagaagaatttggccatattttcaaaattaaagtgtacgatataaacccagaaggtttacttctagaattttaacatacatataattgtatatgtatgttgtattgtacatggataaaatacatacatattgtatgtatgagagggagtcattccccttgataaaaggagagagaagagtcaggaggactttctctcacagcttaggcacaagctcagccacagaggggtacagcaccaagagggctcctagggtccatgattccaggacctcttctggtccaaggccagaagagagtttaatggccagaaaacagagccccaggcctggcagcattcaccacaagctgactgaagagccttggggaatcaaatggacataaccaatagtcaggtagaactagctgtgcaccttgtttggcggtagccatagagagactcctctgcttctggaaaggggagggaagggtacgaaggactttgtcttgtgacttgagtgtcagtatatggcactccacccaacaccggagcagcaagatacacaaagcaagtattattaaagagagagagaccctaatacaatacaatacaataagactgcagcatcccactttcagcattggacagatctcccagacagaaaatcagcaaagaaacatcagacttaatctgcactatagaccaaatagacctgatcgatatttacagaacatttcatttaatggctgcagaacacacatttttctcctcagcacatggatcattctcgaggatagacgctatatgttagcccacaaaacaagcctttaaaaaatccaaaaatcattaaaattatatcaggtatcttctctgaccacaacggaatgaaactagaagtcagtaacaacaggaattttggaaattaacaaatgaaaattaaacaatatgctcttgaatgattagtaggttaatgaagaaatcaagaaggaaattttaaaatttcttgaaacaaataataatggaaacaaaagacaccaaaatgtatgggatacaccaaaagcacaactaagaggaaaggttatagatactaagtgccaatatttaaaaagtagaagaacttcaaataaacaacctcacaatgcatcttaaagtactagaaaaggaagagcaatccaaacccaaaattaatagaagaaaagaaataataaagatcagtgcagaaataaatgaaattaaaataaagaaaacaatacaaaagaccaaccccaaacaattagtttttttaaaagataaaatcaacacacccttggccagactaattaagaaaaaaaagagagaagaccaaaatacataaaatcagagacataaaaggagatgttgtaactgataccacagaaatgcaaaggatcattagaggctactttgagcaactgtacatcaataaattggaaaacctagaagaaatggataaattcctagacacatacaacctaccaagattaaacaatgaagaaatccaaaacctgaacagatcaataacaaataatgagatcgaaccataataaaaagtctcccagcaaagaagagcccaggacctaatggcctcactgctgaattttaccaaacatttaaagaactaatatcaatcctactcaaactattctgaaaaacagaggagaacatactttcaaacttattctatgaggccagtatgaccctgataccaaaaccagacaaagaaacattaaaaaataaaaataaaaataaagactacaggccaatatccctgatgaacatttatgcaaaagtcctcaaccaaatactagcaaactgaattcagcaacacattaaaaagtcaaattatccttgttcataaatgatatgacttaatatttggaagaatataaagactctacaaaaaaactattagaagtgataaatttagtaaagttgcaggatacaaaatcagcatataaaaatcagtagcattttttatatgccgacagcaaacaatctgaaaaagaaatcaagaaagtcatcccatttacaatagctgcaaataaaattaaacacctaggaattaaccaaagaagtgaaagaactctacaacacaaactataaaacatagatgcaagaaattgaagaggacacaaaaaaaatggaaagatattccatgttcataaattggaagaaccaatattgttaaaatgtccatactccccaaagcaatctacaatcaaaataccaatgcaatctctatcaaaataccaaagacattcttcacagaaacagaaaaaacaatcctaaaatttatgtggaaccacaaaagacccagaatagctaaaacaatcctaagcaaaaagaacaaaactgaaggaatcatattacctgacttcaagtcatactacagagctacagtgaccaaaacggcatagtactggcataaaaacagacacataggtcagtgaaacagaatagagagcccagaaatgaattcatacatctacagtgaactcatttttgacaaaggctccaagaacatgtattagggaaagtacaatcttttcaagaaatggtgctgggaaaactggatatgcatatgcagaacaatgaaactagacccctatctcttgccatataatcaaaatggattagagacttaaatctaagatctcaaactatgaaactactaaaagaaaacactggggggaactctccaggacactggagtgagcaaagacttcttgagcaatacctcacaggtacaggcaaccaatgcaaaaatagacaaatgggatcatatcaagttaaaaagcttctctgcacagcaaaggaaacaatcaacaaagtgaagagacaacctacagaataggagaaaatatttgcaaactacccatctgagaagggattaataaccagactatatgaggagctcaaacaactctataggaaaaaatctaataatcccatttaaaaaatgggcaaaagatctgaatagacatttctcaaaagaagacataaaaatgacaagcaagtatatgaaagggtgctcaacatcattgatcatcagaaaatgcaaatcaaaactgcaatgagatatcatctcatagaatggcttttatcgaaaagacaggcaataacaaatgctggtgagaatgtggagaaaaggaaactctcatacattgttggtgggaatataagtaagtacaaccactatggagaacagtttgaaggttcctcaaataactaaaaatagagctaccatgtgatccagcaatcccactgctaggtatatactcaaaaggaaaaaatatttttaaaaagcaatatatcaaggagatatctgcactcccatgtttatcgcagcactattcacaatagccaatatttggaagcaacttaagtgtctatcaatagatgaatagataaagaaaatgtagtacacatacacaatggagtactattcagccataaaaaagaatgagatcctgtcatttgcaataacatggatggaactagaggtcattatgttaagcgaaataagccaggcacagaaagacaagcttcacatgttctcacttatttgtggaagctaaaaattacagttgaactcatggagatagagcatagaatgacggttaccagaggctggtaagggtagtgagcctgggggtgggggcagactggggatggttaatgggtacagaaatatagttagatagaataagtaagacctagtatttgatagcacaacagggtgactacagtcaacaacaatttattgtacatttttaaataactagaagagtataaataggttgtttgtaacacaaagaaaggattaatacttgaggtgatggatattttgtttaccctaatgtgatgtgattattacacattatatgcttgtatcttatgtaccctataaatatatacatgtactatgtatgcacaaaaataaaaaacaaaataatattttgtgacctgtgaaaagtatatgaaatcaacatattagtgtccagaaataaagtgtaatcagaacacagccatgtttatttatattacatattgtctatggcagctttcactctacagttgcaaatttgagtagttgtgacagaaacgatatggcctacaaagcctaaaatactatctggccctttacaggaaaggtgtgctgcccccattgactgtcgcaaatgctgctattgcactatcctcatcctcttggccctctcgggaggacctctgttgactgctctggacaatgccaatggcttcctgtgcctgtctgccttaggatgctctctgccacggaccagtcaggccacagaagttgatgccccaggagccacatttaaccagtaaggaatgggagttcatggataaatacctgagcttttcttctcctttgtatatcaattctgagaggtgttctacacagtttatcagagtgttcccaagggaggtgagccccagctgtctaagcagtatcccactcacagatgtactcatattggtttcctaccctctgtttctttcctattgcttcgcattgcctcctggaatctcctcccaaataagttcctcttccccacccaagtcttagtcttagggattatttctaggagggttgccactcaaattatttctcgccattcatttctcccatgaatagaattttaactgctgagagcaacccagctacagactacaattcccaaagtctcttatggctagctatggccatgtgcctaatttctcactattggattccaagaggaaattatacaggctacttctatatcatttaatcaaaaagacatgtctggccctggactttttaactgggcttggacattttagggtgcatttcaatccctaaactggagttaaaatgcacaaagcagcaactcagatttagccatgtgaatgagaataacaccctagaaaatgatagagcaaaaagacgggaggaacctgggtccacaaatagcttcatggaacctggtcctaggccagctagaatgttttgtgaaaaagcaataaacttctaccttacttgatccttcattctacttggggtctctttattataccaatttaacttcaattaagatattaataaaaatcacttagaaaaatataaggaaaaattgctgttcacaataataaccaaagctttaaaatacctaataataaactcaacataaaatgtgcaagacacaaatgaagaaagttataatactttgaagttgaagaagttgtagagacattaataagtaggcatactgtgtccggaattggtggttcttggtctcactgacttcaagaatgaagccgcagaccctcacagtgagtgttacagttcttaaaggtggcgtgtccggagtttgttccttctgatgtttggatgtgttcggagtttcttccttctggtggggtttgtggtctcactggctcaggagtgaacctgtggaccttcgcggtgagtgttaacagctcttaaggcggtgtgtctggagttgttctttcctcccggtgggttcgtggtctcgctggcttcaggagtgaagctgcagacctttgtggtgagtgttacagctcataaaggcagtgtggacccaaagagtgagcagcagcaagatttattgcaaagagcgaaagaacaaagcttccacagtgtggagggggacccaagcgggttgtcactgctggctccagcagcctgcttttattatcttatctggccccacccacatcctgccgattggtccattttacagagagcccagtggtctgttttgacagggtgctgattggtgtgcttacaatccctgagctagacacaaaagttctccacgtccccaatagattagctagatacagagtgtggacacaaaggttctccaagtccccaccagagtagctagatacagagtgtcgattgatgcattcacaaaccctgagctaggcacagggtgctgattggtgtgtttacaaaccctgagctagatacagagtgccgattggtgtatttacaatcccttagctagacataaaggttctccaagtccccaccagagtagctggatacagagtgtcgattggtgcattcataaaccctgagctagacacagggtgctgattggtgtatttacaatcccttagctaaacataaaggttctcctccaagtccccacccgagtcaggagcccagctggctttacccagtgatcccgcaacggggccacaggtggagctgcctgccagtcccgcgccgtgtgcccacactcctcagcccttgggtggtcgatgggactgggcaccgtggagcagggggcggcactcgtcagagaggctcaggctgtgcaggagcccacgcagggaggggaggctcaggcatggcgggctgcaggtccccagccctgccccatggggaggcagctaaggcccggcaagaaattaagcacagcagctgctggcccaggtgctaagcccctcactaactggggccggcggggccagtcagccactctgagtgcaggcccgctgaacccacactcacctggaacttgcgctggcccgcaagcaccgcccgcagccccggttcccgcccgcgcctctccctccacacctccctgcaagctgagggagccgactctggccttgaccagcccagaaaggggctcccacagtgcagtggcgggctgaagggctcctcaagtgctgccaaagcaggagcccaggcagaggaggcgccgagagtgagcaagggctgccagcgtgctgtcacctctcagtactatattttgggtaaaaagtttttctacttgaaggatatgagttccacaaatttaatcttaaatgtaatgcaatggcacttaaataccaaacaatatttcttaaaatagaacctaactaaataatttaaaaatttatcagtttagaaaaactttagaataacaagaatttttttaagagatgaggtcttgctctgttgcccaggttggagtgcagtggcacaatcatagctcactgcagcctcaaactcctgggctcaagcaatcctcctgcctcagcctcccaagtagctgggactacagttgcccatcaactttcccagttaattcactttatttatacagacaaggtctcattatattggccaggctgctctcagacttctggcttcaagcaattctctcgccttggcctcccaaagtgctgmgattacaggcatgagccactgtgcccagcctaatcagaactttctggcaaaaaataaacatgatgacagatgtattgtgtcagtgctcattttcagaaaacagaatctatctaattagcataagaagaataattctagatatgaagtacagttccagaaccattgggaaagcgaacaaaacagaacttaggctgagtttccaggaacatctcccaaagcctcaatcaggccaccaagagagcagctgcgcctcgaagaatcaggaagttactggctgcataatgcctcccgtttgtcacaatccgtatcaaggtggagccagacaagggcacctccgccacagctgtgatagaaaactcaaatgcatcctcctctgtgcttgccagcagatggcaaagagcagcctccaaaacactgtgttccattttctccttccaaatattaaatctcaaacagaactgcaactgcaagagaagttgtgcagtgtagcttttagccttctcacatttgaaaggaactggattaaatgttgaacgagcccctctgcagaaactgccatagtagaattccaccacaggaggaatcctgtccctcaaaaggacaaaagtcaatatccaaaaacatgatcattaatatatgaacatttggtaaaagataaatatggcatctcaaagaagtgaaaaaagtatgagatttaattaaatgagtgttggaacaactggtaagccatttatataattataaagctacatctttcacacaccatgcagaaagagcaattccagatggattaaaaaactaaatgttgaaaagcaaaaatataaaagaaaaaatataatatttgtattgccttggagtgaaaaaggccctcttaagtgagctacagacccagaaatcataaaagaaaaaaaacctgacacacgtgactctacaatatttaaaatttctataccctgaagcccaccatattaaattaagatgagtaacatactgggagaaaatagttgcaacatacacaagattaataacttcattacctagagattacttacaaatcaaataagagcaactaaataaccaatgtaaaaatttacaaaggatatatggaggtaattatcaaaaaatacaaatatagtcatttatcgcttaatgaaaacaacctcaatagtaccatagaccagcagtccccaacctttttagcaccagggactgattttgtggaagacaatctttccacagacaggaaggggggttgaaggggttggggtggaggtggagggatggttttaggatgactcaagcacattaaatgtatttttagattctcataaggattaagcaacctagacccctagcatgtgcagttcacaatagggtttgctagattctctcctatgagaatctaatgccactgttgacaggacaggaggtggagctcaggcagtaatactggcttgccttctgctcacctcctactgtgcagcctggttcctaacaggccaatgrctggtactggtccacagtgtgggagttggagacccctcacacagacagttattttggataaacatagaaactgaccctctggtcttaaagcttacgtttgttttatctgagttscttcctcaagaaaggaccccccaggcttctcaaaaagtatcaaagaactgaaactcaccagatcactgcatccaatgagatgccagacccctcattttgtttccttacacttctctagttcctgttttccaatacattgttatatttcttccctgctatataaagccctaattttagtcggtcagggagatggatttgagactgatctcccatctcctcgactgcagcacccaataaagccttcttccttggcaatacttgtctcagtcattggcttgctgtgcagccagcagcaggacctagaccaaaccactgatattcagtaacattaacaacaggggtacattgtaagaaatgtgtcattaggcaattttgttattgtgtgaatctcacagagtatacttacacaaacctagatggtattgcctactgtacacttaggctgtagggcatagcctattgctcctaggctacaaatctggaaagcatattactatactgaatattgtaggcaattataacataatggtaagtatttgtgtatctaaacatagaaaagataatgtgttgcactaagacattatgtcactaggtaaaaggaacttttcagatccattataatcttacagggctactgtctaatatacagttcatccttgaccaaaacatcattatgcagtgcattaccatggttaatacatatattcaacttcactagtaaccaggaatattcaaatgctaacaataattcaccattttcatccactaaagtgacaatagctgggcgtcgtcatggttcatgcctgtaatcccagcatttgggaaggctaaagcagaaggatcacttgaaaccaggagtttaagaccagcctgggcaacataaggagaccctatctctacaaacaataaaaaattagccagccatggtggtgcttgcctgtggtcccagctacgcaggaggttgaagtgggaggatctcttgagcccaggaagtcaaggctgcagtgagccatgatcatgccactgcactacagcctggctgacagagcaagaccctgtctcaataaataaataaataaataaataaataaataaataaagtgacaataatttaaaagagtaataatagtcatattgaggatgtctgctcttactactcttattgtatatttattatatattgtattaaagggcttcatcagtaagaaacagcaaaaagataaaataaaagattagaaataaagaatgactgtctacaaagaaagtcccaaacaacctacaaaatttctgataagagattttccgggcaagatgaccgaaaaggaacagctccggtctgcagctcccagcaaaaccaaggaaggaggcatgttatttctgcattgccaactgagggacccagttcatctcacggggactagttacacagtgggtgcagcccacggagggcgagttgaagcaggatagggcatcacctcacccaggaaggaagcacaaggggttgggaaactcacccacctagccaagggaagccgtgagggaccacgccatgagggatggtgcactccggcccagatgctatgcttttcccacagtattcacagcctacagaccagattccctcagatgactacaccacaagggccctgggtttcaagcacaaaactggatggcagtttaggaagacactgagctagctgtgggagtttttgtttgtttgtttgtttgcttgtttgttttttcacctcaatggcccctggaaccccagcgaggcagaaccattcactccccctggaaacggggctgaagccagggagccaagtggccttgctcagcagatcccacccccatataagatccattggcttgaaatactcgctgccagcacagtagtctgaagtggacctgggatgctcgagcttggtgtggggagaagtgtccagcattaatgaggcttgagtaggtggttttcccttcacagtgtaaacaaagctgccaggaagtttggactgggcagaacaaatggcagtgccacaaagccactgtagccagactgcctctctatattcctcctctctgggcagggcatctctgaaagaaaggcagcagccccagtcaggggcttatagataaaactccatctccctgggacagagcacctgggggaaaggggcggctgtgggtgcagtttcagtagactcaaacaattctgcctgccactggagagagcagtggatctcccagcacagcgctcgagctctgctaagggacagattgcctcctcaaatgggtccctgacccccatgcctcctgagaaagagatacctcccagcaggggtcgacagacacctcatacaggagagcttcagctggcatctggcgggtgcccctctgggacgaagcttccagaggaaggagcaggcagcaatctttgctgttctgcagcctccgctggtgatacccaggcaaacagggtctggagtggaaccccagcaaactttagcagacctgcagaagaagggcctgactgttagaaggaaaactgacaagaagaaaacaataacatcaacatcaacaaaaaggatgacaatgcaaaaactccatctgaagttcaccaacagcaaagactaaaggtagataaatcacaaagatgaggaaaaccagtgcaaaaaggctgaaaatttcaaaaaccagaatgcttcttctcctccaaaggatcacgactccttgccagcaagggaacaaagctggacagacaatgagtttgatgaattgacagaagtaggcttcagaaggtgggtaataacaaactcctccgagctaaaggagcatgttctaacccaatgcaaggaagctaagaaccttggtaaagggttagaagaattgctaactagaataaccagtttagagaagaacataaatgacctgatggagctgaaaaacatagcacaagaacttcgtgaagaatacacaagtatcaatagctgaatcgataagcagaagaaaggatatcagagactgaagatcaacttaatgaaataaagcatgaagacaagattagagaaaaaaagaatgaaaaggaacaaacaaagcctccaacaaatatgggacaatgtgaaaagaccaaatctatgtttgactggtgtacctgaaagtgatggggagaatggaaccaagttggaaaacacacttcaggttattatccaggagaacttccccaacctagcaagacaggccagtattcaaattcaggaaatacagagaacaccacaaaaatactcctcaagaagagcaactccaagacacataaaatcgtcagattcaccgaggttgaaatgaaggaaacaacgttaagggcagccagagagaaaggtcaggttacccacaaagggaagcccatcaaactaacagtggatctcttggcagaaagcctacaagccagaggagagtggaggccaatattcaacattcttaaagaaaagaattttcaacccagaatttcatatccagccaaactaagcttcataagcgaaggagaaataaaatcctttccagacaagcaaatggtgagggattttgtcatcaccaggcctgacttacaagagctcctgaaggaaccactaaatatggaaaggaaaaaccagtaccagacactgcaagaacaaaccaaaatgtaaagaccatcgatactatgaagaaactgcrtcaactaaagggcaaaataactagctaacatcataatgacaggatcaaattcacaaataacaatattaaccttaaatgtaaatgggctgaatgttccaattaaaaggcaccaactggcaaattggatagtcaagacccattggtgtgctgtagtcaggagacccatctcatatgcaaagacacacacaggctcaaaataaaggaatggaggaatatttaccaagcaaatggaaagcaaaaaaaaaaaaaaaaaaagcagtggttgcaaacctagtctctgataaaacagactttaagccaacaaagatcaaaaaagaccaagaagggcattacataatggtaaagggatcaatgcaacaagaagagctaactatcckaaatatatatgcaccaaatacaggagcacccagattcataaagcaagttcttagagaccaacagtgtgacttagactcccacacaataatagtgagagactttaacaccccactgtcaatattagacagataaacaagacagaaaattaacaaagacatctacagaactctccacctcaaatcaacagaatatacatccttctcagcaccacatagcacttatactaaaattgaccacataattggaagtaaaatactcctcagcaaatgcaaaagaacagaaatcataacaaacaatctctcacaccacagtacaatcaaattacaactcaggtttaagaaactcactcaaaccgcacaactacatggaaactgaacaacctgctcctgaatgactactgagtaaataacaaaattaaagcagaaataaataagttctttgaagccagtaagagcaaagacacaacataccagaatgtctgggacacagctaaaccagtgtttagaagaaaatatatagcaccaaatctccacaggagaaagtgggaaagatctaaaatcaacaccctaacatccacaattataagaaatagagaaacaagagcaaacaagttctaaagctagcagaagacaagaagtaactaagattagagcagaactggaggagatagaggcatgaaaaacccttcaaaaatccataaatccaggagctgttttttttaaagattaacaaaatagatacaccactagccagactaataaaggaaagagagaagaatcaaatagacacaataaaaaatgatagaggggatatcaccactgattccacagaaatacaaactaccatcagagaacactataaacacctctatgcaaataaactagaaaatttagaagaaatggataaattcctggacacatacaccctcccaagactaaaccaggaagaagttggacccctgaatagacaaataacaatttctgaaattgaggcagtaattaatagcctaccaaccgaaaaaagcccaggcccagaaagattcacatctgaattctaccagaggtacaaagaggagctggtaccactccttctgaaactattccaaacaatagaaaaagagggaattctccctaactcactttatgaggccagcatcatcctgataccaaaacctggcagagacacaaaaagaaaatttcaggccaatatccctgatgaacatcaatgtgaaaatcctcaataaaatactggcaaacagaatccagcagcacattaaaaagcttattcaccacgatcaagttggcttcatccctgggatgcaaggctggtccaacatatgcaaatcaataaacataatctattacataaacagaaccaatgacaaaaaccacatgattatcccaatagatgcagaaaaggcctttgataaaattccacaccctttatgctaaaaactctcaataaaataattattgatggaacatatctcaaaatagtaagagctatttatgacaaacccactgccaatatcatactgaatgggcaaaaactgggagcattccctttgaaaactggcacaagccaagctgccctctctcaccactcctattcaacatagtattggaagttctggccagggcaatcaggcaagagaaagaaataaagggtattcaaataggaagagaggcagtgaaattgtctctgtctgcagatgacatgattgtaatttagaaaactccatcgtctcagcccaaaatctccttaagctgataagcaacttcagcaaagtctctggatacaaaatcaatgtgcgaacatcacaagcactcctatacaccaataacagacaaacagagagccaaatcatgaatgaactcccaattcacaattgctacaaagagaataaaatacctaggaatccaacttacaagggacgtgaaggccctcttcaaggagaactacaaaccactgctcaaggaaataagagaggacaaaaacaaatgagaaaacattccatgctcatggataggaaaagtcaatatcgtcaaaatggccatactgcccaaaataatttatagattcgatgctattcccatcaatctaccattgactttcttcacagaattaggaaaaactactttaaatttcacatgaaaacaaaaagagcccatatagccaagacaatcctaagcaaaaagaacaaaccctgaggcatcatgctacctgacttcaaactgtactacaaggctacagtaaccaaaacagcatggtactggtaccaaaacggatatatagaccaatggaacagaacagaggcctcggaaataacattatacatctacaaccatctgatctttgacaaacctgacaaaagcaagcattggggaaaggattccctatttaagaaacggtattgggaaaactggctagccatatgcagaaaaaatttaaactagaccttttctttacaacttacacaaaaattaactcaagatggattaaagatttaaatgtatgacctaagaccataaaaaccctagaagaaaacctaggcaataccattcaggacataggcatgggcaaagatttcatgactaaaacaccaaaagcaatggcaacaaaagccaaaattgacaatgagatctaattaaactaaagagcttctgcacagcaaaagaaactataatcagagtgaacaggcaacctacagaatggtagaaaatttttggaatctatccatctgacaaaggtctaacatccagaatctacaaggaacttaaacaaatttacaagaaaaaaaacaaacaaccccatctaaaagcaggcgaaggatatgaacagatactttatttatttattattattwtttttttgagacggagtcttgctctgtcgcccaggctggagtacagtgacacgatctcggcttggctcactgcaagctccacctcccaggttcacgccattctcctgcctcagcctcccaagtagctgggactacaggtgcctgccaccacgcctggctaatttgttttgtatttttagtagagatggggtttcaccctgttagccaagatggtctcaatctccggacctcatgatctgcctacctcagcctcccaatgaacaggtacttttcaaaagaagacatttacgtggctaacaaatgtgaaaaaaaagctcatcatcactggttattagagaaatgcaaatcaaaaccacaatgagataccatctcacgccagttaaaatgatgatcattaaaaagtcaggaaacaacagatgctgtagaggatatggagagataggaatgcttttacactgttggttgggagtgtaaattagttcaaccattatggaagacagtgtggcgattccccaaggatctagaactagaaataccatttgacacagccatcccattactggtatatacccccaaaggattataaatcattctactataaagacacatgaacacatrtgcttattgtggcactattcacaatagcaaagacttggaaccaaccaaaatgcccatcaatgttagactggataaagaaaacgtggcacatacataccatggaatactgtgcagccataaaaaggaataagttcatgtcatttgcagggacgtggatgaagctggaaaccatcattcccagcaaactaacacaggaacagaaaaccaaacaccgcatattctcattcataagtgggagttgaacaatgaaaacatatgtgcacagggaggggaacatcacacaccagggcctgtcgggggtggagggcaaggggagtgatagcattaggagaaacacctaatgtagatgacgggttgaggggtgcagcaaaccaccatggcacatgtatgtaacaagcctacatgttctgtacatgtatcccaggacttaaagtataattttttaaaaaattctaatagaattataagtttagcaaagctgaaaaatacaagtcagaacacaaatcaattttgtttctataaattagccataaaaatttggaaacttaaattttaaataaaatgccatctataatagcattaaaaatcataaaatacttagggataaacttaaaatatgtgcactctttgaatgctaaaaatcacaaaacaatgatgaaaaaaattgaagaacacctaaataaatggatgaaggtatgtgctcataggtaggataacccaatatactgttaaaagatcaattctcttcaatgtgatttatcaatttaatgcaatcccaataaaaatttcagcccttttttggtagaaattgactagatgactaaaatttgtagagaaaagcaaaggacttagaatacaatttttggagaaagaaagtttgaggactctcaccacctgatttcaagacatcttataatgctataataatcaagagaatgtggtattggcacaagggcatgtagattaacagaacagaataaagagtctggaaattaacctacatgtcaatcaaattttgacaaaggcccaaggtaatacaatagagaaaagactgtctcttcaataaatagtgcttgaacgattgatcctctatatgcaaaaacttgaacataaactttaccacatagatacaaaaattaactcaatatggtcatacacctaagtgcaaaatctaaaactataaagcttctaggagaaaccagaagaagagaagagaagaagagaaaaaattgctcacaaccacgggcaaggcaaagctttcttagatatgatacaaaaagcatgagctataaacgaaaaaattttactaaattggacttcattaatattaaggactactgctctttggaaagcattgccaaaaaagtgaaagacaagctactgaatggaagaaaatattcacaaaacacataaaggacttgtatctaaaatatatttttaaaacttttaaaattcaattataagaaacaaacaaaatttttaaagtgggcattgatttaaacagacacttcaccaagaaaagataccaatgacagataaatacacaacacgatgctcaatatcataaaaaataagagaagtacaaattaatactgccatgagataccactacacacttagtagaaaagctaggattttttttttttaaaggaaaaatgaaagaaaaaactgacaataccaagggctagttcaaatgtggagtaactgaaactctcatattgctagtggtaatgcaaaatggtacaaccactatggaaaaaaaaatttagtatatttttaactgaatcatacacttatactagccagcaatcccacttctagatatttacttaagagaaatgaaaatatgtgtctggagaaagaatatatgtaaatgttgagcctggtatgttgtctctcacctgtagtcccagctactcagaaggctgaggcaggatgatcacttgagcccaggagtttgaagctgcattgagctatgatcctgccactgcctttccgcctgggcaacaaagtgagtccttgtctcaaaaacaaaaacaaaaacaaaaacgactatacatgaatgtttatagtagctttatctataattgccaaaaactaaaaacaacccaaatgtccatcagctggtaaatggatmaacaaattgttgtatgttcataaaatatactacttggtgatagattgaactactgatacacaatgtggatatatctcaaaagcattgtgctaagtgaaagaagccagattcaaaaaattacacactgtaacttatgtaacattctagaagtgaaactagatcacatcaatggttgccagagacaagggttaggggaagagacactacaaagtggcactaaggaagggtttgggtgatgaaacgttctatatcttggttgtagtcttgattacagagctgtatgtatttgaccaggatcatcaactatacacctaaaaggggtaaattttactaaccataaatcagacctcaataaatctgacctaaaaactctgcatgtacagtgtaacttttttaaatctatagtttgataagaaatttttagaaatatgttactgtatccttctgtcttttgccctccttatatttgaccttctcccaattcagctagaggctgaaagttgttttagtgaaaatacaaaatgaaaggagtcagtgttaggcagaggacttatacataaagatgttttagtctatggcagaaagagaggaagcaggaaggcagagagaggcagggagggaaggaaggagggagaaagggagggagggagggagggaaaaaagtcttgaaagccaagatttattgagaatgaattctattatcctaaaaattccttagaaaccaaggctcagcaagttaagcataacattttcaaaatccaaaggtaaagagaattcaaaaggaggagtatggctgactgagaggaggagagaaacagagaagaaacaggcacacaattagatgttctcagggtcattaaaatggaggggaaagaagggtagagagggtcagaagaactcccagggagtccctattccctgagtgtagccagaggacactgacagcctctcagaggagcccggcattcagtagagtgctacatgcaaaagagcccaggataaatggctgagagtgttcagcagcttgaagctcctgaactccctagaaagggttctggaaacatacctcaaaactatagtcatttctctaaagagggcatcagtgtttggggaacttaggggaagtgcaacggaagacagactttcactttttagtatgtacttctgttttgtttcaatattttattacagagaatatgtgttattacttgtgtaattaaaaccatattttaaaagagaaatcagtaaatacagaaaaacacaaataatgaaatttaaatcatacataatgccagcttccaaaagtaatcatttttcacatctgatgtgtatagttccagtatcatagaaaatatacttttatgtaaaattacaattgtcctgtgattgtgtaacccattttcgtaactacatgacatattatgaacatttttccacataattggaatcttaattatgagtgtcattttccagtacagactgttaatgaaatctcaattacccctcgatctttttcatgtaacatatcaagaaagcatttcaccattgaatagttcttaaaatacacgtatagtatttcactgtatttgcataccataatttatttaacgaacatcctatctttgagatttaaacatgtttgggggaggaaacagcaaataagaacaatgctgaagacaggtttttttcacacacacgacttgttttttgttttgttttgttttgaagagatggagtctttctctgttgcccaggctggagtgcagtggcacgatctcggctcaccacaacctcctcctcccaggttcaaacaattctcctgcctcagcctcctgagtagctgggactacaggcacacgccaccacgtctagctaattttcttttgtattttagtagagatggggtttcaccatgttgcccaggctggtctcgaactcctaagctcagggaaaggataaatttctattggtgaaattgttggattagaaccaagaaaaaccttagactacttgatacatatcatcaagttttttttccagaaagtttgaaccaatttttacctaaaccaatataagaaggcccatttctcccttttatactgagaattactatttcaatctttacaataggatccgtgaaaatcatgtctcattgatgtttcagtttttattcactaatgttatctttacttttttcctgtattcactagctgtttgtattttttcttttgtgagtttccttttcatatcctcttccctttgacttctagagttggaagaatttatcgctcaggtgtttatagaagaatgcaaaaccctgtttttggggaaagtaaatgtctctcatgccaactctgtacaaaatgcttgtaacattaaatgtcaacgcaataaaacttttcttcaaggaccaaggaaaacatgatccaggcacactgtttgacagcaatgtaaggatgcaagtctggtagtattatttttgaaacccagcattcataaaggtattattatgggccagccactgcagtaagaaacttgtaagcatcatgtcatataaccctttcttaattccataagataggtattgatagcaaatgaggatgtagagatacagaaagaagtctcagagatggtaagtgctgtgaccaaggtattttatatgtccttaaactgtctcttttactgaccaaacatttggtcttcttcaaatgactgtgtgcatctgtctgtttccttagcttagatgtgaactcctcaagatgaggccatttcctcattcttccacaccctctcatctctccattttcctttccccgttctccttccttaggtaggcaatagacttcaccactgggtcacatcaagcacagagcaaggacttggtggctttttaaactcaacagtggaatcctcctaacgcttgccattaacagccaaaatggacctcaggagtcacctggcccaaccttagattttatatgccactctgctgtggaaatggccaccagccataaataggcaaatagagaggcatggtgtttccctctttttcactacccctgtactttctttgggagccgtgggtaagtaaacctgtaagctggcacagttttacatcacagatcctaagactttctgaaaggtcagctrtcctcatcacttctctctgtatcttggttacactgacccaaaacaccagcctccagttcagcagaacatttgatactgtatagtgatagggaccatgacattattaagtgatcaaccttctaaatctgacagacatcacatggacccatattagccagcttttaaaatgcaacattaatgccttaaggtcaaagtaatgtatccattactggactttaacttagaagtctgaaagggattacagtttgaaaataaattgagtcaatttaatggctatttcttcaatttgtaatgcgatgggtagcattacaatacaggcaagaaatacagcagacattttatgtgaccatcattagagttcattataagccatccataaatgattcacccagtcttctctttactagtgaaaaattatcatccatatgtgttccagtacagcaggcaagtataggaactcaaaggagcaaatcctattgtgggacagtagcacctcctaatctatgttttattgattaagtcataaaagtgatttcagcccttattatgtgtgtggtgcagggtgggaacacttcttcccactcttcactccttccatagtgagggagctcaagtagggtaacaaccttggcctgcctccactgctttaccaacgcctaaggggaagtggagtgacacagctgagccagacaccttgtccagcattttcttcagacgtgagctgcccacagggtatgggagcgttcccttgctttctgacgtcccatcttcattatgaggagacctgccgagtcctgcatcacctctgactgggtgaggctacttcattcttgggatcagattcaggaaacccacttgattctcacaataagctacagcttcaactcagtgtttatcacaataaagatggcgttttggcctcccatttgataatctttgacttttgttctattttgttatacacccaggaggaaaagaaggatataatttgtttggtgcattctcaatgactgcaacatttcatgggtttggaattgaaaattccacaccaaaaattgagcaaaggcatggaattgggggagagcaaaatatttaggcagagaggcattcaatagggccaggaaatgtgtccatgaaccttgtgctgtggtggttaggcaaggcatttggctcttggtggttacattaagtcagctttacctgtcatgacctgcaccagtggatggaaagctctaagccagcagcatgctgtgttgaccatggtggggagctgtggcttatggtggctctgtccacaggctaaagactgtttctctagaagcaagttatctcagattctgtaatggtgtttaaagtagcctttatatggcatttattagacagcatggccatatttgaaaaagcttcaataaaaccaccacctcggactaatatacaactccatgccagtactgcctagaaactttaaaaatgaacaaaaactaatcgtgtacagttccatctgtatcttgattacactgacccaaaacactgacctcccagttcagcagtcacctgatatggtatagtgacattcagaaagcattggttaagcacttatcacatgtcagtctttccgcgaggaataagaaatgcagagacgtacaatatagagcacactgagctcaaggtgctcccttccaaaggccactacaacacaaaatggtaaatgctgtcatcaatggagccagagtgctacggtaacaccaagaaaggtgcctaatgccaacttagtcaacagaggttgatcagaaagcttccacagagaagtgatatgttccttgagtctttaatggctggaggaaggtagctgaccaaagaggcacagggaaaggaggaatattccaggaagaagaagccaccttttctcaaaggagatgagttcagggaatggtaaataatgtagctggagggaagggaagccacaaaaggtcagagaagagtgccaggaaagaaagataaataaggaacaagggcagagtggtcaaaggctgctagggaatttagccaggaagtagcaaaattagatatgcctcttagaaagacaactctggctacagtgcaaaaaataaaaggtagaaagcaagcctggagacaggtagacccttaggagatgactgcagaaatccaaatgcatgtgatattggcctaaaagaggggagtagccttggcatttattctttcattcctttcctctctacattcattccttcattcaacaggtaatatttaagtgcatttaacattctccaggcaccattctaggtactgggaatacagcagtaaacagtagagaaaaaaaaatgtatatatcttttttttttttttttttttttttgagacggagtctcactctgtcacccaggctggagtgcagtggcacgatctcggcttactgcaacctccgcctcccgggttcatgccattttcctgctcagcctcccaagtagctgggactacaggcgcccgccaccacatctggctaactttttgtattttgtttagtagagatggggtttcagcatgttagccaggatggtctcgatctcctgacttcgtgacccaccttcctcagcctcccaaagtgctgggattacaggcgtgagccacctcacccggcctaaaatgtgtatatctaatagagagagatgagtgttacagagagtaccagggtaagccaggaacaatggcaattgcctgtagtcccagctactcaggaggctgaggtaggaggatcacttgagccctcccatacttagtggcacaatcatagctcactgcagcccaggagttcaaggctgcaatgagctatgattgtgccactgcactccagcctgggtgacagagtgagactttgtttctaaaaacaaaacaaagagagagagagagagagagaaccaagataagagaaacaacaatgctggggccaaggttgctgatgggtggggtgaataaagaggaaaaagctagtctgggagccaaatcaaagctggaattgacagcaattagcagataattcgctggctgttgtgcatgtgccacatgtggagtttggaaggagaatggaggtgacagtggaaggaaaaagaattgttaacgatggttcccaggtttctgatttctggaactatatggtccaaaagtgccactaacactcataggaaataaagaagggctcattgtcccactggggtttaaaatgcccagttccacggcggctcacgcctgtaatcctagcactttgggaagccgagctgggtggattccccgagctcaggagttcgagaccagcctgggcaacatggtgaaaccctgtatctactaaaatataaaaaatcagccaggcctggtggcaggcacctgtaatcccagctgctcaggaggctgaggcacgagaattgcttgaaccaaggaggcagaggttgcagggagccgagatcgtgccactgcactccagcctgggcaacaaagtgaaactttgtctcaaataataaaataaaatgctcaatccatggggctgggataaatacacataggtgcaactactaataacaatactaatagctaatagttaaattctctttgttacaactagtgtaactagctaacagttgttgaatgtttactatgtgccaggcttagtgcttagagaggtaaagtaattgacctgagattacacagcaagaaagtacacaatcagcaccaagccattgtttttctaaaatcattgttattagccattttgctctaccttctccaaccagttctgagactacgacactaaatcaccttgcgtttgtcttcccaatcaagaccatcactgaggatgctggccagtctgtcagtctactttacactgtggaaagatttacttttaaactgaagttagtaaggcaaagacaaaaacaacaacaaaacaacaatcaagtagtaagtaatttgtgctttgccttaagaaactcatgtgcttgacctataaatcaatatactccaccccaaaaatgggagcatcatgaagagaaacttcaaagataaagttagataaaaattagaaatcaaggttgatttagggaggaagaaaaggccaggtgctggttaagcgataactctaatttctttgctttgcatctcaccatatcaataaatgacccaaagagattgtgtctgtttcacacacatgtgtaccaagcaatggtttctgggttagctagttgctttttaaagaacagaaacagcatttgcatcccatatccatttttattctcttgacacctcctagaatatggctgtcttctccaacagcacttgtaaaagcactactaaacaaaataaagacagaaaggaaaaaggtttgtttactcactctaaacttaaatgggaaagaagaagcaagaaagttttatttatgtttttcaactactagcaagctcaggcaatcactgacaaaatcattttctacccaggtggctttatcaagttaaaggatttccttattaatcagaaatacaaagggcagtagaagctagtacaatgtaatagtgtgtccggaattggtgggttcttggtctcgctgacttcaagaatgaagccgcggaccctcgcatgagtgttacagttcttaaagatggtgtgtccggagtttgttccctcagatgttcagatgtgtccggagtttgttccttcagatgttcagatgcgtccagagtttcttccttttgataagtttgtggtctcactgacttcaagagtgaagccgtggaccctcacagtgagtgttacagttcttaaagatggcgtgtccagagtttgttccttcaaatgttcagatgtgtccggagtttcttccttctagtaggttcatggtcttgctgacttcaggagtgaagcyrcagaccttcgcggtaagtgttacagctcttaaaggctgcgcgtctggagttattcgytccttccggtgggttcgtggtcttgctggcttcaggagtgaacgtgcagaccttcgcggtaagtgttacagctcttaaaggtgggtgcagacccaaagagtgaacagcagcaagatttactgcaaagggcgaaagaacaaagcttccatggcatggaaaggaacccgaatgggtttctgctgcaggctggggcagcctgcttttattcccttatctgaccccacccacatcctgctgattggtccgttttacagagagctgattggtctgttttgacagggtgctgattggtgtgtttacaatcctctagctagacataaaagttctccaagtccccactagattaactagacacagagcactgattgatgcatttacaaaccttgagctagacacagagtactgattggtgcatttacaatcctttaactagacacaaaagttgtccaagtccccactaggttagctaaatgcagagcactgattggtgcatttacaaaccttgagttagacacagggtgctgattggtgcatttacaaaccttgagctagacacaaagtgctgattggtgcatccacaaaccccgagctagacacagagtgctgattggtgcatatacaatcctccagctagacataaaagttctccaagaccccacccgactcaggagcccagctggctttgcctagtggatccagtgcctgggccatggatggagctgcccaccagtcccacaccacgcacctgcacacctcagcccttgggtggtagatgggaccaggcgccgtggagcagagggcggcgctggtcaggtaggctcgagctgtgtgggagcccatggaggggagggtgggggtggggtggcaggggaggaggtggnnnnnnnnnnnnnnnnnnnnaaacccgataccgttcctgtatgggtacagaacggtaggtggggcgacattctccgcgtatagcctcgccgaagacttggcataacttgagacccgccaagcgcggttttttcaacgcctgtataatgacacatccatatatcgcacgagaggctaaacatcatggttaaatatagtgtagtgacgcgccggaagggtgggagcagtgaacctcataccccacagaagatgcaggggagctggtgcagaggagctaggcagaggggacaacatggtggggtacaggaaccaagccctgccccgtggggaggcagctgaggcccagtgagaattcaagcacagtgccggcgggctggcagtgctgggggacccggcrcaccctctgcagctgctggcccaggtgctaagcccctcactgcccaggggccggccgctctgactgtggggcccactgagcctgcgcccacccggaactcgtgctggcctgcgagcactgcccgcagccccagttcccaccagcgcctctccctccacacctccccgcaagccaagggagctggctccagcctccaccagcccagagaggggctcccacagtgcactggcaggctgaagggctyaagtgtggccagagcagacgccaaggccaaggaggcactgagagtgagcgagggctgctaacacattgtcatctctcrataggattattttkggaagtgatgttaggtttttaaatttgtagctttctaatgtgtacccttttatttgaacatgtgcttcaaatgtgcaagtgtcagatgtctaaaggatgccagcaaatctgatgtgacggttaaactcaccccaaattgttgagagctctgttcccagccaagccatcatgagctattacctagatgacagtaatcactaccaatttccaaatcacttcccggcttccaatcttaccaccccatactcttttctctacaaagcagcccattcattcttattgctgtacactattgcattgagtgagtatatgtcagtttatcgatccattctactgttgatggacatctgagtagtttaatgctgctgcaaatcttctagtattcatctttttggtacacatacaggcatagtttagttaggtatatttagttaggtatattccttggagtgaattggctgagtcctgcaaatgatcgcgtactgtgaattcaggaatattatacatttcagttctgtacaacctaaagttagctacagattgcacctacacgagaatagagagaaagagctagtacactagtctcctgtaacctgcaggggataatgtccaggtccccagcgatgtcgaaacctggatatgtagaaacccgcatataccaccgaccggttaaaaaatgggaaacgtagggaaagcaccaaaagatggacatggaggaaaaaaacacgactacaaccaaagcgaccaaaaaccagcaaagtaaccacccagcaaaacgcacggcccgcannnnnnnnnnnnnnnnnnnntatacacacatgttcttcttcagtgaataccacaagtaactttttaaagtgacaattgacattgcatttttatttagccttaccctatttcctattctttcagcagttttctgctgctgagctcagaatggcctgctgagcttccagtgattgcctgatggcagctgtggggttttccaagctctcacagtatcaggagtacctctaacttctttctacttcctcccacatcatttctgatactacacagatcttgtagcttttgctcctacctggtagcatgtaggtgtacatggggatatcgtatcacctagtcatgatgtaaatacctttcatggggttttggccttgctattctggttactctattggggagtggtgttctggtaggttcaacgactgtatgactgctgccatctttccaaaatcttcyacatatctccctatgtcttcaattgtcacatgtccttattttttatgtacattatttaaaactttctatgaataccgctgtctattttaggctatttgattttattctctggatggctaactgatcactgaagattcatgttcccttttcataatatggaattgttgatgaatatggcttcttaaccaggggccacatttaccagctctcttgccttaaaaaggggccatgtgatgacttctggccaatagaatgtgaacaaaaatgatctgtgtcactttatgggccttggtggctgagtatcttacatgctcatgttctcttccccaagacttcacactttcatttcagacgacctcacgggtcctcttcccctttagcaggaactatgtatggcttgcatcaaggacagcagtatcataaaacgaaaataatttggatcactctatgagttaggacgccagcagtaaatagctggggcacccaaaaaataagacagtttaaagaaggaactattgaaatgagtgggcaaagtgacaggatttaacagaggatggtgaaaaacccagggccaggaacagtaggaaggtgttatcacacccaagtctggaaggagaaggggagggattcacatacatgtcacctagtaagagctgtagccatgggagagtggccacagatagagaaatgagccatgagtgaaacaacaaagacctgagtgggtctcttctctcacctccagtctcctattagtgcctccctttggcaaaacccactggaagctacaggcaaaggagtttatgtgatgcagtccatagaggtgatagaacagagaggggaaggcagagaaggggcgaatagacaacatccaacagactccctgagtcactgcctagaggagggctgtcaaggaaagtagcctgaccagtaacaccagcattagtcttagtgtgtgtaaagtgttacctgctaagcctctaagacttagagattgtttgttccaaaagttaacctgccttaaatataactggtctatttagattttcgcattatcctttttgtatccaaattggttttccaaaaactatcaggggaaataaataataatcccctaaaaacgtaaatatgtgaattttagcaagattgtttagataaattgttaataattctactttgaaattgtagctacttattctgcctgtagatatttgaaagagctgctgtttacaatggcagctcaaaagtgagggcactgtgtgtgggagatcggagtagggggaatgagaaaagtcttttttattcaaaaatgcaaacataaggagtagaaaatattatgggaaaataattaaatgaatatgatggaaaaacttttcaagacttcactcttccatttcaactggcctccttctttttagtccactctccatcctctttcctcaatggaaatgcctgttactctgaagctagcccctactatcttgaaaacaggttctttacaccttcctccatccctgctgtgctccagacccgaagcctttcttcctcatcttatgttgacacattgtccctatgccttgctacatgagtggttagctatttttataactttattcatcatctattaaaaagattgggtaccacctaggcaacaccattttgaacataggaacggacaaaaattttatgacaaagatgccaaaagcaattgcagcaaaaggaaaaattgacaaatgagatttaattaaactaaagagcttctgcacagcaaacgaaactatcaatagaataaacagaaaacctgcagaatgagagaaaagttttgcaaactatgcatccaacaaaggtctaatatccagcatcttacaaggaactgaaacaaatttacaagaaaaaaaaacaaaaacaaccccattaaaaagtgggcaggtgacatgaatagacacttttatttatttatttatttatttatttatttatttattattttttgagatggagtttcgctcttcttgcccaggctggagtgcaatggcatggtcttggctcactgcaacctccacctcccaggttcaagcgattcttctgtctcagcctcccaagtagctgggattacaggtgcccaccaccattcccagctaatttttgtatatttagtagagacagggtttcaccatgttgccaggctggtctcgaactcctgacctcaggaaatccactcgcctcggcctcccaaactgctggggattacaggcgtgagccatcacaccccgcctaacagacacttttcaaaagaagacatacatgtggccaacaagcatatgaaaacaagttcaacatcactgatcattacagaaatgcaaatcgaaaccacaatgagttacaatctcacaccagtcagaatggctatcattaaaaaaaggccaggcatggtggcttacgcctgtaatcccagcactttgggaggctgagatgggtggatcacctgaagccaggagttcgagacccgcctgaccaacgtggtgaaaccccatctctactaaaaatacaaaaattagccggatgtggtagtgggcgcctgtagtcccagctactcaggaggctgaggcaggagaatggcttgaacccgggaggcagagattgcagtgacctgagatcacgtcattgcactccagcctgggcgacagagtgagactgtctcaaaaaaaaaaaaaaaaaaaaaaaaagtcaaaaaattaacaaatcctcatcctgaaaccaaaacctggcagagatacaaaaaagaaaaagaaaactttaaccccaaatccttggtgaacactgatgcaaaaatcctcaacaaaatactggcaaactgaaattagcagcacatgaaaaagcttatccaccatgatcaagtaggctttaaccctgagatgcaaggttagttcaacaaacacaaatcaataaatatgattcatcacataaacagaactgaagacaaaaaccacatgattatcccaataaatgcaaaaaaaaggcttttggtaaaattcaacatggcttcatgtttaaaactctctgtaaaataagtactgaaggagcatacctcaaaataataagagccatctatgacaaacccacagccaacatcacactgaatgggcaaaagctagaaccattccccttgagaactcgcacaaggtaaggatgtcctcctattcaacataatattggaagttctgtccagggcaatcagggaagaaaataaaataaaggcatccaggtaggaagagaggaagtcaaactatccctgtttgcagatgacatgatcctatgtctagaaaaccctgtagtctcacccaaagcctcttaagctgatagacaacttcagcgaagtctcagaatacaaaatcaatgtgtaaaaattactagcattcctatacaccaacaacagtcaagccgggagccaaattagggacacaatcccattcacagctgccacaaaaagaataaaatacctaggaatacagctaactagggcgggaaaagatctctacaaggagaactccaaaacattctcaaataaattagagattaacacaaacaaatggaaaagcatttcatactcatgaatagaaagaatcaatataaaaatggccatactgcacaaagcaatttatagattcactgctatttctattaaactaccactgggattcttcacaggactggaaaaaacttttaaaattcatatggggctgggcacggtggctcatgcctgtgatcacagcactttgggaggccgaggcagaaggatcacttgaggtcagaagttagagaccagcttggccaacatgatgaaaccctgtctctactaaaatacaaaaattagctgagtgtggtagtgggcgactgtaattccagctacttgggaggctgaggcaggagaatcacttgaacccaagaggcggaggttgcagtgagctgagacggcggtgagctgagatcacaccactgcactccagctagggcaacagagtgagactccgtctcaaaaaaaaaaaaaaaaaaaaaaaatcatatggaaccaaaaaaagagcccaaataaccaaggcaatcctaaacaaaaagaacaaaggtggaggcatcacactacctgacttgaaactatgccacaacagggctacagtaatcaaaatagcatggaattggtacaaaaacagatacatagaccaatggaacagaatagagaacccagaaataaggctgcacacctacaactatctgatcttcaacaaaccagacaaaaacaagcaatgggggaaggattccctattcaataaatggtgctgggattaactggctagccatatgcataagattgaaacgggatcccttccttataccataaataaaaattaacccgagatggattaaagacttaaatgtaaaacccaaaactgtaaaaaccctagaagacaatctaggcaataccactcaggacataggcataggcaaagatttcattatgaagatgcctaaagcaattgtaacaaaagtaaaaattgacaaatgggatctaattaaaccacagagcttcttcacagcaaaggaaactgtcaacagagtaagcagacaacctacagaatgtgagaacatttttgcaaactatgcatttcacaaaggtctattattaagcatctataaggaacttaaacaaatttacaagaaaaagacaaacaaccccattaaaaagtggggaaagtacatgaacagacatttttcaaaagaagctacatgcagccaacaaacgtgaaagaaaactcaacatcactgattagaaaaatgcaagtcaaaaccacaatgggataccatctcacaccaatcagaatagctactatttaaaagtcaaaaaataagagatgctggagaggtttagagaaaaaggaatgtttatacactgttggtgggagtgtaaattagttcagccattgtggaagacactgtggcaaatcctcaaagacctaaaaatagaaatgctatttgacccagcaatcccattactgggtatatacccaaaggaaaataagttgttctattataaagacacatgtattcatgtgttaattacacactatttacaatagcaaagacatggaattaacctaaaagtccatcaatgatagattggattaaaaaaaagtggtacaggctgactctcttttcagactcagcccgcctgcacccaggtgaaataaacggccatgttgctcatacaaagcctgtttggtggtctcttcacacagacatgcatgaaatttggtgccatgacttggatcaggggacctcccttgggagatcaatcccatgtcctcctgttctttgctccatgaaaatgatccacttacaacctcaggtcctcagacccaccagcccaaggaacatctcaccaattttaaatctgactcagccggcctgcacccatgtgaaagaaacagctttattgctcacacaaagcctgtttggtggtctcttcacacggacgcacatgaaaactggagtcctcacgcccaccagcccagagtgctctctagaggaagcctacagacacttcctggctcactcctccagacgttagctgtcttgctgaaactccttttttcacccttgaaaaccactgcaagaatggccaagaacccagctatcctgaggctgtgaccatctatgacaagccggcatctttctttcaagagacacctctggacctgcagcaccgactcttcatgaagctgggcagcacgcactctccgttcagggcccgctcagaacctgaggacccagccaggagcggtcggccttcatgaagcgggatgctgggagcgggctggtgatgcgtctccatgagcggccagccctgctggtcagcagcacaggctggacaggtctgcacgacccatggaacacttgagaggacgaagacttctccatcctgctggcagctttagaaaagtttgagcaactgactcttgacgaacacaaccttccttctctcgtctgtgtgataacaggcaaatggcctctgagggagtattacagccacctcatccaccagaagcatttccagcacatccaggtctgcaccccctggctggaggccgaggactaccccctgcttctagggtcggtggacctgggtgtctgtctgcacacgtcctccagtggcctggacctgcccatgaaggtggtggacatgttcgggtgctgtttgcctgtgtgtgctgtgaacttcaagtgtttacatgagctggtgaaacatgaagaaaacagcttggtctttgaggactcagaggaactggcagctcagctgcagatgcttttctcaaactttcctgatcctgagggcaagctaaaccagttccggaagaacctgcgggagtcgcagcagctccgatgggatgagagctgggtgcagactgtgcttcctttggttatggacacataaatcctgggccagagactaaaaccccaggacccctgctgtccttcccgcagcttcttctcggagtctcagggcaaaccctttcgagcagcgcctcccagtggccagaagctgaaatgacagcagtggtgccgccgggtgaatgaattggttctgtgacccggggaaaagaaaaaaaaaaaaaaagtggtacatacacactgtggaatagtatgcagacctaaaaaagaacaagatcatgtcttttgcaggaacatgaatggagctggaggccattatcctcagcaaactgaaacaagaacagaaaaccaagtaatatatgttctcgcttataagtgggaataaatgatgagaatacatggacatatagagcggaacaacacacactagggcctgttggagagtgaagggtaggaggagtgagaggatcaggaaaaataactaatgggtactaggcttaatacctgggtgacaaaataatctgtgcaacaaacccccatgacacaagtttacctatataacaaacctacacatgtacccctgaacttaaaatttaataaaataaaataacagatgctggcaaagttgcagagaaaaggaaacacttatatactgttggtgggaatataagttagtttaagtattgcagaaagcagtgtagcaattccttgaagagctaaaaagaggactaccattcaactcagcaatcccattactgggtatatacccacaggaatataaatcattccataacaaagacacgtgcatgcgtatgtttactgcatcactactcacaacagcaaagacatggaatcaacctaaatgcccatcaatgatagactggataaagaaaatgtggtacatatataccactgactactacgtggccataaaaaaggactacatcatgtcttttgcaggaacatggatggagttggagaccattaaccttagcaaattaacacaggaacagaaaaccaaatactgcatgctcttacttacaagtgggagctaaatgatgagaactcatggacaaaaataagggaacaacagacactggggcctccttgaaggtggagggtgaaaggagggagaagagcagaaa

SEQ ID NO: 93573 - DNA, 18935 bp, Homo sapiens
caccatgcaccccggttctggtgacctctttgagtgcaggcagtagtgaacagagcctgcttggccttgacacttttttttttcaagagaatgggtctcgctctgttgccctgactggagtgcagtggtgagaccatggctcactgcagcctccacctcctaggcacaagagatcctccccactcagcctcctgagtagctgagactgcagatgtgtgccaccatggctaattttttgaaatttttaaagagataggtcttattatgttgcccaggctggtcttgagattctggcctctagtgattctcctgccttggcctcctgactcactggggattatagacgtgagtcaccgtgcccggcaacactttttaaatggatacagtctaggtagaagaatcaagaggaatgctggctgggttggtcctgtttccacctccctgtaataaaggagagctgccaaactgggggctcagaagaaggtgggaggaagaggggaagaactccaggatagcaataaggaggctggaaaaggggtcttggaacatagaccttcttttttttttttttttttttttagctttacacattttttaactttactccaaaagtgatatatttttataaaagtaatttgtgcttaatacaaaaagattagaaaataaaatgtgaaagacaaatatataaaaatcatccataatccaatcactggaaataaacattttgttgtacattctttaatatcatgtactatatacataatcactatttatttgaaaagtaaaaataaacctttaatttctggtgtggagggcattaggtactctgagagactcctccaaggtagaacagctagactgtagacagaacaaagcaaaactcatgagctgattacagagttagtagtaatgatatttggctacacaggggcatgcagattgccctgcagttagatttttttttttaaataacactataacaggaaaactgagtcttaaactagcatcaaagtgttagtgttttaactgtaactcattaagccaggacatcaaggatggctgaagttgttataagttcagaaagaaatcaaagatttcagcagaagtagacaaaaatcaactctacaaaaacagtgatctaatttaagccatataatttgcacagatgaaggtcaagcaccaaactcacaatcaaggacaatcccaacatgttaaaaaggcaagtcagcatttttttatgttttttttttgcatcttttttttaaattttattttttattattatactttaagttttagggtacatgtgcacaacgtgcaggtttgttacatatgtatacatgtgccatgttggtgtgctgtacccattaactcatcatttacattaggtatatctcctaatgctatccctcccccctccccccaccccacaacaggccccggtgtgtgatgttccccttcctgtgtccatgtgttctcattgttcagttcccacctatgagtgagaacatgcagtgttcggttttttgtccttgtgatagtttgctgagaatgatggtttccagcttcatccatgtccctacaaaggacatgaactcatcactttttatggctgcatagtattccatggtgtatatgtgccacattttcttaatccagtctataattgttggacatttgggttggttccaagtctttgctattgtgaatagtgccacaataaacatatgtgtgcatgtgtctttatagcagcatgatttataatcctttgggtatatacccagtaatgggatggctgggtcaaatggtatttctagttctagatccctgaggaatcgccacaccgacttccacaatggttgaactagtttacagtcccaccaacagtgtaaaagtgttcctatttctccacatcctctccagcacctgttgttacctgactttttaatgatcgccattctaactggtgtgagatggcatctcattgyggttttgatttgcatttctctgatggccagtgatgatgagcattttttcatgtgttttttggctgcataaatgtcttcttttgagaagtgtctgttcatatccttcgcccactttttgatggggttgtttgtttttttcttgtaaatttatttgagttcattgtagattctggatattagccctttgtcagatgagtaggttgcaacatagaccttctttttaagaaattttgaaatttggaagtaacttcaagtttatgaaaagtttaaaggtaaaaaatagtacacagactgtccttacaggctttaccaagatgtacctgttgctaacattgtactctgtttgctttgttgtttgtcccctgctctatatgaacacacatgggtatgtatgtatgtatgtgtatgtatgtatatgtgtgtatgtatgcatgtatgtgtccatctgtctgtatgtatgtgtatacacacaattatttttcctgaaccacttgaaggtaatttacacttatcatgagctttatcctaaattctttagtgagtatttcccaggaatagggatattttcttacattaccacaatatagtcatcaagttcacaggtttacattgagacagaactttcatctaacccaccacccacactgcaatcttatttgttgaccccatcatgtccttggcactatatgtgcctgcagtacaggattctgcgtaggcttgaatattgcgttcattcaccgtggctctttagcctcctgtaatctggaacatttcctccacctttctttgtctttaacgacattgaaaagtcaagggacttttgtgatgggccatgggcagaggcggttttgcctaccgattaagaatacggatgctggcacccagctgcctgggctcagtcccactctgccatttatcagcctggtaagtgtgggagagttgcttaacccttctgtgcctcagtttgatcattcatgaatccagtgaacagttagcctgtctcgtggggctgttaggaggcttggcacacagtaaaaatgggcaaccatttgcttattgttatggtggcaagtcttttcttgaaggggctcccagtgcatcaagcctcacaggggtgccttagcattggctcaggaatcaggaccaagcggggcctgtggcagcctgcagtcctccctgactgtacatgcggttagcctaaggactctgtggtctggacaagcagccatatcctaagacggtagcagagaccatgccagccaaagactcaacagggatgtggctaccttaacagacagcaatgtgaggacctgggaccctccaggaagtgaagcccttcccaattaccagtgtggctgcggataagtcccacactgtcgagttgaccccagaagaggtacctggagaagggacccgagaaaccactgaagtgattcatcgtacctgaacgttgctggatggcttcaccaccctcaggtgcacagagccttcaagatagagcctaagttcagctataggaaaggcaggttttgtacagctgccatgatgcctcccagtggaagggctgagcaacccctagagacttctcctaaccaggtattactcctccttctcttttctgacctagaaaggagccaggcaatgtggaaaaggggcttaaagggctcccatgagatgagcagagcgcatggaataatgagtggaagcgactccagacagcctcctgatttctgaagctcagttctcccctgacaccttccgtgaaggctgctgtatatagcctgctaaccatcagcccgtctatccacgaatctacccatccaactgtctgtccattcactcattcatgcatccacccatctctccatccatcctccattcctccatccgatgaggaaacacatatcctacagcctccatatccttgcctcaccatcttaatacagtcatgyggggcttgaccacagggatctgttctgaaaaacgtgtcattagtcgatttcaccattgtgtgatgtcatagagtgcacttacacaaacctagatggtacagcctactacacacctcggctgcagggtacagcctatttctcctagccagcatcaccacaaacatgtgagtgatgctttgcattatgatggcgatgaggtcactaagccataggagttgttgagctccttatcaccttatgggactcagtggcatacgcagtccactgttgggcggaacatcgttccgcagcacacaactgtgcttgctcacctggctttgtcaaggaaggagctcttccatggatatgtttttctgttgttgttccagataacttttatccttttaagagtgccaccttcatttagtttagtttagccattttagagagaaagtgctgaaaccgactgtaaacttgtctgtcttttttttttttttttttttttgagacggagtcttgctgtgttgcccaggctggagtgcagtggcacgatcttggatgactgcaacctctgctttctgggttcaagtggttctcccacctcagcctcctgagtagctgggattacaggcatgcgcaaccatgcctggttaatcttggtattgttagtagagatggggtttcaccgtgctggccaggcttgtctcaaactcccgacctagtgatctgcccgccttggcctcccaaagtgctgggattacaggtgtgagccactgcgccaggcccttttctttcttcctttccttttcttcatttcctttcctttcccttccttccttccttccctccctccctccctccctccctcctttctttctctttctttctttcctttctttctttctttttctttctttctttctttctctttctttctttctttctttctttctttctttctttctttctttctttctttctttctttctttttcttttcttttcttttcttttcccttccttccttccttccttccttctttcttcctttttctttccctttttattgacaggatctcactctgttgcccagcctggagtgcagcaatctcggctcattgcaacctccaacccctgggttcaagcaattctcctgcctcagcctcccgagaagctgccaagaggctaattttttttttctcctgcctcaggctcccaagagggcaattttttttttttcgtatttttagtagagacagggtttcaccatcttggccaggctggtcttgatctcctgaccacgtatccacccaccttggcctcccaaagtgctgggattacaggcgtgagccactgtgcccagccttgtctttctttttaaaagagggcctggcacttcagttaagtctttctggatgatccaggtcaccgctccaaatggaagtcacatgcttggttgtggagccagtggtatgggccctcagggagtatttagaactctacactaaatggccccagtggttctgctttttgacacttccttttgtactttctgccacccccccattctgagatcccagttatcttcccaattcttatagcccttggcatgcttctagcaatgtcttctctaaatggccttgagctgggaaatttgataaccaaatgtgtcagaattgtgcataaagcaagagtactgagttatttcttttatcatgagtacagtacggagcctcctgactttgtatcccgtcatttgcctcattctgggttctccgctactctccaggccgctgaggtccatggatgcataagccctaggaatgaggagggtgcagtggacatgaattgctcttcctagatccttgctgcttttgctctagagaaaaggatgggataccagagcctgtcctggctgactcctccctcaaaggggctcgggggagatgggagcacagggtggggccagctgggtcagtggtgcctgaagcttctgagggagaggagagtggctgggccccactgatagtgtgcaggaggctgaggaagggacacttgcctcctcctcactctgggtgacgatggccagtgtagactggagagagccggagggactggtctcccctcaaggcccgaagcaggactggcaccagcggtgagatgggcacctggggtgggggccaggggtctcagcccataaacaccccacacgccacagcagcacacaggggctcctttaaatacacagctatggggactcccaaaatgcagacgtacacttgcactcacaagggacgcacttccatagctgtarcaacccatcagggaactgaccacacacactccggcgggaggtcctcttcacttccttccctccacgaagatctctccccttcaccacggacacagtgacatgtgctatccaattgtgacaaacacatcatctctgaatttggacactggggtcccatttcagaaggtgacaaccctcacaccaacaactgcacctactttcttacagggttggatgcctataacatgcctgcatggtgggacagcaagcggctgattgcccgcacacactcagatgcacgcttgcacacatgctcacacatgcttacatgcacactcacacttgccttcagacacacatgggtccaggcagggccctggcttggcctgacctgcttcccctgtgctttctgcagctgcagggggtgctctgccctcctctgcggggtttccaccccctctgtccttgggccttggattctggggggctggtggactgatgccaacatcctcctctctctccccaggatttttgtcaaccgcagcctggcgctggggaagattcgttgctttggcttcgacatggactacactctggctggtagagagggctggaacacagcgtattgggagctggagggagcaggggtgggcagctgggcaccaaagccctgattctgtccgggcctctgcagcctacaagtccccagcttatgaggccctgaccttcgagctgctgctggagcrcctggtgtgcattgggtacccgcatgagatcctgcgctacacctacgaccccaccttccccaccaggtgtgtggctcaggacaggtgggaggccacccggccttggtacccccacccacagtgccccccgacccccgtctgcaggcggctggtgttcgatgaactctatgggaacctgctgaaggtggacgcccacgggaatgtgctgctgggtgcctatggcttcaccttcctctcggagtaagggacaaaggtgccgggagagtggcaggccaggaggggaggactgctcaccttgggggaggacagagggagggagggaggaaggacgcaggcccacggtggaggctcagcacagaagggatgcgtggtggttggaagggatggccagagcctggacaggcctccaggaggcactggggaggggtcattggctgcacccagcctacccctcctcagggcagagatctggagcttctaccccagcaagttcattcagagggacgacctgcagtgtttctacatactcaacatgctcttcaacctgcctggtgggtggagggttgggggcacgggaggtggtcctgagttccggagctgagggtcccagctctgtcctggtggagaactgtctggctccctgggctgacaactgaccatcctgtctgcccccagaaacctacctctatgcctgcttggtggacwtcttctctggctgctcccgttacactaagtgcrtcttgtgccctgcccagccctgggacgaccagtaggacactgctcagggaccaaaccccaaagaggggccccccaagggctccccaagaggctggaagggctccaggaagctcagtgggaaggcctctattgcaggctagcacacacccttagctctgggtgatgcccctcccaggatgtctgggacataagcccagtgaaggccccagtgtggctggtggggttgctctggtgtgggactcagggttggaggtcatttcaggcccccttattggcctccccgtcccctctttgcctgccccagttgtgacaccggctatcagcatgggaacctcttcatgtccttccgaagcctcttccaggatgtgactgatgccatgaataacatccaccagtcggtgagtgagtggtccagaacccccggacccctgacctgtctgctcttggttccccgggcagccttcaggcctccagtccccatagcgtttccatcctcttcctactgaggactgaggtctggtctgggcttcccagagccgcccacttttctcatcttggacacagacatgtgggtgggtacacatgcacacacacacacacacacacacacacacacacacacacaggcactttgctccctcctgcagggctgtctcaagaagaccctggaggacttggagaaatatgtgaagaaggatgtgagtggccacagacccagggccatggccatcacccccaaagcagcagggctgcccccgcaacccttctctggctttcttcgaggtttaggctgagctctgctccccggatggctggggatctttctatggggcctggtgcctacctgcctgggctggggtgggctcccagaaggctgaaacctgaggagaggatcccagggcagctctgggagtcccacccctgcaagtccctctatctctgccccagccaygcctccccatcctgctggggaagatgaaggaggttgggaaagtgtttctggccaccaacagcagctacaactacaccaatgtgagtatgtgtatggaggggtggaccgtyggcctccttcctggccccaggggacacagwggcactgcaagcaacagggaggggtggggcggggagccaagaccctcctacccccaccactgggctggtctcctggactccatttcttggcctttcaaggcctcagargaatgagcaactttctcaccatcttgctcctgtggccaccagtgtgctggggggatggtgggtgagggcagaggcaggtggtggcccaagcttggtgccctgacgctgccttgtccttgccaggccatcatgacctacctgttcagcatcagtgaggtgagtgttggagtgttgcgtgcacggctggggtgggctgtgcaaagggccagggtgccaggctgcaccacgatgctgagggcctctcccacgtccagcctccctttgaggaagacctgagtgtgtgagtggtcatttctcatgagtggaagctccccagtgggtaggagcctggtgacctcagccaggccctgggaggagcctttgggggtgataggaggcagtcaggtatgtggggacgggcggcagaaagtgggtgagacgagggcatggcaggtcaaagggaggggtgctgggagtgacaggtcctgggcactgggagtgaccaggtgtcactgggcaggcagcagggccctaactaggtagccgtgctggtgccacctgtccctgggtctctgtgctgtgaggagctctggagcctggcctgaggctgcacatgatgttcaacacccacctccacaaggtccttttgagcacttcctagtgcccagcttggctggggaagctgggcagcgagaccgggttcccaggggctgaagaggtctcatccagctgggaggttggtggggagaggcaggctgtggtgggtgactggctgtggcaaggtcagatttaccaggctgtgtgtgtgcagcccgtgtgcacccccaacaggctgaagcctcgggcaggccctggaggtcctactttgacctgatcgtggtggacacgcagaagccccacttctttgcagaggggttggtcctgaggcaggtcaacacggtaatggcaggtgcagaggtcagtccacctgcacccatggaccacggttggggagggcagcctgcctgccccttagacttgacctgcctttatagctggcagctctgctggcctgtctgtccctggaggcagggaacccgaggccgccttcagcgccctctgctgcctccttcctcccacaccccccatggttacctctgccactcccagctccctgcgaccctccctagctagagaccaaagatgtggttctcctggctccagggcacccctctgcccctccaggactcaggaaagctccacgtgggcacctmcacagggccccaccagcactgtgctgtctactctggaggtaccagctcccaccatgccccatcactccttgggcaccctccttccctcgactaggagcccaggcccctcacctgccccgagtcacctaccccaaggcaggaagggcaaacgagtgtctgtcctccccttggtggggcaggctcttcggacatggtgtgcgagctgcttggggttcgggggatggacatcctgtacattggggaccacatttttggggacattctcaagtccaagaagcgtcagggctggcggacttgcctggtggttcctgagctgtcctgggagctggacatctgggcccaggagaagggtgagctgttggggtctggaacagtcagaggggcactggcctcccatgcagaggccccagcactgccttctcctttttcccgtggggggttagtagttgtgaccaggaatcctggccactctgttgtttctgagggaggaaacagacaaagacatacagacccagagaggctaagcggcctgcccgaagtcacacagccagtagggggaaagctgagagtcaaatccacttctcctgacccaagaatcccgtggtgtttctgcaggcggtgccttcctcctgcacctgaccccaccctccccacccaccccaaggatgttcagtgagtggaaggtacacaccttccacccaggtatgacttgaagtcatcctccagggcagggagttgtgtgagcccacacaatttgggctttgtcctgagagctgaggctttaggtttgagtcattgccgtgtgacctcaggaaggtcacctgactccctcacctgtcccatggggcctacggggcctatgctgtccctgcctcagtctgggcagagtctcacgtgatgtaaggggccaggggtgttatgcacacagctcagggtgtgcaagtcctccgctgggccagggcagacacaggcaggcagggccagtgggtgacacaggccgtcactcacccccactgacccctggtggcttttcagagcggttggaggagctgaagagactggacacgcacctggcagacatataccagtgagaccctggcctttctgggggtgggatggggcagggagaggtatggaggggcagtggctcacatccctgcctggcggcgaggtcccggccaaggttgtcagaacatcaagatctgtttcaggctgggcttccctagcaaactgaatgtggggacccctctcacccccttgggactgctcacactctgtgacctctaggcccttcctctgaacctatccagcactcagggacctgccctcgcacgcatgcacacacccagcccggcacccccactggatgcccgcacggtgtccccccacccgacccctgctggggtctaaggagactgtcctggcactcggaggctctgtgcctcccctgggtcacctagctatttttgtaccaggcacatggatgggagcagttgtgagctgcaagtcatcaacttcaccaagagagagatccaggtgrgagctgggtggcgagggaagggacaggcccagcrggggcggagccgggttcacttccccactgcttgcctgtcggctttgtcctcggtgccaaaggcccagttaccccattctcctcagcckcgcctgggctccacctgccttgtcagccagcgccctctgctggccgacattccaaagggcagcggtaccctcttgaagggctgagttgagcctgatttgcaggctttgcctccagtcccacagtctttgccaatcaccctgcccgggaagtgcctgcgtgctagctgggcccttattgactgactagccagttctgataggaaatgtgatttagggccagtgagcccagggtccttggaaaagagaagaaaagacaatgttcccttgtggcattactgaccggccaccaaaaagctggaggtgcccatgggtcggccaggtggagggagtcaggtcacttggtcatcccaagcccagctggggccgatcacaaagggtctttgcagagccttttacaaagcacagccgtttgatcttccccacagccttaagaggtggatggagcagggattgtcacctttattttacagatgaggaaactgaggctcagagagaggtcatcctgggagtaaatgttggaaccattctctaggctctaaaagcagacaggaaacagggcctggtggcggggtggggcctgccaggatagtaggagcgaggctgggggtgtcgccttgccaagtcctctgttggactcagatggtaaatgaagctgtgggtttagtcctgggtggtccatcttcagggccaggcaggtaactgtgatggaaagctgcagcggggcctgtggcaaagtgaggagctgccccacctccaaaagccaagtgtgcagcctgtgggtctacaacatgctgctccttcctacagagagtcacaggtttcaatgtcccccggtgagaggcccagagaggccagggttgcccagaaagggagtaggccaggtcaggcctaagcgggctgggatttcaattcagtgtgttgcccctctggccagagggtcacccaaggagctggacctgtgctacagcaccatgggcagcttgttccgctgcggtttccgccagacactcttctccagccagctgatgcgctatgccgacctytacactgccgcctgcctcgacytcctgtacttccgagtgagctcagctctctcgggcggccccggagttggtgggtccctgcggaatctccacggctgtttgtgaacatttatcctagaaggacccactggtccccagccttgctaggagcttgcaaggtcaccagccctaatctcccaccttcagactcagtgggatcacagtcttgcagataactgtctgtgtcttaacagacgcatgggaagagttaggtttatacagataagatgcctcggcagggatgttcttcctcatgcccaaccttaactcctgctttagattgagaccacactatctcgtcatttccttggtagaaaggatatcagttgcaaggaggaaggcacagtcctcctaccctcagtaaacatacagtggcttccgaaggggtggaggaggcagcagatgatacagtaaacactctggctggttttcctctgggagaccggaggatgcttctgggttaaaaacagggtggtagaggtggctacgatggcactgggcaagggttagtaggagtcatgggactggccagctcagggcttccctggaacctgcaygtgtcagtcctcccaagttggcatcatcatttccatttgataagacgtagagcttgcagtttaggatctgaacttgaagctagacctctgaggctccctgtcgcctgccttccctgctgcccttggctgccttccagacgtttgagaggggaaaaccatttattgagtgtctgctgtgtttcctgcactgggctgggtgcttttcatcgattatgcttaatgctcaatataactcagcaaagtaggttttatcttcctcattttatcattgatgaggaagcacagagaatctaagtgacttgccatcacacagctagtggaccacacagctgggatgtgagcctgtcaagctccaggggtcacactgtgtctcctgcactgtgctgccacacacatgggggaactggctttcaccgggcggcctcatctcatctctggactcttagatgggctggcccagaccgctcctgtgggcaaagctgggggtccaggcatagccctctgtgctggtagatattattgttaaagtagagaccagacaggtgaagaacacaccaaccccccatccccaaaagtgacaaggcgaaacacttaaagaaatttgaccttgccaatcttcctggcttgggattttttttttggccaagtctagctctgctgcccaggctggagtgcagtggtgcaatctctgctcaatgcaacctccacctcccgggttcaagcaattcttgtgcctcagcctcccaagtagctgggattacaggcatgcactaccatgcccagctaatttttatgtttttatagagacagggtttcaccatgttgcccaggctggtcttgaacccctgggctcaagtgatccgcctgcctcggcctcccaaagtgctgggattacaggcgtgagccaccgcgcctggccttggcctgggatttttgaggaagtgaagtccagctgccagaaccttcctgcccctgctgaccttccgaggttccttcctctgcagcaacatcgttgggcaggaagttggcagctgtgggcaggggagcctgtgcatagctgaggaatcctggaaggccgtacccgggacggagtgcttcacctccacctgcatttatccctacagatgccacatgagtcagttgtggagcaagaacaggccaatctagaccctgcctcctgcctcctctcctgcaaccagagggtgagtggctgtggccgacgaactctgtggcttggggtcccatgggctagagtagtggttcccagtggggttgtatcaaccccaggacgcatgaggcaattggtgggggggcttgtgggcttgtttttgtctgcaagcatagtcattcctcattatttatgtaaaaatgcgtattattttattgtaaaatgcttttctctttatttctcctttgttagagtattatcttgatactttaaattatagagatgataattgtatcgatgaatttcaattcaggatggaaaagtagaagctaaatatttgtttttaaaatgggatattggagccaggtgtggtgtttcacacctgtaatcccagcactttgggaggctgaggcaagtggatcacctgagggcaggaggtcgagaccagcctggccaacatggtgaaaacccgtctctattaaaaatacaaaaattagctgggcatggtggtggaagcctctagtcccagctacccgggaggctgaggcaggagaatcacttgaacccaggaggcggaggttgcggtgagctgagattgcaccactgcactccaacctgggcaacagggaaagactgtctcaaaaaaaaaaaaaaaaaaaaaagcgacagttggatccaaaagggcgacaggttctgctcagcagtgctttgtgcactgttgggccctgcacccctacggactgctgttggccaatccatacacattattccctccaggggaagttgcaggatgtgccctcttccacattgaggcttcctccccagacaggctttgttaacattaatgactagtggctctagcttcagatccctttgacactttgtgaggcttgacccgcgtctgagctgagacaggagtggatgcctggattcctcgttgggttctgcacccccaaaaccctgcataaatgttcctctttctcccttggctttctgggggctcactttaaaagatgtgtatcccataggtcccctttagctgggttgtaccaggcacagtgtttgttctttcaaccagtatttactgagcacctcctgtgtgccgggcagtttagaaaataaagtgtaagttacttcattcctgcctaggagaagctcaaaattcaagtgcattcacaggctttaatcagtggttggcaactgtttttctatcctagcccagcagagagatggacacactcctgtcagtaacagaggcttgctggggaagcctgtggtttgatccctctatatcctcaccccatcaggatccagcctagggcattttgacacattatctacccctggttgggcgtcactgtgtgagcttgggaagaaaatatccatagtcactttctgtgtttcttataagggttagggcaaagagagaaacgaggatcaggaaagttacatcgaggctgacggaatcctggacatgggctggcatcacgggccatcttctacttgagatatttttcagataacacaagtatggaaaaaggaaaaagcaactgtattgaaatctcctaaatgcagcagatttggagcctgcaaacacttcttttagggaggaggcagtattgctcttaacctagaaggcatcctcaatggtctttgagacgtttggaaacgtgtgcacaagtgaaattattttacctacttctcttgaacgcatgatgtctcatatccaattttatttctaaacatttcttttaaaaaatagttatttctgtgcacttctgattctgttactagtaagaacagtaaaacctgattggctatatattgcctcactaactgctctttcattctgggtcactacgaaagatgttaaatgagatagcccaaatgtctttgagtttgtgtatacacattaaaacacataaaaagtcatactcatgattttaaaacttgactctcgaatgtgttagaagcttctctgtggtattaaagtgctgaagcatcattgttctgatgtcactgatttcagtttactcctacagtttactttttgtctgttagtggtatcatctggcattctgtggagacctaggttgaatctgcatgtttgaaatgacaaagtaaacccttgaaggaacaggtctgaggacacacttcattagcttcattttctgtggataaacaatggcaacacttagatacctgaggataaataagggacaacgggccatggaatcagagagtttactttttttttttttttttttttttgagacagagtctcattctgtcacccaggctgcagtgcagtggcacgatctcggctccacctcctgggttcaagcaattcttctgcctcaacctccgagtagttgggattacaggcatactccaccacacctggctaatttttgtatttttagtagagacagggtttcaccatgttggccaggctggtctcaaattcctgacctcaagtgatccgcctgcctcggcctcttaacgtgtagggattacaggcgagagccaccgagcctggcatttttttttttaaaacatcttctttgcatttcagaagcttccaggtttgacactgccaaggccttttcttcctttccctggtttgactttcaggtcccagagcctgcaggggcaggttctccagtaaatcccaggtctcactggcctgtgtctttacaggggcaggttctccagtaaatcccaggtctcactggcctgtgtctttacaggggcaggttctccagtaaatcccaggtctcactggcctgtgtctttacaggggcaggttctccagtaaatcccaggtctcactggcctgtgtctttaaacgcttgattcttagtcaagagctaaaggatagtatttatcagaaaaactgctcagaccctagagcccatacttttccggaaaggtcctgaaatatagtgtggtagctaacactacaaaagtcaaatctcagaattcctacccagggtagagaggatacagaaaaggactgagggataaacaatctggcagaaatgctttaggggatcctagcgagggaaaggagagaggtggccaaagggcctttcttgtgcttttcctatgtctggcccattccctgcctcttctccctgttacctccgctctcccctcagcgaagatccctgactagaccagtttctctttagtccctcgctcataggcctctatttctcaggacttggagtcttgcatttgtggttcctagattaacacgtgtcctcactagactctcagctccaaaaggtaatgtccttttggctcaccgttgtgtctctggcatctacgtacctgtgtattttattgaaagacacatgtcacccagtttattattactcttgtagaactgcagggaaagggcaggacaaagaatatgagaaaaaagaaagtggagaaaggatatagggctttggattagaatgctacctcctacccagacacattcatgagaaaactcatatccttagacaaactcctaattctgtatctgtcctacctcatgggtaggaggtaggacagatacttctatttgggtagttttttttttttttaaacttaatgtcacctctacactcctgttttatctataccttagggacagaagcacaccattgcttccaagactgtgtgcagacactgacattcatctcccatttctggaagaatttttagctgggcatgtggccatctgatacacatttccctgcttctttagatggggtgggagggggggacatgggaccaagttctggcccctaaattctggacagaagtaatggtccaacttccaatccgtgacctcaggaggggcataccttcccgttcctctcttcccccttccagctggctggagagtgaagttgggtgggagccttctttggccacatggacgaggctgcctccaagggatggtggagtcacaagacagacataggctgggcttggcagtagattagcattgggctgtcacttggatggctgatgtgagagagatgcatttccatttgggactagtgacagcagctgaactgacatcctcattctggcatcgtcttgagcagtcaggaaatgaagagaacagaagcarcatctctgtggtagtgaactagtggtaaaaatgtgatcatttatttgtagaataaatgacagtactttggctgtcacagtgattcctgcttggtaaactgggaacagttcaataatttatcttgctcagatgtgtttccttatcatcaccttagtcctcatttccttactttaaatagagataggagttaaaagttctgaacctgga

SEQ ID NO: 93574 - DNA, 61760 bp, Homo sapiens
  misc_feature (1)...(61760): n = A,T,C or G
tttacatattgtttcctatttgtatatcttgttttctagacttatagacaacagtgtctgatttaaaaaaaaatagagccagcttccattagagttctggtcaaacaggccacatagccttagttatacatgtcaaggaaaaagtgaaagtcttaggtagtagagctctatgttggccactgttgccttaaccccagtatttccagaattcctataggaaaaatgaattatatgaattataacaatgttctttactctcttgttccacttaggattttttttttctcctagtgactttctctttcaccaaaaccgaatgaccattgatccaataatctcaaagtttcatgaaggtgaaaataatcctcattcaaaaatgaaggcccttgcacagctgtgtgttcaaactgaaattaaaaaagaacagtggttacatttggttgcatctgcatacctgacattagatgagattaacattgccaaacaaaaataaagagaaaggatcgcagaggtgatgcccctacggctactcatctgaatgatttgttctctctttacctacagttctgcttccgttttagtggagtaataaaggggaggaggatgtgtgtgtgggagaggtattaattcttcctccattcatagaatacagatgctggttcactaccagaacttcaagaatgatgaaaataagactttgcccagtgtaaaactttgcctgcaatcagtttttaaaataatgcttcttttatttaacagacatgctcatgagtaatggttataacaaagaaacaatcacttgccttcaaaaaaaaaagaatggcaaatatgtagatggtctaaattactagacctgtgattttactcttgcctcatatcacactgggtccctctgaatgtttaaactgtctctagacttcgaatgactactgacactactggtttggtaggttaagaccacaaaaatggccataaaaccactgagaagaccgggcaaggtggctcacgcctgtaatcccagcactttgtgtggccaaggtgggtggatcacctgaggtcaggagtttgagaccagcctggccaacatagtgaaaccccatctctactaaaaatacaaaaattagccaggcatggtggcgggcgcctgtagtcccagctactcagagtctgaggcaggagaatcgcttgaacccaggaggcagaggttgcggttagccaagatcgcgccactgcactccagcctgggcaacagaatgaggctccatcttgagaaacaaacaaacaccactgagaagctagttgagaataagtcacaaaatagcagagacaccatcctcccccagcaacataggaagtaggaggtattagcttacgctgaatctcattatattgcgtagactttttctgtgacaaaaatatgactgatgacccactcatacagttccctttacattcttacctaagaggattatgattgaaaaatgtaaaatatagcaaaaaacaggcaaacaaaaccccacttgagaagatttactataataactggggagttcctttttgttttttttggtagagacagggtctccctatgttgcccaggctggtcttgaattcctgggctcaagggaccctcctttctcagcctttcagcatgctggaatttgattaaaaactgacttgtgagctgggcgcggtggctcacacctgtaatcccagcgctttgggaggctgaggcgggcagatcacgaggtcaggagatcgagaccatcctggccaacacggtgaaaccccgtctctactaaaaatacaaaaaattagccgggcatggtggcaggtgcctgtagtcccagctacttgggaggctgaggcaggagaatggcgtgaacccgggaggcggagattgcagtgagctgatattgcgccactgcactccagcctaggcgacagagcaagactccatctcaaaaaaaaaacaactgacttgtgattttttttttttaatatcttaccatcaacttgtagaagcatagtgtagtggaaaattattcaactaaaagtctgatgacctgtgttcctctttcctgggtgacttttggtaagatatattactattctattgttccactctatacaattggaacagccatcaggcccatggctcaggattgttagtcatgtgaaactgctttgagaaccagagtttatgtgtataaggcattcatttttattttaaaatgagaactaaatcaatacctttttacaaacttctttggaagaccctgcccatttttatggcttcagtaacttatattggagttattaactacattagtccttaattaacctccaatattttttggctgtctccatttatctgatacactcttattcagactaaataaaacaggcactccaggaacttaaaacactttattttggttatattataaaaataaaaatattgtttctagcacgaattgatattttctatgattattattctggaaggcaaaatgcctgatcttgagtgtacaagatgtagaagaaataaacttcaatggatgaagaggcagacatgggaaacaaagcaataataaactacactcaggaatgtggcgtgtagagcacagatgggaataacaaggccaatctaaagcagtccggggcagctgggctgccttagggaaaaatgcctcctggaataaaatttgggaacgaggaaacagaaaggtgacttagttccaaaggcaaatttgtttccatgacatttttctcttcccacgtgaccatgcctgccgggtttaggattcacagaattctgcgaaaatacagtcatgcatcacttaatgacaggatatgctctgatagtaaatacaaaagccagtaagacagttagttattatcaagtattcagtagtgtacataattatatgtgctatacttttagatgactggcagcgcggtaggtttgtttacactagcattaccacgaacgtgagtaatgccttgtgttacaacattttgacagctaggatgtcactagatgacagaaatttttcagctccactataatcttaagggaccacatgtggtccctcattgacggaaacatggttatatggagcatgactaatatcttaaatttgtatgaatttaattgaacagactggggccatatcattgtaggtaagacaagatttcccagatgagatgacttaatctcagagaagttatatgatatacagtttcactgaatttcagagatgaataggatcgtagtacctaataggttctaatggatcgaattagatcttaggatcaaatgatcttttttttttttatttttttgagacagagcctcgctgtgtcacccagactggagtgcagtggcgcgatctcggctcactgcaagctccgcctcccgggttcacaccattctcctgcctcagccttccgagtagctgggactacaggtacccgccaccacgcccggctaattttgtttttatatttttagtagagacggggtttcaccgtgttagccaggatggtctcgatctcctgacctcgtgatccgcccgactcggccttccaaagtgctgggattataggcgtgagccacggcgcccggcccaaataccctctttttgaaaaagagtactggggctaagtgaagtaagttgtctgagattacacagccagtaacatgtcaaagtataaaccaatttctgggttatgcttcagcttataaattatcagatgaatttataattgattcaaacttgttacaaccttatgcagagaagcagcaaattgtaactgctttcacaaaattaaaagttactgttttaaaaagtgcttttaaagaaaatatcagaggtagaaaacaattttaagaatcaatcatgtcattttgagtttgcttatatctgaactgataaacaataagtgcagtttataaactattattagcttgcactgaagtcacattttatggctttccacaattaactaagttttacaagtatgaagggtttttttggttttgtttttgagacggagtcttgctctgtcgcccaggctggagcgcagtgacacaatctcggttcaccgtaaccccacctcccaggctcaagcgattctcctgcctcaataacctgagtagctgggactacaggcgcgtgccaccacacccggttagtttttgtatttttagttgagacgaggtttcaccatattgtccaggctggtctcaaactcctgatcgcaagtaatccctccacctcaggctcccaaagtgtagggattacaagcgtgagccaccgcgcctggccgagactctcatttctaatgttcttctcaaaactggtacttcacagcatatcaaagagatctttgctcattcattcaataaaatacgttgatcatgtattatttgcaagccccctgggttatggaacatggggaaaattaagatgtataagatgcaaatactgccctcgagggcaagtgtgataaaggacactgaagtttattggttggcgggcgcccattcttcaaaaaatgcaaaaaatttagccgggtgtggtggtgtgcgcctgtagttctagctacttgggagacggaagcaagatcacctgagccaggggaggtcgaggctgcagtgagccgtgatcacgtcactgcattccagcctgggtgagtcagtccctgtctcagggggcggggagaagcttattatctaccatataccaggtataagattatctattactttctaagaatcatgctttaggaggggagattagacatgtagtaataatactgtgtttggcatatctcgggtccccaataaatagttgttaaacgaatgaacataaaagtatctcaaaataatcgcccttatttcagagacccagagagactgaaaggctccctgaagtagtggtttcccataacacagaactcatttcatgttgggtcgatcatttccgagcttcgtaactaagtgactctgggcaggctgcctaatctgaaaaaggggataatgcctttcacttcagtgttgttatggggttgataatgtatgtgaagttctccccacagaaggcgctcaataaaaagcagcaactattataaaattttattagtagatactcactagccattgatctagtgttttttgtttgtttgtttgttttacaattaactgggctccagttatgtaaaacacctcttgcaaacgcatttaaggactcgtcgagactgagagatcactgcttttatctggtcgggagacaccagcaatcttaatttggaacggtttgatagagcggagtgcgatgaggcggtccaaggttcctaagcaacatagacctgaggggcttgtctccaatgtcctttcacctgtctttcaagtccctctgctgaccgcacaaagactcccgtggccccggcagcagctcggccttctctacatctaaccacgtttactaaatttctacggcacgcagcgcaccgcaccaggagctgggagcggctcgcggtacagacctccttcctcttttacttcgctgcagcgggagaactaagtcctcttacctgaggcactgctgaactggttcgcaagcagtcactctacccccaagactaaaacggtataccccagatcaccacgcaagtgcggataccacagaaatcccaccttcccccgggaccgggagcaaagcccgctgggaaattgacctttcaccccctctcttgccttacctcagctcaccaattttgacgctagcaaatgaagcgacgaagagagctggaaggcgggacttagtgttgcctgatccacgccgattggacaacagcagtgtcgggggacgggccgctcgagcgggctagcaaccccccctcgatgggcggggagaagcgtgggctgcgcttgcgcactgagaggcggccgaaggggccgaggcggctacgcgtgcgcggtgggcggagcgcggctctcctaccttctcgggcagcccagtctttgccatccttgcccagccggtgtggtgcttgtgtgtcacagccttgtagccgggagtcgctgccgagtgggcgctcagttttcgggtcgtcatggctggctacgaatacgtgagcccggagcagctggctggctttgataagtacaaggtaccgcgggccggcggatgcccctctccctgctcccggcctcgcccaggcggctgaggggcccgcgcggcgcggtccgtgtcaccttgtgccgcgtggctccgggcgggctggcgggcgttcctccggaggtcctgcgggtcctggggattgggggtcggggagcgtgggagcatcctaagcccgccgcccgtagtcggcaccccccgggagatttccttttccttaggagagcgctcagtgatcatggagcgagggaattcccttcctattttttttaaacttattattttcgtaagcccccgaaaggatggagttccttctgttgtgtcaatcgccttcattttagtgaagtttccactcgcctgtcatgcatacaacttcggaggaggagatgatcgtttggcagatgaggcccgggaggggagcgacttgccgatgccatcctgctgatgtctccacttctgctcccggcagggacttcctaagcggcagcttgtggcgctagggccaccagatgaaagggaggtgcacaggaaggagctgtggagtggaaagagcgcgggctttcgagcacatacaaacctgattacaaaagtcagatttctttatttcgtcttgggcacgtcattttaaccccgctcagcctctcttttgtgtatgaaactgaaagtaatagcttctgctgtgcaaaatgattagaggaatttgtgaagcgcttggcaacatactaggaccccagtaaataaatgcgggtggttaactttcctccaaatctggttcccatccgcagttcctttaccaatgaatgactctaaccatccagtcgaccaagcctgaaatatgggctttaacccttcatccttgttgttacccgttcatcttcacatcttagcttaaatattgcttcctcaaagaagccctccctacgtgcccctttcccccttaaatgtgcgctctgttcgtttatggaattgctgctttagcgtgtctcgccattagaatataatgcccaactcattagagttttcttgtggaccatcatggcttaagcacagtgctatgtgcatactaggcacccagtaagcatttgtggaatgaatgaataactgaaaaagtcataatggattttgtttaactcgagttaaaaaaaaaaaaagcaagggtccttagaaggtcacatagcatgtttctctgctttcaagccgtattgtgccataccattctgaaccgaggtgatgacttgtcttaacattttaagtggaaagagggtccagagccttcttggtaactcgggccagtgcttttcaactttcattttagaaggctgttaacccagatacctcctgttttgccttaagctctactccccttttgttgtctgttctgcagggtaaatattgacatataaaacattttcttccttactrgggtctgactttctaagtgccaataaaatagctatttcaatgggagcagtgtttataataggaaatctcctttttcttataaagaatcttccctagatttatattttcaactaaataagtgtcttaatttactagaagtttcgtgtaattttctgttctgatctttcccccttttttattatataagttcctgtatctgacagcagatgacttcctatcatcctggaaaacaaaggtcgatttagcaagcgtccaatgttcactaaaatagtttgttgatatcattttagttataatgaggcttccttggggaaaaaaaagcacacatttataacctaaatattcttctattgcaattactcaatactgcatttatattaaaattatgaatccagtggtatccaaaggaaaaatccatgggatcagttttgcttgaacacaaatctcacagatctttttttcttatcgttgcgttccccttatgttgtcttcagatagtaagcgctttataaatgcttattttaaaaagtcttttttccccataaatgggtaaagattgaaaacactcaaaagatattttgtattccctcatgtgatgctttataagagggatgtaaagaagaactgacactacaaaagcagttggtggaaaaattacttttgaagtagtttaatttatcttccctagaggtatatctgagagctacagttggaaacctgacagatatacagaataactgctgaaaggggtgcacacggggagtggaaattaggtttctgaagcaggaaactataagacaattgatttttggtatggaagagcrtgggatggattctgtgttatgtattgacacttgcattcgctattgtgttacttaacgcaattgtattaaacagttagttgactattagttgaatgtctactttctcttttaggacgtgagctttaagagggcaggccctatggctgacttttttttttttttctttaataacatgactgaggtctagcacagtaccatgaacagagtaagtgctaaacaaatattgaaggaatgagaatgtaaaagaatcaaccattttggaagtatggttaaaaaaaaaaaaggagctctatgtctggatattgaaagggtgcttttgtattttaaatgtgaagatatcaggtttaactgccattgttctctgttgcttattaactaaggtaacttcagagaattatactgaaggatttcagccttatttttgcctctacccatcctttgttttggacaggcttttttttttttttttttttttttttttttggagatggaggtttgctcttgttgcccaggctggagtgcaatggcgcgatctcagctcactgaaacctccgcctcctgcgttcaagcgattctcctgtctcagcctcccgagtagctgggattacaggcatgcaccacctcacctggctaactttgtatttttagtagcggtgcatttctccatgttggtcaggctggtctcgaactcccaacctcaggtgatccgccctggcctcccagagtgctgagattacaggcatgagccaccacacttgtctttttttttttttttgagatggagttttgcttttgtcgcccaggctggagtgcagtggcgcgatctcagctcactgcagcctccgcctcccgggttcaagcagttctcctgcctcagcctcctgagtagctgggattacaggcgcctgccaccatgcccggctaatttttgtatttttctttgagacagggtttcacatgttggccaggctggtctcgaactcctgacctcaggtgatccacccacctcggcctcccaaagtgttgggattaaaggcgtgagccaccgtgcccagcccttggacaggtctttatagttgagggatttttccccacttatctaagggtgaaactgcaagttggtttttttttttttttttttgtcctggtttgctcatcatttgggaaggcaaagttttaattgatagtgtagcagctactttgaaattgtatcattttgcctaagggaggaaatattctgtgaaatatcttgtttggttggttcgagaaagttatttgtctgggcacagtggctcatgcctgtaatcccaacacttccggaggctgaggtgggaggatggcttgaggatagaagttgggcaacatagtgagacctcatctccacaaaaaaaaaaaaaaaaaaaaaaaaaaattagccaggcatggtagcacgtgcctatggtcctagctacttgggaggctgaagtgggaggatcagttgagtctggaagttgagctgcagtgagctatgattgtgccactgttttgcagcctgagcaacagagaaagaccctgactcaaaaaaaaaaagtgtgtgtgtataaatatatatatagtttcatgatgaactggtttttgatattatggtaattaattaacttggctctcaacaacaacagcctgattataggaatcatgataattgtgaatttattagtattacaattagaggtggtaaagagagattgtgtttgcatcttaatggtaatactaaagaaccagaatctggcctttaaccttactagttcctgaaaatttcataaaaaattattttcattcttatctttttttagagacagggtcttgctttgtygcccaggctggagtgcagtggtgcgatcatagcttactgcagccttgaattcctcaggtgatcttcctcccttggcctcamaaagtgctgggattataggcaggggccaccgtgcctggccatcatacagtttgattttgtttattcaacaagcatttattgagggtctactcagtgtcaggcatarcatttgggctgcaaaattaagctaagttgaaattcttgtcttcaaataactcagtttggtggcatgtgarcatgtaaatgaacagttataaaaagttaataagtccagttaggcaagtgctggctgctatggaagaggagaggaggcagcttccagggagtgggagctagagttgagaaagccttcaggggatggaggtgaaggcaaagctcagtctagaaagatgaatatgtatatttatattatatagagagaaggagagagagagagatgctgctccatttatgatgggtttctgttcctgatagacctattgtagtcaaaaatacatttaatacacttaacctactgaacatcatagcttagcctagcctaccttaaatgtgctcagaacacttagattaattcgcctgtacttgagcaaaatcatctggcagtgcagtagagaattggttgttcactgtttgtttgtttttttttttttttttttttgagacggagtctcgttttgttgcccaggctggagtgcagaggtacaatctcggctcactgccacctccacctcctgggttcaagcaattctcgtgcctcagcctcccgagtgtctaggattacaggcacgcaccaccacacccggctaatttttgtatttttagtagagacaggtttcgccatgttggccagggtggtcttgaacttcggacctcaggtgatccgcctgccttggcctcccaaagtgctgggattacaggcatgagccactacacctggcctgttcacccttgtgattgcattactgactaggagctgtggctcgctgtgctgcccagaattttgagagaatatcatagcactttctaccgaatgcgtgttgcctttgcaccatcgtaaagttgaaaaattacgagtgaaactgtcataaatcagactgtactaccaggttaagaggggagaaaggcattatggaacaagagagcaatggagtgtaaagtgatgaaggcctcggtattttctgggaaccacaagaagttagataaggtctttagacataatggtggagtggcaggagatgagactggagagggaggtggggtgctgtcagaggggaatgatttgatgtaaaggacttctggatttgatcctgtagatcactgtgtggttcaaggactgttggcatcagaatcacttcgggagggtctttagcaaattcctggctctctttgggagatacagattggatagattgcggttatttccatctttaacaaatacctcaggccaggtgcagtgccttaggccttaattccagcactttgggaggccaaagcaagtggattgcttgagcccagtagtttgagaccagctgggacaatatggtgaaacccagtttcaccaaaaatacaaaaattagccgggtgttatggcgcatacctgtgtcccagctactctggaggctgaggtgggaggattgctgaagcctgggaagtcaaggctgcagtgagctgagatcacgccactgcactctggtctaggtgacagagtgagaccctgtctcagagaagaaaaaaaagccaaatatcttaagtggttcttaggcacattatagtgctataggttttggggagccactgtttaaaattgaaatctagacaggatcacatttcaattttaggaagctcactctggcagcgtgtagaagatggagagagatagaggtgctctggaggccttttaggatgcttctgcataaaactaagttaagaaatgtcaaaggcctgaactaaggggtggggataaaaaggaaggagtggggattctaaagatagacgtcaaaacaggttgacctgcacactgaatttagccaacagttatgtttaatttggcccacacttgctttctttcaaaaattagtatctctagccgggtgcggtggctcacgcctgtaatctcagttactttgggaggccgaggcaggtggatcacgaggtcaggagttcgagaccaccctggccaagatggtgaaaccctgtctctactaaaaatacaaaaattagctgggcatggtggtgtgtgcctgtaatcccaactacttgggaggctgaggcaggagaatcacttgaatctgggaggtggaggttgcagtgagccaagatcgtgccactgcactccagcatgggagacagagcgagacttcatctcaataataataaaaaaaattagtgtctttctcataaaagtccagatttctggattctcttgaaaaaaaaaaaaaaaaaccagaatattggactatactggccctgaacttcctcttgacaagaatcagctgatgctgaatagtgcttgccctctttttatttgctctctaatttgccacttctctaccaatgcatatgctttatgcaggaatgctttgttcagtttacctgctagatccctgtgatccttgatttgaagatacaagattggcagaacatggtgactgactagctggaggtggtgtagagggccacataaaagacggggaggagtctrggatgactcaggttctggtaggatgactgggtggatagaagtggtagtcactgaggcagggttttatgaaacagcatactgttttatatatataattttttaaaaaaatacaatagtgttttgcacaggtcacttctcttggatgggaccacatgaaagtgtggcttatggacttggaattaaaacaaagaaaacttgtaaagaaatctcatttgtgaatgagttgtcctctattagaggacatttctgtaaaaatttcaaagatacgaacacttttccttttagagcctcaatakaacatgagaaattcttgatattttgattttcatttattatgactacaagctgactacaatacaatatgttaattatggcattgcctggatccattacagttaattgaagcataacttatctttaattgtacctttgtcaccttgactagatttggggaactgccctctgttccctgtaagtacattaataaggcttgaaatgtattctagttgtcttagatagtgatttatatatgtctggcagaaagaattatttctgcagttggcagagacaagaargatgggtggaaaactgcagaaggggagagatttagtggtaagaagatggctactacatttttaggtgctatttggaggaaacatcttgaattggatcttttactgccttctgaaataacagttcactgatgatggcttgtttctctaactgctgtagtgcttaaatattaagaaattctttgctaaataagagtttgcctactgcatacgggaaactcggggaaaggtgtgccattcaaagacacccgtgggaaccaaggcacagagactggaaagaccctggtatgttagaagcacaaggaagtggcgggtgtgtaagtgaccaggccgagccttgggagctcagtgagggaaagcattatcatcataaatactgaataacaataataatgatagcaaacatttatatattgtatactctgtgccaggcactgctttaagtgctttatgtgtattatctcatttaatattcacaactgccatctgagaaagaggtactattttccctgtttcaccgagacactgaaaatttaagtaatttgctcagggtcccacagctcgtaagtggtggagctgagatttgaactcaggcaatcagtctggagtccatgttcttcctgctattctgcctctcaaaactaagagtgaaatataaactctgccttgtaggtactggctgtttgtttttgtttttttgttttgtttttgttttttcgagactctcgctctgtcgcccaggctggagtgcagtggtgcgatctcggctcactgcaagytccgcctcctgggttcacgctattctccttcttcagcctcccgattagctgggactacaggcggccgccaccacgcccggctaattttttgttttttttttttagtagagacggggtttcaccgtgttagctaggatggtcttgatctcctgacttcatgattcgcccgccttggccttccaaagtgctgggwttacagatgtgagccaccgcgcctggcggtactggctgtttttgtgtaagatatataaacattagaataaagaccttcaatggcatgcttaattggatgtgtatctaatgtacgcagatggggaaaatgtagtggaaaaaacctgattttgtttactctttccctggtttaaaattattagtaggggcaagcgggcctgaatttactagtcttgcatttagttgagcataaagaccatttcatttatgattagctctatttgagataaaaggcttttgattaaataattagcttttggactaatattacgttaaaaagtttccacataccagctgtgtgatacttagcaggtaacttaatctaaccaggtttcctcatctgtgaaatggagtagtacctaccccataggataattctgaaaactgaatgagttaaaatttataaagtgcctggcacatagtgctgtataagtgctgagtaaataaataaaacttgacatttgtgattccctgcacaaatgaacattggctagcatataatatatccacacttatacacatccctggtggttataccaagagaaactattttcagataggaagtgaagggtggcaacgtaatggacagctggaaagagtaataaggagtctgtctagcttgggtcccccagatagtctttggcttcagatttcttctgaaaagaataattatatgtaatagcacagagacaataaataatttttctcaaatactgcaccctatttaagagtcagcagtggcttccatgtgtttgatatccaaattcctcagcaaagatttcaagttcattcactaaatgacgcctccttttgccatatcttctcatcttgttagagcttacttaaagtctagcaagcaaacctgtttgtcatcatgacttgcttgtatttgtctcattgctctaattctccagtctcctattgccaccctcctctctccgacttgttagatgtaaacgacggtattcactgaaattagatctccttgctcaatgagtcatgttctctgtgggcgtagttcttcaagtctctctctctctctccctttttttttttttgagagagtgtctcgctctgttgcttaggctggagtgcagtggcactatcacggctcactgtagcctcaacctccccaggctcaggtgatcctcccacttcaacctctcaagtagctggactacagtcatacgccaccacacctggctcatttttgtattattttgtaraaatggggtttctctgtgtttcccaggctggtcttgaagctctgggttcaagctatctgcctatctcagcctcccaaagtgctggcattattggcgtgagccaccttgcctgggtgagccagcattcctggcctcaagtcttgtattgattaaaagtacattaaaaaactttttatttctgtcctagggttaattatccttccccctactttttttgtattttaagtttagcgatgttttgttttaattagaaataagatctccctctgttgcccaggctgaagtacagtgacatgtcatagctcattgcagcctcaaactcctgggttcaggtgatcctcccacttcagcctcctgagtagctgggactacaggcgtgtactaccatgcctggttaatagatagtagagcattacttggggcagtggactcagtgtgattactaagttgtccagagctcagtatttagtgcaaagatgtgtcagttcagttttcttattggtacatagaagggatttaaatacatgtataaaggacatacttttaggtccaagaaggtgttttcatagttttccttatgttagagccaatttccttcttaaattaagggggactcatttctaatcttctcaaaaatggacacttcacagcatatttagaaagtattttacaagtcattgtactgctcctagactaaacccataattgtcacttgcctgataaactataatagtttctaactggtctctagtttgtactttacccccttcaagtccattttctacatcatgwtcagaatggtcctcttaaggaccattttttgttcttagaataaaatccaactccctgtggtcctgccaggtgatgtctgcccacctttccagtctcattttatatcacccytctttatgatgctggagctccattggccttccttcagcatttctgatacttctgttggtggtctttgtacatgttattgttctcctgccttgaaggtgtttcttggcatgtattacatccctacctccacacacacacacacgtgagtcatacagtctttcgttttctctctcttttcctttttaggtaaaaattacatataaatactgtaatacattaagatcttaagtgtataatttactgctttattacatgtgtatatacccatgtaaccaccacccagctcaagatacagaattatttctagtgcctcagaaggtccccatcagtccctctcaccaaactactgttaggacttcttttgccataaatcaattctgtttttgaacttcatataagtggratctatgaaagcacattgtctttagccttccactcaytactgtgtctcatacattctttacctgactgccttctcatctaggactcagcttaaatgtcgccttctagaagctgcctctgaccactctgactaggcacacttcctgctccacttgttctcttcttttttgggagctggttaccatctttactagcctcctaaggctgccataaaaattaccacacactgagtggctttaaacaacagaattttaattctctcatagttacggaggctagaagtgtagaaaaacaaggtattggcagagccacacaccctccaaaagctctaggcgagaatccttccttgcctctatttcagcttccagtagctcctggcctgcctgggcctgtggcagcgtaactccaagcttgccctccctcttcatatggccttcttccctgtgtttctgtccccttgtcctcttcttacataatactcggataattccctttgtagtatttatcacaaattgtgtacatgtggttattttttaaggggtgtggggagcagtgtcttgctttgttgctgatatgctttggctgtgcccccacccaaatctcaccttgaattgtagctcccataattcccacgaattgtgggagggacccgttcggrgaaattgaaccatgggggcggtttcctccatactgtttttgtggtagtaaataagtctcatgagatctgatggttttataagaggaaaccccttttgcttggctctcattctctttgcctgtcgccaagtaagacatgcctttcgccttccactatgattgtgaggcctcctcagccacatggaactgtgagtccattaaacctgtttttctttataaattacccagtctcagtggggcgcagtggctcacgcctgcaatyccagcactttgagagcccaagacgggaggatctcttgaggtcaggagttcaagacaagcctggccaacatggtgaaaccccatctctactaaaaatacaaaatttagccaggctatggggtgcacatctgtgaggctgaggcaggagaatcgcttgaacctgggaggcggaggttgcagtgagccgagatcgctgccactgtactccagcctggtgacagagtgagactccgtctcaaaagaagacaaaaacaaaacaaaaaaaaccttttatagcccaggctggtctcaaactcctgggctcaagtgattcccccaccccacctcagcctcccaaggcactgggattacaagcatgagccacaatgcccggtccataatagcagtcttgagggaaatatttagaaggtctacgttgattggcatttttacagagacttaagtgaaagcattattagcatgaccagatttatatgctgagagttttggtaggaatagctatttccttggataaccaagccaggatcagaagaaatctggagagggcagaaatgagttgactttagcaagatgaaatgttaaaactttagatgcagtatcacacctgcattccagtagtcaagctcatattagcatagagaaagatggctttgcagtccacgtgagaaaggcctgagggggttcaggtgactgcagtatgatttagttgtcccgggaattaataatatcttgagcagcataagttatcaaggaagaggggcttatagtcatgttctgcttcctattcatataccacttgaaatgctccttttgccctagaycacatgtttgtgttgatttaacaacaaattggattgtctgaagcaggggttgtcaaactgaagcccccagtctgcctgttttagtgaatacagttttattagaacaccgccagccccatttgcttacatattttctgtgactgctttcctgttccaagtgttatgtatttgttgcaaagaccatatggcctgcaaagcctcaaatatttactatatagacctttacagaaaaagctctccaacccctggtgtattaaactagacctagataacgaaggagactgaaaccatggcaaaaaggagtataggaacagatgatgaaaagatttaggtgtgacagggagcgctgtcttcaaatatttgaaagactgtagtttagaagaaaaattaggcctggtgtagtggtacttgcctgtaatcctagaactttgggaggctgagatgggcagatcacctgaggtcaggggttcaagaccagcctgaccaacatggtgaaaccgcgactctactaaaaatacaaaaattagccaggtgtggtggcgggtgcctgtaatcccaactactcaagaggctgaggcaggagaatcgtttgaacccrggaggcagaggttgcagtgagctgagatcacaccactgcactccagcctgggtgacagagtgagactctgtctcaaaaaaaagaaaaattagactgcttaacttgtagagcaaaatgaaaacacaggatagatgatatagggcaggggaggattttgttagtgtatagaaaaattgttttaactttgaattgggttgcttctggaagtaatgagttggtgagtttttttgtttgttttggttttttggtgatctgaggcctktaaaatgaggcccgatgactgttttacgtcttctcctaaatgagggtcagatatacaatggtgtataaggttaggcatctctgagctctgaggtttttcatggaacgagtctatcaaacccagcctgtggtcctcaagcagttttgagggctctagcttaccctagcctgatagattgtagagccaagcaagtcatgccaggtcttaactggattatctacctggttcaggtttcctggtgtttgccaaaatgtcactccagtggaaaataatacctttaacaaacattaacaaacccaaatctagtctagcacctttaaaagtctgcattttatctttttcatgaacatggaaggttcaagtcattcttcttcttgtgggttcttaagacagtttagagtttgtttattgtgagtggtatgtgaccttgaaaaatactcaggtgtgtaaggcgagagcacagagttttgctgccttctataatctattaatctttcttcctgtttgaactcatcagctgttattgaatgtcaaataattgaaatccaattaggtaaactggcctccttgtgtcaaacttctgatctcctgaagtcgaaatttcatgttaaagcttcagaattttaaaagcggagcttttcaagtcaaaataccattccttaaagacgttcttttagattaaagttaaattatggaaagctgctgaatgaaaatgagcaaacagttgaattaagaacattgcacagttactttgtgcactatattaggtattcatgtgatatcttaaacggttttcttctgatctgaacttacaacttctgtgctttaagatggatggtggacttgaaaggagtgatttttcattttatttgccccgctggctatatttcgtggttctgggtgcagacttttgtgaagtaaaggagtgtagggcyctcctatcttgtcattggcagcctgtaggggttcatattggttcctggtcctcaggtctgaagacttaaattcaggcagtcctgtcagttcagaactctttcattctgcacaggctccaatggagtgatatctattatggaaaggctttgtaaactgtagaccatcctggcyggcacggtggctyacgcctgtaatcccagcactttgggaggccaaggtgggtgggtcacgaggtcaggagatcgagaccatcctggctaacacggtgaaactccgtctctactaaaaatacaaaaaattagctgsgcgyggtggtgggcgcctatagtcctagctactcaggaggctgaagcaggagaatggcatgaacctgggaggcggagcttgcagtgagccaagatcgcgccactgcactccagcctgggagacagagtgagactccgtctcaaaaagtatatgggaggatgtgtgtaggttatagacaaatactgtgccattttatataagggagttgaacatccacagagagtcctggggccaattccccaaagataccgaggggcgactgtatatactattttttcctatacatacacacctgtgataaagtttaggcacagtgagtgattaacaacaacaactaagaataaaacaactataacaatgtactgttattacatttatgtgaatttggtctctctctctcaaaacgtctgtgtgtactgtacttacctattttccgaccctggttggctatggttaaaatgaaaccttggttaagtaggtgactgctgtactaatataagtgggctcctgctgagaggctggatgcagctttagagtttctacctctggccattagaagcaaaccacattgtccatcatcatttcttttttttttttttgagatggagtctcactctgtagtctaggctggagcgcagtggcacaatcttggctcactgcagcctgtgcccccttggttcaaacgattctcctgcctcagcctcccaagtacctgggattacaggcgtatgccaccacacccgactaatttgtttttgtatttttagtagacacggagtttcaccgtgtcagccaggctggtctcgaactcatgacctcaaatgatccrcccgcctcggcctcccaaagtgctggaattataggcgtgagccacgcacctagccagcccatcatcatttcttactactgtctcagatcttttgtccaatttatttcattttagttaggatgggttggagaaatggaagaacctcagacatggagtctgttgaataaacatttggcttattggttgactctttgctaaaagagttgactcttttagcagagtcttgctctgtcgcccaggctggagtaagctccacctcccgggttcacgccattctcctacctcagcctcccgagtagctaggagtacaggcacctgccaccgtgcccggctaattttttgtatttttagtagagacggggtttcaccgtgttagccaggatggtctcgatctcctgacctcgtgatccatcacacttttaagtcttgaaacactgatgtatttcttccatattcataaaacttattcagaaagaaattttgatctttaattatgatttttaaaaatcagatactcaaatgattactacttattttgtatacatactgaacacacatagaaaatataagcaaaggtggccaggtctggtggctcacgcctgtaatcccagcactttgggaggccgaggcaggtgggtcacctgagatcaggagttcaagaccagcctggccaacatggtgaaaccccgtctctactaaaaatacaaaaactagccaggtggtgcacacctctaatcccagctactcgggaggctgaggcaggagaattggttgaactcaggaggcggaggttgcagtgagctgagatcgcgccactgcattcccgcctgggtgacagagcgactctgtctcaaaaaaaagaaaaaaaaaagaaaaactttttcaagcgtgtgactagtataatatgtaaatttcagatggatgaattaggtaatcacccaggtaatactgtgaaccctcaaggagggtttgaactaggctaatattacctagttcaagacttgtctgttaccagttttgtatctcttcttccccatacctagcagtgtgtgtgtgtgtggagtgaataagttatcaacatgacccttaaagttttacatgtttatgtatgtcttttaaaatttcctttacattcttatyaaatagctcagtaactggggaataagctcccttaccgtatgaccctaacctattttgtcttcctgtgcgtgtttatgcaattcagtatcctgctatacagggatctgtcattcctttggtacttaaaacatatgtaattataatagctaatacttacatagtacttactgtaggtcagttctgagcacttcacatatctaatccttatgacaatcccttgaggtaaggactatcatcttcattttacaggtgaagaaactaaggcagagagattaagtaacttgcccaaggtctcacagstagtaagtgtatcgtaatagtatcaaaaggaaacacagattccgctaagttgagagggatgaaggaggttgagaaggtgtgtggttagtgtgtgaatgcatgcagtgtgcattttgctgatcctgcataataagtgaggacatgtaagcaataaaaatttctctactgaaacaccataatgtaaaagctgattgagagtgaaggatgagtcagtgattatcttggcgatttggactctggttgtatgtgccaatgaaacaaccactgtatgattaactctgcgatttgggttgatctttagacttcccctatgataatatctgactgcttgatagtctttgcctcatttatgttgctattccagttttgctactcagattaggacatcataaaaataggtgtattctccaggttatttttgtattattattattattatttttgagactcagtcttgctttgtcgcccaggctggagtgcagtggcacaggcttggctcactgcaacctttgcctcagcytcccaagtagctgggattacaggcgtgtgccaccatggcccagcaaatttttgtatttttagtagagacagggtttcaccacgttggccaggctgatcttgaactcctgacctcaagtaatctgcctgccttgaccttcccgaagtgctaggattataggtgtgagccaccatgcctggcctgtagtatttttgtactattactttctttctccccctttttttttttttttttttggagatgggatctcacyatgttgcccaggctggtctcaaattcctgggctcaagtgatcctcaggcctcagccttttgagtagctgggttatatgcatgcgccactgcrcctggctttactattattttcacctaagaaatgttattctgtctactagtaggcaaggatttactctgaatattttctttcatttcttaacagtacagtgctgtggataccaatccactttctctgtatgtcatgcatccattctggaacactatagtaaaggtaagataattaatatgtatgtactttttgttttagtaagttttaaagattttaacctattttatggagtattataaatgcaactctcagtttcataagatatttagagaaaccacccttccccaatcacaataccccaaatcacataccttttgatttatcttactgttgaagtttataccctgggatttgtcacttttgtaaaatcccttttaaaatttttctaaaatagacttaatgttatgattatagaagtttgctgattacagagttagttaaaaaatagaggatggaagaaagaatgctgatggagattatcgtttacgtgttaatgtctataacttctccatatgatctttcaaatgtatagcttttattatgacttcagtttgcatgttgtagtatacattggacagagattcctctactttaattattttataattattttgcaaaaataggtatttcctacttggctggcgcccaatctgataactttttctggctttctgctggtcgtattcaattttctgctaatggcatactttgatcctgacttttatgcctcaggtaagaatattactttattataaaatttaactgagtagaaaaaaatgaaatgtggatgcttattttctggttttgttaaaatgttcatatttctaaaaaattttgaatattataatggcatcaccttgcctattgaattagatatgttgtctaaaaagcaatgaggttttggcagataaagaataattgggtttacatgaagatggaaaattaagactcaaaactttgcctaaaaatgaatacaaacagggctcagtttacctgtcagctctaggaatatcccttctccttttctagtcatgaaagaaaaatcccctttcttctgaaggacatgtgattgtctttccttcttcccagcatccctacttgacttgaatgactcctagtttcctctgaaaatgatacttagaccttaagtatttattgctaagtctggacccttattgaggaagagaggaaggaggcacttttggagccagtggtcagcctgctcctgccctctgctccaacatcttctctctcactcattttatcttcactctgtttcacacccagcttctgccccaggccaaagaattgggatgacgagggaatagttggagacaagttttgtttttattgttcagtcagttgattgcattgagaggaatagaaagttggagatagatgggcattttttgcattctaagagaattttccaacagtaatacttagaaatgatgtagtcaggagtgttagtgttataattcatctgtgtatgagttcagcagacttttctggactgacctggagaaactgagtaccactgacaacattgttttagtagaaaaatttggagtttcaaacacttaagactttttttttttttttttttttgagacggagtgtcactctgtcgcccaggctggagtacaatgatgccatcttggctcactgaaacctctgcctcccaggttcaagcgattctcctgcctcagcgtcctgagtagctgggactacaggcgtgtacttccatgcccagctaatttttgtatttgtagtagagcagggtttcaccatgttggccaggctggtctcaaactcctgacctcaaatgatccacccgccttggcctcccaaagtgctgggattacaggtgtgagccactgcacctggccaagacttttgatactatagaaattccaaatattgaaagtatacatatgctgaactttactgaaacttttagccatagcttctgtacatgtaataaaatggtaattgaagttggaaatgccaactctgaagcatgagaagatcataaagtacacatgaataaagagtaagattaaattttgttaagcattgtttgggtattgtgggtttttaaaaatttatttatttatttatttatttttgtattttaatcctcaggacaccctaaagaatgtatctttgtaactagaaatactattttctttgacaactctaaataagattatttacttagctattaacagcatcaaacatatgtaaatgttatatatatctccccaaatcatataagttcaaggaccagataaaccatctgttcccaaaatatttggaaaatacaagatgggagagattaaatgatacattcaaggttacactgctggttgattacaaagccaggactagacccyagactttctgattctcagttgttttgtcttaggggaaaaagtgagctctagatatttcagaatgattctgatgcccaaatcattcagttgaggtgatctatctatacccaaatcaaaaggtcttttgtttagctaattaatagtataggaaaggataaggtgaaggctcaatacaagtttgtaatacagtcataaacaagaattagattaaatgcaattaatttctaaattccaaaaatatattatttttcattgtaggcgcatgaaaattatttattttcaagtaaaggtgaacactcagtcttgagttacgataaaagctcaaaataactgcttactgtttgtgacaggctgggatgttgcttttttggttttatcagtttcctggtattatttacgtaattctggattcaaaatatattgtaaagtactttaacttctaatgaacaaatagcgacacttctcactgtcagtatatgctatggtaagaactactgtacttaaactgtattaaaatcttagttgctttccttttcagcaccaggtcacaagcacgtgcctgactgggtttggattgtagtgggcatcctcaacttcgtagcctacacgctaggtaaggaattggtaaatacttactatagttagtgactggtgaatcagcaaggatagccacgtattaaaataacattttctcctgtgcttaattcattttaactagagtttattagtatcctgttcaaattgataaatatgtttttgagtttctttacaaaaaattttgtcattcattgccagggattcacagaataagataagagttggtaaactactacttgtgggccaaatttggtgtgtagcctatttttgttagtagagttttactggcacacatctatgcttattcctttatatattgtctatggctgttttcctgctataaagacacagttgaatagttgcaacaaagactgtatggcctgcaaagcctaaaatatttatcatgcggcctttaaaaaatatttaccaacctctggaataagacatcatttttattaagtttgggaagcaatactgtcatatgtaataattaaaaaatagtatgatagaacacagtgggaaaacaaataaggaagtgatcaattcttttttggtacagggagcggtcagggagtgggcagggaggcctactgtgctagaccatgctgtctgtcctgccaagaatgcttttcattaggattatccacatggcttgtcctgcattcttctctccttccctgctttatttttctccatagcacttaaaaccatgtaacatgttatctatttacttgcctgcttgtttgttatctctcttttctaactaaaacgttaagttttgtgaaagtgagtactgcgttgttcactactgtatccccagtatcgtagacactcggtacatagtttttaaatacatgtaaaatagcagaccctgacttcaagttgcttagatctcttcagataaaagtgacttgttctcataaaaccagcataacctgctacatgattaaatgctgatatggtagatgtcatgctgaccagagctgcaagagtttggagaaggaagaaatcagtgacgtctagaagaattaagggaaagcttagttaaaagctacatatttaggcagaggtttttgcacatttgttattaaagatgagcaggtctttaagtgctgctgaaggatttggttgccaaggactgctgagaggaatagggaaaagttgagagtggctgtgagctctgacttttgacaacacgccgtaagatccttttgatgtaccatctacttgttctaggcccacagttttctggcaaaaaccctggtctgacatgaactatttgttgcaaaccagtcttgaacgaacatgaagcagtttataatctttattctacctagtgtgactattcatgacattttgctgcagaaatactaagatgtttgatcacaggatgctgctctatgtcctactggggagtctctgataatatatgatatatgccctgaattacctttttaagaaaaaaaaattctaaagcatatctggacctcagacttgtggagatggaatgggtgtagtgagaaaatgtataaaacctaattaatacatagttatgaatttagtattgtaataactgtataggagttacattgaaaatgggaaattgttaagccagtaaataatgagaaaagactttctgggaatattttagctacttcagggcaaaaactttcccaaccctgtataacagaaatctgtagtatttggatagggagtttgggattcatcttttcatatagtcttcaacaatatattatgccacagactgatctaggcactggggaatgtactttggtgagcaagattaaccgtaattataggagttaattccttaatctgaattttttcagttagcctaattctaatgcactagttaacaaaactgtttcttttgggggaaaaattgtacagttcagtgagacaggctgtctctaacaggctcttctgtttctgcctgtaaaatgaaggtattctactgtgctttatcctaaactctggctttctcctcattcccttggtaatggtgattctcactctacagtcttagttaagattctcatgtttatatctagccctgatctgtgttctgagttcctaataagtacccttggattgagttccttgacattaccatgtggatatctcactaacatttcaatttcagtatctaaaattgtactctgcatcttgtctgtcactcttgctgcttattctgacttctttttttctattaacactaccactatcttcgttacccagaatagaaactggagattctcttcttgtccttaggccttatccctcatcttttgcggcattttatcatttttatttcctccatctcacctaccaccagtttctcattcctactgcatttcatctcaggcctactaattagtgtccctctctccagcctgtcattcataccgtcaggtgcctcttcctgaagcattgctttcatkcttgtgatttctctattcagatacctttagtaactccccatattccctacaacttttaaactggctcaaacctcctttttgacctttttatatacttcactcttaacatgctagtctctagtcaaactaaggttcttggcattttctgaacatgcattgtgcttttccaccctggtgtgttttgctgatagcattccctcctcttttttttattgatcattcttgggtgtttctcacagagggggatttggcagggtcataggacaatagtggagggaaggtcagcagataaacaagtgaacaaaggtctctggttttcctaggcagaggaccctgyggccttccgcagcgtttgtgtccctgggtacttgagattagggagtggtgatgactcttaatgagcatgctgccttcaagcatctgtttaacaaagcacatcttgcaccgcccttaatccatttaactctgagtggacacagcacatgtttcagagagcacagggttgggggtaaggtcacagatcaacaggatcccaaggcagaagaatttttctaagtacagaacaaaatgaaaagtctcccatgtctacctctttctacacagacacggcaaccatccgatttctcaatcttttccccacctttcccccctttctattccacaaagccgccattgtcatcctggcccgttctcaatgagctgttgggcacacctcccagacggggtggtggccgggcagaggggctcctcacttcccagtaggggcggctgggcagaggcacccctcacctcccggacggggcggctggctgggcggggggctgacccccccacctccctcccagacggggcggctggccgggcagaggggctcctcacgtcccagtaggggccaccgggcagaggcgcccctcacctcccggacggggcggctggctgggcgggggctgacccccccacctccctcccagacggggcggctggccgggcagaggggctcctcacgtcccagtaggggccaccgggcagaggcgcccctcacctcccggacggggcggctggccgggcggggggctgacccccccacctccctcccggacggggcggctggccgggcagaggggctcctcacctcccggacggggcggctggccgggcggggggctgacacccccacctccctcccggacggggcggctggccaggcggggggctgacacccccacctccctcccggacggggcggctggccgggcggggggctgacccccccacctccctcccggatggggcggctggccgggcggggggctgacccccccacctccctcccggacaggcggctggccaggcagaggggctcctcacttcccagtagggcggccgggcagaggcgccctcacctcccggacgggcggctggcgggccaggggctgacccccccacctccctcccggacgggcggctggctggcggggggctgaccctcccacctccctcccggacggggtggctgccgggcggagatgctcctcacttcccagacggggtggctgccaggcggagaggctcctcacttctcagacggggtggccgggcagagacgctcctcacctcccagacggggtggcggccgggcagaggcgctcctcacatcccagacggggcggcggggcagaggcgctccccacatcccagacgatgggcagccgggcagagacgctcctcacttcctagatgtgatggcggccgggaagaggcgctcctcacttcccagatggggtggcggccgggcagaggctgcaatcttggcactttgggaggccaaggcaggcggctgggaggtggaggttgtagcgagccgagatcacgccactgcactccagcctgggcgccattgagcactgagtgaaccagactccgtctgcaatcccggcacctcgggaggccgaggctggcggatcactcgcggttaggagctggagaccagcccggccaacacagcgaaaccccgtctccaccaaaaaaatacgaaaaccagtcaggcgtggcggcgtgcgcctgcaattgcaggcactccgcaggctgaggcaggagaatcaggcagggagattgcagtgagccgagatggcagcagtatagtccagcttcggctcggcatgagagggagaccatggggagagggaaaccatggggagagggagaccatggggagagggagagggagagggagagggagcgcattccctcctcttgaaatgacatacttctttatctcttatcagctgaaatccaactcattctttatgtcctctactcagatttcacttgcctgaaaagccattctagattatcttagcctaaagagaacctttcccttatctgtactcttttatggtttgtgatataccatacctttattatcatgttttgttcctttctctttttaatttttgagacagagtttcgctcttgttgcccaggctggagtgcaatggtgtgatctcagctcactgcaacctccgcctcctgggttcaagcgattctcctgcctcagcctcccgagtagctgggattacaggtgtgcaccrtccccggctaagtttttgtatttttagtagagacagggtttggccatgttggccaggctggtcttggactcctaacctcaggggatcctcctgccttggcctccgaaagtgctgggatcataggcgtgagccaccacacccggcctgttcctttctcaattgtaaattctctgagggcacagtttattctaagattcttccaatccttatagcaccaagaatagtgcattagtttcagtaaattcaattcttatatttgctgaatatccactgtgtgcattttctgaaagcatttaaaattatggaggcagtaggtctataaagaagtgattatgatttcaaacaggatagaatagatgttgtgactgaagtacttttggatcctagagcaaggaggggtgagataagttgtgatgaattactatggcatgttcgctggaagcttgagaatttgtagctagtgaaacaacccaattgttccatagatttggaggtattcagactccaactaaaatgctactttctcagatctaaaattgacaccattcagtgtaatatgacattttgatttttagattaaactttgaagaattatatattttatttctgaaatctttgttttttgtttaaaattttttttagaggcaggatctcgctctgttgcccagactggaatgcagtggcatgatcatagctcactgcaggttcaaactcctgggctcaaacaatcttcccacctcagcctcctgagtagcaggaactacaggtgcgcaccaccatgcgtggctaatttttaaattttttgtaaagacagagttttgctatgttgcccaggctggtctcaaacttgtgggctcaagtgatcctcctgccttggcctcccaaagtgtggggattacaggtgtgagacactgtgcctggccctaaactctttgaagtgtagaattaaataattagatttttatagtaccagctgatagctatacttaacattcctgtgataagctgatttgttttgttttttcctccagtttattaaagaagactttctccatcctggtgcatacgttgaacttttcctgtggtttgtttttgttgcagatggtgtggacggaaagcaagctcgcagaaccaattctagcactcccttaggggagctttttgatcatggcctggatagttggtcatgtgtttactttgttgtgactgtttattccatctttggaagaggatcaactggtgtcagtgtttttgttctttatctcctgctatgggtagttttgttttctttcatcctgtcccactgggaaaagtataacacagggattcttttcctgccatggggatatgacattagccaggtggtaagtatgtgttctaccttaaattttcagtattaccatgatacttttggaaagcttttgtcattgcttatttattgctcttaggcttttttgattagaattgatatgtacttaaaaattttttatttttatttatggaaaatttcaaaaatagaatagtatagtgaatagtaaagtagagagaatatttaggaaaaagtagagagaatagaccctaatgtacccattgctgaggctgaggcctcccgagtagctgagattacaggtgcccactatcacgcctggctaatttttatatttttagtagagacagggtttcactatgttggctgggctggtctctaactcctgacctcaagtgatcttcctgccttggcttcccgaagtgttaggattacaggcatgagccaccgtgcttgacccttctcaattattttaaaggaaatttctgatattatatgataaatacttcgctatatatctctaaatgataaaagcttcctttaaaaaaacaatcacaatgccagtattacaccaaaaatttaaccatttcttaatgttattgcatgttcatttgaactcttgattttggaaagaaagatatgcacatataattgaatggttggctttttgtgttcattgccaccttttcagtgtgtagagagatttcttttttcttactttaatggccttgctattaactctccctgccttgaatcccagctttttgtgttgccattttgcccatttgcacctaagtctccagtaaagaaatcagaagttggagtgtttgttgaagtggttgggtgggtaaatttggatcatcttacaacttaaccaatttatgagttgctgttaaagtgctccaaatgatggccagttgcttgcattgtctacaagttagttattttatagcattgttggctaaaagattgtatttttttttttttttttttgagacagaatttcgctattgttgcccaggctggagtgcaatggtgtgatctcggctcaccgcaacctctgcctcctgggttcaggcgattcttccgcctcagcctcccaagtagctgggattacaggcatgcgccaccacgcctggctaattttgtatttttartagagatggggtttctccatgttggtcaggctggtctggaactcctgacacctcaggtgatctgcccgtcttggcctcccagagtgctgggattacaggcatgagcccccacgtccagccaaaagattgtatttttaaaggtaagaagacttgccacataccaaatataagcatacttcttgcctttactaaaactgtttgacttgacttaatgctgcataaagcatggtgactcctgatctttctagcgttaatgcttctgtatgcttttgtctgcattttccttccagactatttcttttgtctacatagtgactgcagttgtgggagttgaggcctggtatgaacctttcctgtttaatttcttatatagagacctattcactgcaatgattattggtaagaagctccatgttgaagcctgttttaaccatcactttgttatcaaaagagccggtatttgactataacaagcaacaacaccctttgcctcacaaaacctccaggaagcagaacaaccctacaaccttgtaggatttcagcctaaccattaagaaaaataaggtttccctgtttttggggtttttttgttcagcatcagctatttctaatcagagggaaataccaaaatagatcacataagcctgataaagtgactattcaaattaacctaggctgtattggagggtccacatttggtacaggttttatatttatctcaaagttgaaaattactagtttgtatgaaatacaggacagatgaaatgtagagattattttataatgtatccactcaaaaaattaagcttctattcctctcagatatcctctttcttaacccactgattgctaaagattttttatggtggtaatctttctgttttgattttagctgaaggggatatctgtaggatgattgactgagtggagagggtattagtggtatggaacgagtgtaaagagaaatctagatggttatttaggggccccaggagtggcactgagaacctttgtagaagtaaaaaggtatatgtgtgggctatgtcctgtattctgttctcttatctaaaaaataggccacacacagtggctcatgcctgtaatcccagcactttgggaggccaaagtgggagaatctcttgagcccaggggtttgagaccagcttgggcaacatagtgaaaccctgtctctagaaaaaactaaagttaatcaggtgtggtgcgtgcacctgtaatgctagctacctgagaggctgaggtcagaggattaccggagcccagtgagctatgatcgcatgtgccactgcactccagcctgggtgacagagcgagaccctgtctcaaaaaaaaaaaaaaaaaagaataaataaaaaataaccctttcccatttggtgaaccttggtaatggaatgggaattaggtaaggcttagaaactgtttagaagatggtatattaggcactggctttcagaaaaggagtggtttgggcttttttctgtagctctagactgtgcatattttaggaactatcttgaaatctatcaaatgttcatttttgatacctgtataaactgttttttctttacctcaaaaatgctatttttcttctccaattatgtagtgacccttttgattgtcccatggcaggtttcctgcatgttacatttaagtgttaaatttagataagacagaatcctctggtatatgagacatattttttaatgttaagtgtgtactctaataggcacataattttctttataatgtttctacttttatataataaacccctgtgtactattacccagtctcaactattttcaataccagtgccaatcttgtttgaaatgcaccagtactctttagccccctgcttagcccccgggttgtgttataatatacagtttatttacttactgacatatttgccttatatttgacctaccatgtggtgttctttcccagaagtttgaaggacttcctttaggtttttttatagtgcaggtctggtagcagtttattctctctttttacttacgtgaaagtgtattgattttgcctgaattttttcttttggcattttgaatatatcattttaatgtcttttgacatccattgtttctgagtcagctcatatatcattgtcactctgtaatgtattatttttctcttgttgctttcaaggttctctttttatctttggctttcggaagtttgactrtgatgtacctaggtgtggttttctttgtgtttgtctttcttggtatttgttgagctgttgactctgttggacctgtaagtatttttgactgaatgtgtgaagttttcagtcacagtttcacttcttgagatattttttcttcccctctctcttcttttctgggaccccacttacatgtgtgttacacaggtttgcctgatactgtcctaaaagtaattttctatggctttattaagttttctttaatctctttattctttgtagtggataacttttattcatctgtctttaaattcattgctttttttttcttctgccatctccaatatgctgttgagcccatctaggaagtctttcatttaagttattgtacttttccctgggtgcrgtggctcacacctgtagtcccagcactttgagaggctgaggtgggaggattgcttgaggccaggaagtcaagaccagcctgggtaacatagtgggatcacgtctctacaaaaaaatagaaaaattaagccaaatatggtggtgcatgcctgtagtcccagttacttgggaggctgaggcaggaggatcacttgagcccaggaagtcgaggctgcagtgagctgtaattgtgccactgtactccagcctgggcaacagagtcagaccctgtctcaaaaaaaaaaaagttattgtacttttcagctgtagaatttccatttggtttttaaactttctatttctctgttgagattcttctgttcattattatcatcatattttcctttagttctttgaacatatttaaaattgctgctttaaagtctgtctactgagtccaacatctgggcccacttaagagtcattttctgttgactgcttttttttctatttctttgcatacctagcaattttttttttgttgttgttgaaaactggatattatagattatatttgtggagactataatctgttctgctctgaggatttttggttttttgttctgataggcatttaacttgtttggacacagatgaagaaatttgtcccatcacattgtattaagtagctcttgtctctgtttggttattttcagcttttagctgctgcttttttagccaggtctcttgggggtctcctttgtgtctgtgtagtttagtggtcagccaaagatttgggcaaagtcgatactgagattttggcgctcacctctctatgatttttttgcttttggggtttccccatctgaatcttcggctgctcttccagcaattgtgttctgcccccaaccctcaagccagtaagggctctgccttcttcagcccagtctgartgtgggttgggaacacacttagtaagagatacagcagactcacatctcaccaagaacacctctgtctttyaagcacagcatctcctctactttctgccttctctttcactatgttctgtggggtctccgatttgcttgcttagtttagcatccacccaggaatctgggcagagcatatactcagatttagaatctcaacccttctgcatctctctcttctacaatatcccccaccctgctttctagttcctctgctgctctgaatctattatctgcttccataagctggtaaggaagactgtggctttccatcatctggtctgggacagrgggtaggcaagccacgaactcagagttgttccccagtgtttcaagtgtaaatgcttctcgaatttctgtctgtccttcagtattttctagtaccttcaagtagttgttttaaatatttttgtctggtttttaatcatcatttgtgagaagaattgtcctccctttttatgccatcattaacagatgccttccttcctttagattattttaaagcaaatcccagatatcatttcttttcatccgtaaatatttcactgtgtatctctaaatgataaggttttctgtaaaagaaccacaattgatgtatttctatagctgccgagtacctatacattgcctttggttggtatgccttttaaatttctgttaatctggctgggtgctgtggctcacacctataataccagaactttaggaggccaagacaggctgatcatctgagggcaggagtttgagaccagcctggccaatgtggtctctactaaaaatacaaaattagccgggtgtggtggcgtatgcctgtaatcccagctactcgggaggctgaggcaggagaatcgcttgaacctgggaggtggaggttgcagtgagtcaagattgcaccattgccagcctgggtgagaagagcgcaactctgtctctaaaataaataactaattaaaaaatttcttttaatctacgtagcttttccctattttttctttgaagtttatgtattgaagaaagtaggtcatttggccaatagaattcttagattctgcgttttcctggttgyggtctcatggcattaacatgttcctctgcccctcwcttttcctataaacaatagttagatctgtgagcttattttgatacaggtttaattttgggggttggggggcatgctggggaacagtgttattaggtactggtcttcctattgcatcacattaggaggcatgtagcgggttcaggttttgtatgtctgttccatctgctgcaagtatatatatatatatattttaacctgctaccttaaactattaagggttaaacttcacctaataatattaacagacattgattaacatggcttaggaattcattcattcagtggataggtaaggaaatcaagtttttatgataaaatacttcataaatacatactgataattccaaagcaaatttggtagtacagaatttttacttaacctcattgatcttatatttttatctcctttaaactatgacaaaatccttggttttaagtgacacagaatactcatttgctttattccatgaactattcacaacagtctccgaatacagtacctaaatcagcaaacagaggaaaactgaaaattaagattttgtttttttgcagttttattcatccttacgtcttatcccactaggtgtgtcccgtcagtttactgtattttaaagtcaccactctgtggttatgccaccagttgtggatttatacatctaggtttatttgttttactttaagaattactttctcttttaaaattcatttttcctttataattatgtaaaatatttgtgataaagtcaaatttacagaatgaggtatattcaaagaagtctagcttctgttgttacccaatcctttctttcctcagaggtaaccattcttagtttttaattttatggcttatcttttcattgtttctttcttactataagtaaatatttgtgtttcattttatcactcactttcatagatacatggtagcattccattctatatgtactgtactatgtactgtgccttttttcctcccccctcttaattgtatatcccagcgatcactccacagtggtctataaggagcctcctcagtcctcttacagctgcctggcacttcattgtgtggatgtaccgtagtgtgtccaaccatccccctatcaatagacatttgggttagttccagtttttgctgttgtacaaattgctgcagtgaatagtcttgtacatcagtcttttcatattttttgccagggtgttgaggaagaggtccctagaagtagaattgctagtagaggacaaatgtgtgctgttttgcttaaaattaccatattcccctacatatgggttgtgtgattttctgttcctaccagcagtgtatgaaagtgcttgttaatttacagttttaccaacatagtatattgtcaaacgtttgactttttgccaatctgataggtaagaaatgatgtgtctgtacagttttaatttgcctttctcttactatgaatgagcttttctagtgtttaagagccgtttgtatgtccttttctgcatattttacatctctcaaacagatttttttttctatagggttgttggccatttcctttatttttagaagctattcatatattaggtatattaatcctttgatatagattatagttttccccattattgtttctctttttaacttttcttaaggtactttttgtcttggtggttttaactgaagtgtacctacttaataaataaactggaaatgtgaggaatgaaaatattttttatgaccatgctatccttggattgtatctccttcagtttggtctttttttttttttttttttttttttttttttacaaattctactccaatttttctctagctgttaagtttcctatattatgaagtctgggccttcacttgtgcaagatgaaaagcgggtctacatatatatggtctctatcactgttctctacttgaaacatagagcttcatagataagtatttaacaattaagtactcgtttcagaaagtacattaagtactataaagaagaaacagaagatgcagcgtttctctttggcagcctgtatagagctccggctttctacatgctcactatacttgagatagttatttcaagatttttaaaactaaaattactcttggtggcaaatcttttgctagtttgtctcagcctatttccaacacctcagagctacaagtaattctgcattaattcatttagccttggctcccctttggtgcttcccagcttgacgtggagtaagctgctaaaaatttctgagaacactgaggacctcaggtggtcttctccttcctttccctctaagttcgtctaatttggggaactttgttctacttgggcttggaagtagcagagtaattctttttagagataagatttctgttgggttctagtcttctgttttaagccagatgtcttaggaattgtttagaaggaatgttttctgcctttaatctttaaggccatagctgcattgaccctcaaaccaagtagagtcaccaggtgtctggaagagacaaactggggctaatatgttgcatgacaatggaacatccaaatgaagtgcccagcagcttgccagatatattgatttggagtttgagagagaaaataattaggaacttatatcactatagatcataggatcmaagaattttaaagatgtaagggacactagaaaatagttcaacccatccccattgtacaactggaatctgaagttcagattattagagtttgtccaagagtccataattagatattgcagtcatctgttgtaagcttgtagttgtgctttaagagggattctgagagagagagagtataagtacggtggggcacccaggtagtaatatgcaggaagtagaattggcaacaaaggacacagaatgaaatggtgagatggctagcggaaacatagggagaatggcatcacaaaggcaaagggaggaaagaatttcagtttagtggatagtcaaccaaggcatttcacttagcagtcaggaatgaaaaaacgatactgaatttgaacattaggaaagcttggtaaatttcaagagtataatttctgcaaagttggaacacagtgaataaaaaagtgctaagaaattgaggacaattgaaaagtttagcaaatgataagacaaagcagaagaagatagtagatagtgaggacagcagaatcaataggagggtttcttgggaaggccatctttgttttaaagtttatggggagagaaccagtgtgcgaatggaagtagctagggggagaaactgaaaatgctaggaagactgggtgtggtggctcatgcttgtagtctcagctgctcagaagcctgacgtaggagaattgcttgacccagtagttcgtgaccagcctggaatatagccagaccctgtttccataaaaaaaaaaaagctaggaaggtaaaaaataaatgtgaagcaacaggattccccctttgagtagctcatgcttactgtgcagtttcagtaccccatactgttctaggtatcttaacatgtcataactcattcacttctcaaagctctgtggggttggtacaactattatctctattttataaataaggaaactgaggcagtaaaacaccaatttgcctgaagtcccgtaatcagttcatggtacaactgaaattgaggcccagctggctttttgagtctgccctctgaatcaccaaattgtactgccactcttcctgttgtaaatgttgtttataaatgtatttaattttattacacaagtaaacttgaacctgaaatttttggggtctaaaaaaatttgttttgcatgattcagtggtaatgtaataattgctcttgaataagcataataattgaataaytattccctttaggttgtgcattatgtgtgactcttccaatgagtttattaaactttttcaggtaagtattttattttttaaatgggcaagaaatatgaaaagttttagcagttgttagctgaacttagggatctattttccttttggagtcaggacattttgaaaaggtcacaaaacctatattttaaatctwtaatggggtaggatagtttagggtgtcgatggtggctaatgtagtcatttcaaacacagcacaaaactactagttcttttgttacggttttggactcatcaaatagtcttctaatgargccaggcgcggtggctcacacctgtaatcccaacactttgggaggccgaggtgggcggatcacgaggtcaggttcgagaccagcctgaccaacatggtgaaacccgtctctactaaaaataaaaaaattagctgtgtgtggtggcacatgcctgtaatgctagctactcaggaggctgaggcaggagaattgcttgaacctgggaggcggaggttgcagtgagtcgagatcgcgccactgcactccagccttggcaacagagcgagactctgtctcaaaaaaaaaaaattttagcaagatcataaaaattctgaatgtgtgtagtttaggaccaaactggacctgtgctgacttttcttaaatagcccttatatagaagttcctgtctgggttgcggggagaagggagatgctcaggtggagtttcatttctctgatctatgtgcttctccacttttgctcagccacactgaatttgcctattgtgtcctgaatatattttgctctttcccttcttagtaattttactcccactgcttcctttgctcctttttcttctggttgaaacattttcttacacttcccacttcatcctttagctctcaaatctgcgtagcagaatcttatttatgttaaaccaagcgctattaatcttcttcatttatttgagctggcagttatttatagaagccatacagtttaaagctctgaaggatgtagagattatttctctacattttcttctcattttataacaacgaggctctcattgggcaacatattgcccgaggtcgtgtgatcaatggcggaagcaggactggaatttggagctctgttcagctgagcaggcgtgtattgtataacctcctgtgtgcttagagacactgagatgtggtatgccagtcgcacctcagagtctttcattgtgagctgtcttactctaagttctctatcactttgtgtcaaagccgcactttgaggtactcttctagtattttatgttcatcttatttaccccattagaatatctcatagaacaaagtccagattttattcatctttatattcttagcacagcagttgatagtttggtttaaagagaaaaaaatgggattagaggtcagaagatttcagtcctaatcctggccctgccacttggtaccaagttttgtaaatttaaattctcttatcctcacttagcctgtctgtaaaatgggattaatgatgttggttctgtctatgccacaagattattgtgagtataaaataagtgtataaataaggaaactataaactacagtacaagtactgtacaatttatatgtaataatgttctttatattacttgatttttttttccagaagctataaaaataacaccttgaaactcaattcagtctatgaagctatggttcccttattttctccatgcttgctgttcattttgtctacagcgtggatcctttggtcaccttcagatattttagagctacatcctagagtattctactttatggttggaacagcytttgccaacagtacagtaagatttttttcttttaaaaatcataatatatattaggattgtatgacagaatttgataatttgaaaaatctttaatattagaataaacagattttaacttaaagatttttatttcagaaatttgaaagaatagtaacctcaaagactgaaatgctgaaaattattttattttgccctttgaaaccaataggattggagactacagtagtattttggaactatggcacacttaaattttttattttggttgcccgctgaagaattcatggaaaaaatttatagattccctttasactctaaatatattaccagtatggctaaaatagctgcagacttaaatgattattctaggaagcttggaagagatttttgagaaagagaaaacacacactttaaaaatcagctgattttaagattaagaacgtggaatttaaaactttgtaataaatagaacatattcttataaattcctttccatgctggactgtgcaagagagcagacaggaagcagagatcaggagttgagaaaagactctgatagtcctgaaagccagaaggtctgtgttctagctcaggctgggtccttagaagtttttattttgtaacttagctactcatcttatgtttccatgtttgtaacrtgtgtaatatctcaagtcttgctgattttatagggtttaaatatctaaaaacactaatgcattgtataaaaagtgtctctgaaagaattaaattatattcaagtaaggtcttcaaaaataaaggagccaaagaggttttgagatactaattatggcaatgggactgaattggagatagcacttcttcatcattgccataaagaaacttaattgtgtgggggtgtgggaggctattttgatttttttttttaacatatcgtagaatcttaaaattgagagaaatttcttttattcaaactgttgcccagtgggagaatgccttctatagcatccttattcagttatcttccagcctcttctgacacacactctgaggttacatgggtttttgggcagggccaggggtccagttgggcccctaagcattgagaacttctgaacttagataatgtaagtgtgttggttcaggtacttgaatgcttttcaaatgttggaaagactagttttggaagtgctttgctaatgaaatttttctttttttctctcttatttttttaaattgacgtccagtgtcagctgattgtttgccaaatgagtagtacccggtgtccaactttgaattggttgctggttcctctcttcttggttgtcttagtggtaaacctaggagtagcctcttacgttgagagcattctcctgtatacattaacaactgcttttactctggcccacatccattatggagtacgagtggtgagtaatctacagcaaaatgggttcaatttggggcttataaatggcaccaataaatgcctccragtagaaaggaggcaatggaaaattttaaaaagaaagttgcttattatagtagctgtaagggttttgggatattctctaaattttggataatatccagatgtttaatttcagatattgtttctctaatgagtatgttactgtaataacaaatgattttaaagctggataattattgtgaggaattagttattactgtaagtgggtatgtataagccatcttcttggtgagtagaattgtaaactgagcctttagttatatgggatcagataatcacatttgttaattatctatttcttcacttgcttctttagctttaggggcatttttattgttcattaacaaaatttggaaagaaatgtaattggttgtgtagtgctttttccctcccactgcccagtttgctaagcagttgtggtgagggagattagaatttctgactgaaggaagactttggcattatttgaggttttacttcatttatgttattctcgagccctcatcagcaaaattgataaataaggggaaatatagaagaaaagggattttgagaaatgttttgtaaacttgatattttcttctaaaataaactaattttaggagaatggacgaatatagatataatgaaatcaaatggaaccatgtggtttttctttcactttaacattcttttctaattattttacatttttaacataggctgtgcaatattccaccaaggagattacttaataatgaccttgcacagtacagttattttaatcatttaggttgtttccagattttcaccattataaatattgccctaggctgggtgtggtggctcatgcctgtaatcctagccctttgagaggctgaggcgggtggatcgctttagctcaggagttcgagaccaccctgggtaacagtgtgaaaccctgtctctacaaaaaatacaaaaaaaaaattagccagatgtggtggtacaggcctgtagtcctagctacttggagggctgaggtgggaggatcgctggagcccaggaggtcggggctacagtgagctgagatggtgccactgtgctccagcctgagtgacaaagtgagaccctgtctcaaaaaaaaaaaaaaaaaagaaaaagaaagaaaaaaaatgttggcataaacaatctcgaatatttttgtttcatttgttttattttccgaggataatttcataggaatggggttgtgacagggtattcacatttttatgactcttaaaacacttctatttggtatgcttgtttgaaaggaaccctgctgttaatccgtttgagaaacaaaatatcttctgtattttcacacacagtttttaagtgggagaggcagctatcatgcttgataacaactttataccttgcatatgttgctaaacttgggctttcttcccttagtgtttctctacaaagttgccctcatttgttagaacaaactagatacaattgttaaggagaaaaaagctgtgatgaattgtgatataagacataattatttttgtttttatttgtacaaatgtaaccttatataccttatatcaatactcttsggcctttatcctgatatttcatcaatatatgcatggcatagaatatccatttgccagtgtcttttttaattgttttcatttactatagccttttagaagcatatctttagaaagctacatacataccaaaccaaaccaaaatatacttttctttaaatgataaaggtactacattttcattgttaaaaacctggaaaataaataacacgctaactggaaaacaatttaggatcatcttttttatctgtctttgtgttcttttaccacatctacaacttctggccagaagttaaaacttgctaggccacacaaaacattcacttgaactgctgaaatgtaaataataagtatcaagtaaatgacatgcactcgctgacctataactaagctcttgccttcccactagagataccctaactaataaggcctctccaaattcatagatctagttttgtactatttcatcgggattaggaatgattacttagaaatgtttagcaagctgaatatagagtctaactataaatatgattacttgatctagatgctacaggtcaactaatcctatagtttttcagatttggatgtgaatttgagtgctctggagggttctcaagactagattttagttcyaagtcctaactttcccatgttagttctagtacttccatttagctgtctagttctatagctatcctaatccagaaaaaccttttcagtatttctcatgatttttgccgtgtcaataaattgttatctctagggggtaaattctgtgtgcttttaaaaaacaataaggtacatatttgtcactgtctcatgttctgatttttcataggtaaagcagctgagcagccattttcagatttaccccttctcattraggaaaccaaactcagattgactaggaatggaagaaaagaatattggcctgtaataatctttctttgggcacaaagaagtactgtaaataaatgcttgtaaatatttcctccatcaccattgaactagactgatctgcttgacagacgtgggatctcagtatggtacttggacagcaggaatgatacatataatctgaacttgggaaattttggacctactaactctaagcctattttattttttataaaactatgtgacattttggttgagcagaatgtacgttagaccagcaaaatgttcctaatggttctaacttcgtgagtttacaatgttgtgattcatgcagggttaaagatgctttgtttttattttttaagtaccaaaattggtttcagaacactgataacactcagaaaaccacagtgtgttttcatatttggaactttgtaatagcgggagtagcagtagtccaaacctagtatagggaaaggataaaaataagtcaccttcaccaagagatgccaatgattaccaaacaacagacagttgccaaatactggtttctctttcccctgaaaatggcttttgttctcaaatgataagagagctaatacatttagctaatattctagctctctttattatggaacagatcttgatagatggtttaattttctcctaaagagaaataatcagttgagaatttgagaatgggttgtaattatcgctcacccattgggatggttcattgtttaaatatggcattttccccccttcagctgcaggttcctgagatttggtgcctgtgagctctgattgtaggaatgcatgtgacagtcccagtcctatggtaatgacttaggaggaatgcagataaaagtaccttgtaagataaatataaattggagttaggaatttcatgaacctcactatgaccaaaattaattttttgattcagtttgtctgtctgtctgtccttcccctctcttcttttttcagggtgaggtgctgtgtttcttatttcatacgagataaaacagagagaagttctctcttctccagcttgtccatttccccacttgaagaaaacttttgatatatatgccttactgagtacatgccccctttaatgttaayatgacttggagtaatttctgaggtttactgacaaacataaaaatccctttaattgtagtgtagttgttctataaaccatattttttcatgatgtggatattttcttctatttctttgtcttcatttaatttggtggtggtgaactttacttgctgattttcttttatttttcactgaatgaagtttgtgcttgaatgaagagtgtatcttaaaccccctttttttggacaggctgcacttggataaaataggcaccactgtgttgatatgtarttaaattcataactatttatgaatgtgaccattgttaaatttaattatagtgtatttctttcttgaatttcagtctgctgctttgtaaaaaataactgtaattgatatttcatttttaaaatttataaattccaatcattgtcattcaagttattagaaatgagtcacggcactaactcatggttctatactcattttaagaaattgtaaaggttgaggtgtatttggtgactttctctgagacacagatgaacgttggaaatagatgagaaatggatgcagaataatgcagatagtgatcccatgtttgttaattgccatcatggaagtcagagaattaaccaattaagtgacggtaactattttttgtataccttgttctttgtgatctataaaattaaactggataaaatgttaattgggggtagggaaaaagctttgttttaagatttctaagctaattattttaccgttttgttgaccttgtacacaagaatgagattaatctgtattatataagaaaagaactgataaatatttataaaatgacaaacttggaccacaggctttcttgaccttgtacagtatagtaaaaataccctttacttctgacattaaggtcacgtcctatagtttgggggctcttttacttcaaaggtgtgtttctgccctcttttggttgtatcaaatttatttgaaaattgttttgtgctgtactttatgacttgtttccctatggtggtaaagaatgatgccatagtcagttttattgacattgttagatgaaagaaaagtagctgtcaacaaggggaaagtgaaattgagcaattcactgtttcaggatacttgaggatctttagtgtactgctgactctttttcttgttttgtctgccattcttgaaagtgcatcttgagagcccccatttgttgtgtagagatatagcagctgaagcaggacttcattccagatagctgtgtgcatttatgtcatgccaattactataacatttccaaagtatgaaaggtctttcaggcttatgcatgatattgtgggtgacttcatgccccagcctttctccccagcatacagtgagctgccttttggggagcaatgccatgataaggagcatacgtgcatgttttccgtactttcagaatagagtgccttagctaggccagaggctcgtattgtgtttctgctgaccaaagttgcatacacctgtaagaagtgtctttttaggttatggtattaaaaaagtcgtttcaggcttatcagataataattctcctatatttgaggggggcatgggataaaaagatttaataatacctggatagagaatgctaatgctgccttttgtgatcctttaatattatccatgcttttataaagtgcagtacacattttgacattgccacagtttacagtgtcattcttccacgaataggtaattgatagagtttatgggtcttagtcttaagggtaacagagtgaataccttccaaataaaaagctaaatattcctccttgtcattttaatgtcattattgaaatacttttaattctaattttcaaaagaaagctaamtgctgattgtggtttaggatgttacagtactaataccatcatgttatttattctaatatagaggcattgagaggaggggagtgtatgtctagagttaccccaattctaaataggtaccaaaagagtattgattatgacctggagcctgagctttgggagaatatacaaaggaaaaagcaggcatagtttccacttyaaagggaagaagggactttaacatcctatgaatttgaaacatcctatgaatttgaaagtttcctaagtgttgttttcaaagaactggtttattttatagtcagtcaaaatgcatttggaatgtaccttgcttccataacagactttgactctatgacctatgaagaataaaaagataatctgaaggtgtttgagtcagaggctacttttcccctttatattttatatagaagcctatttgtaattcttcctcttcgttcttcacctgggtttcctcttatctacccaccacctaggacagaggctgcccactcaggtcttgccttgttgcccctagatgttgccacattcacatctccttgatggccttagatctcttgactagtcaaggactgggaacgtgccagggggaacaaagtaagcttgatgggctggaacttttgactttgggtccccaaacagccaaaaacagatacagaaatctttggttgtgtggatgcctgtgttcagagtggccttatcttgacctcagttctggatttaagtactctatagaaaatttgtgaagtcagaccagaattttctttgtcccatgaggtgtctttgtaagtcagcatgctcttgcttgaacaccctgtgggtgaataactttagtaagttagctgccagcattagaaccttccaggaagaattttaactagtatgctacatttgaagcactctgacatgtacatttaaagtgacagttttaaaagtaaaatggtgttaaatctctgaaacttgaacgtatgatgctctggacattttaggaagcttaagtaaatttctgattttcctttattgattatgtaacccacgtgatttgcatattttagtttttatgtttgacagtggtacaaatgactgacattggcaggcagttattgtagggtatatggttaatcacgattgtctaacttttccagagaaagtggtgatatgcttcttccttgcatggagctgtgggaattggatttgttggctcttcatttccagtgtttctacagtgcagaataaatgtaactttttaagcctgcatgctagtaatatgctttgctctttagtaaacaaatatgcaatagatagtaatctatctactttttttaaagcagggatctgctccctatctagacagatcttttaatgcattaatatttagagtagcaaaagaagttttgccatttgtagctctctcacaggtagcttaagcgagggggttgtgttgcatgtgcttagaaaggccaggwtcccagaattggaaggtgccacatatacttttagaatattttaacaaaggcttgtctctaggaaaanccacttggactgcagcaggattgttctggtcttccacagaccattcacatggtctttctctccagagaatcattcttagaaagccaggctaaatcagagtagtgctgtttttaaagcaagtatattggatgatggctatagggtaccttaatgctstgttgaaattggaagcagactgctcttcagcagcacatatactgcaactgaagttagagacagtactgaagacgagggagtagctaaatgctgtggatatttcatgtctgtttggctaatgtcttctcttgaggagtttctatgggtagcaattaaaattagaatttattttaaggtttttattaaaatatatacaatttgccataaattctagattctgatattcttgacaagcactttttgaatatctcaagagtaagttcttgacctggaacatatatagttagtacttgatgtcactaaccaagttgtagaaggagcctgttataattctgcaagatctgtgaatagcattataaatctggggcaggtgcctgtaatcccagcactttgggaagccaaggcaggtggattgcttgagcccaggagttcgacaccaacctgagcaacatggcgaaaccccgtctgtaataaaaatacaaaaaaattagctgggcatggtggcatgtgcctgtaatcccagttactggggaggctgaggcaggagaatcacttgaacctgggagatggagattgcagtgagcrgagattgtgccactgcactccagccagagtgacagagcaagactccatctcaaaaaataataataaaaataaacaaatctgtttaaattactgttgcctttcagcattagactttgagtttaataactacaaattgagactgctcacaatattaactttttttgtaggttattttgttgtttagataacttgcctccctagaggagcattcaggagataaagacctagctacatgtaatgatatgatcatttcaaaaatgtgccaagaaagcaaaattcattattgaactctaaatttctgggtgtttttttttttaaagtagcattttctctgggtaaagggaaaggcaatgaatgattgccaacatgtaaactccctgctgcccgccttcccccagtcccctccatctaacataatacagtaaatttgtagccagttgtagaaaaagaaattgatatctttctgagtaaggtttcatgccctgtgactaagaataggtggaggaatcatggccaaatcaaatatgaattgtttagcttggtcctgttgcagttggctttctgtagtgttctgaaacaagaggacgattccattccttctcaggaacctagaaacaacaccgcttgagcaactggaatatgtttgctgcaagcagaatattttggggagaggaagagtagtttaattcaagtagtttaattgaacatattagtcattggtctgtctgggacgtgcagtgttcatagtagcaatgtatgtaccatttattttatctggttgtgtgtgatgtgtgtgtatgcctatttaatatgtacacatatattcactacatatgtatgtatgatatattcatatatacatgcagtctgcttgattatcagcaaaatggtcagcctttatcagatagtttcttcatgtggagttcatctgcatgtggcccttactctgaagcctcttcctgatctggagccacagtctgtctgtcttccagttcatctcagtcctcgagaaaggccctttaaatatgtcactttcccattttcctttaaccatgggttgtgtgagccagaaagagctttgagaaagatggctgcttccaccagggtggaggcttctaggtctgcatgatgatggggcccgtttctggccagagggtggctctgggagcagttgtgctgygggcttgctgggggagaactctaactgttgcagaaacagagcttcatggcttgcttaaattacttagctggaatattttaaagtgtcagataatgtgatgtacaaagagagtatgccgatgcatttcattgtttttgcattatctgtatcagtrtttcccattgctagcccgaataatcaagaccagactgtttcttgtcactggattctggaagccttgccctttcaactggatttatgtttgtttctgctgctgtgaaaccccaaagtaatgcagtaggttttaattgaaaattgtttaattctattattgataattatttattgtaataaaagtaaaagagtaatttttaaatccttttaattgttttcagattgtcttctttgttttccttggtaagtgcaaaaggggagggagctatggggagaaaactaatgtccagccacttgtctcagagaatcattgattattttaaagcaaaacactgaaaaggttttgttctgtttttagagagatcagccgcttgctcctgggcgttctgtgatcctgtgacttgtttcaaaaggcagaatacgaggcaggtggcagtaacagcttttcatagtatactgctcctgactcgcccagaactgggtggtggcagtctctatagtctaataatgactgggtcacgcctaagttagtttgtaaggtggtttcttcctcagaagcattttcccatagaaagagtgttaacatatkgtattaattttccagacgaatcccataaaaacctgttagaccatacttagtacgtctagattatagtatagaaactataactcccattacatgacattgcttctgaggagaatatttcccatttttacatcgatctcccagctctggcagtaggcatttaaaaaaaattgcaggccaggcacagtggctcacgcctgtaatcccagcactttgggaggccgtggcaggtggatcacgaggtcaagagatcgagaccagcctggctaacagtgaaaccccatctctaccaaaagtaacaaaaaattagcgatgcgtggtggcccgcacctgtagtcccagctactcaggaggctgaggcaggagaatcgcttgaacccgggaggcagaggttgcagtgagctgagatcgcgccactgcacttcagcctgggtgacaaagcaagactctgtctcaaaaaaaaagataaaagaaaaaaaaaatttcagtaacaggcttgaagacaatgaggaagaaaatgccccatgttttaacccaggctgttctccagctgtgcgctcttaacccctttccctcccacgctcttggttgcggtagcagttattccctcccttctatctgcaaacctcaaacacctcccgagtgcctgatgacacataccaggtagatactacgtaaccactcttggggctaccaaaacttaaaaaaaaaccctatgcccccaaagggtcttgcttctcttcccactctcatcttttttcctctgttcacaaatttcctgaaagaaaactttacaactgctccttcaattttcttcttcttttcattctgagagttttcttaaaacctcccaaagttttcatacaatggctgtttcttagtcatgttcaactctgcaaactttgaagaaagagctttttacttttttctaagccttagtttcctcatctataaaatgggatcaatattaccactattacaccatgtgaaggattgaatgaggataatgcatgcagggtgtttagcacagtcagtggactaaggtaggtgcttggtttctactaatatctagttctctgtcttttttctttgaactttttttctaaaccatgtgacacagctcatgacttccatgcctcctcccctctctttcctccttcatgccttttgaggcagtatatgaagatgatggtaaggcagttccccaaattaaaaattggtaagattgccttctcagaatctaattagtaaaattcacacaaatcgaaagatagaaataacctaagaagttgtctaaatgatgaatttgtcagcatcctcacattccaattaaggtgagttagtgtaaacttattggatgtagaattaagtgtgactagacttagtaagatataaaatcaaatctgttcatccttcttgttttgaaaaaaggctataaaagctgaaggtggatgcccacataccttccttagcaagggaagcccatatagccagattcctcaaaaacctactcagggatgaggaactcgactgtgcttgtggcagattatccccattgtgagcctctgaaccatggcagtcagtcctacatatcaagggacttcccagtcagagtttgatcctctttgtgaccagcacatctctgtgggctgatctacacgaaaggcacgaaaatgcacactgccctgtgtgatggttgtacttgcttgctaaaagaaattctatgtttttcttttgtgagcttgttagtatgagccagccaggcttttgtatgagctttttttttttttttttttttttttttttttttttgtgagatggagtcttgctgtgtcacccaggctagagcgcaatctctgctcactgcaacctctgcctcccgggttcaagcgattctcctgcctcagcctcctgagtagctggagttacaggcatgcaccaccacacccagctaatttttgtgtttttagtagagatggggtttcaccatgttggtcaggctggtctcgaacttgacctcgtgatccacccaccttggcctcccaaagtgctgggattatagacatgagccaccgtgcccggcctgtatgagcttattagtatgaaccagcattgcctaccagttgaggaccacactctagatgctggtcagtcatcaaggtgaatggacatcacctgcctcccttccccaagtccctctcatctataacagccctacttgcctgcctcactctcttgggggtctcctgttatttctcttacaaaaacatgaataaataagctttatgttttattgagtcaaaagggatttatcctcattgtaaacatttttttttaatcttcagggaatctgaaaatcacccataagcccacccctgagggatattgactactttgtggtattccccctgtttttcttgtgtactactgtctacatttcaaatcaaactcggcttaggctctatattgtgctgcctgcctcttccctttctcatgtaatgtatcttggatgtctttctaggtcacctttattcttgtgttagagaatcccatgattcttttatcggttcccctattgatggattttgtcatatctagttttttaatattacaagtaactggaatggacatacagatacatctatatacgtttctttcaaaaaaagtttgttgagcacttactacatatcaaatattgtgctaggtgctatgtataaaataccgaataaaactgatatagttgtgaccccaatgagctatagctagatccatgatctccttgtgatgatctttaaactagaattgcctagtgaatggatatgctaatttatttttgtgtgtatacaaataaatatgtttttatctagttttttcagtttttaacaattttctaaatttaactcacttatgaactatttacaaaggcatggaaaattaagcatgcattttcccatttatatttaatcataattcattacatgtcttctgactttcttgtttagtggtttttctttgtctctttgtttcattcctttgacctctacaaccacagttgtctgccccatgaaaatatttcttcctctctctgtcctttgttcagtttaaaaaatttttagtatttaaaaaaattcggcaggccgggcggagtggctcatgcctgtaatcctggcactttgggaggccgaggcgggtggatcgcctgaggtcaggagtctgagatcaccctggccaacatggtaaaaccctgtctctactaaaaatacaataaacattagctgggcatggtggcacatgcctgtagtcccagctacttgggaagttgaggaaggaggatcgctcgaacccaggaggtagaggttgcagtgagccaagactatgccactgcactccagcctgggcaattgagcaagacgctgtctcaaaaaaaaaaaaaaaaaaaaaaaggaaataatagttatatatgtttatggggtacatagtaatatttcaatccatataatgtatagtgatcaggtctggtaattagcatgcctatcagctcaaacatttgtcatttctttgtgttgggaatgctcaatatcctcgttgctatttgaaactatgttattgactatagtcaccctccagtggtgcagaacactagaacctgtcattttgtatcctttaacaaatctctccctattccaccctttaccctagtatgccaatttaaacagttaatagattttggcaaactgtcctcctaggaggtccctttccagcggtgagtgaaagtgtttcccacaccagtgaaaaaggtttattacataattgaggctgcctgtgggagcaaagagggcctcccagctggtcagaaaatggctagagagagccaggaaaggagacaagcttggggcttttattgtggttaaggggtgaggctgggaggagggtatcctgtgcacgcagatgaaatctgccagcaccaaaaagagcacctaggctttttttaacagcttgcccagatgtggagaagaaagagggagtgctgcgtaaaagctgccagcagccaaatgtcagcagcaaaaaatggagtcagatttcttatataaaaagatgttggaagtggtatcagaacagtgcagggccaagtatctcactggtcactcttcatgggtttgtatggtacctttgctctcacttacctcttgtgcaacagctgattccccctgactttctcatggtatcccactcccaggcatagacatgcgcatgcacacatgcttgtttctgtccttacggatagtggaaacatgaaccaggacctggacgagtttttggtcagagctgtatcatggctcctaggagagtttaatactttaggtttcaaccaaaggagacagagatctggcagaaggccctgaagcctagaagcaagtacccccgctcctaccaccaccacctaggcaggtgtgagacaaggatccaggcagctgctgttagactctatagctgttggatggttttggcattcctaaacctctctactgcttgcaaacgtggaagaactgattttaaaaacccactccatttgcctctgggcagttcttactcacaaaggacgggtcgtcttggccgcacagttgtctgtgggttgcatcatttaacagctgagaaaatgctcctcaagaagttgtgacttgcccaaggtggcagggcagggctaggactagtactcaccctttctcactgctcatccagtgcccttaattccccacgggctaatgggacagaaccctgttaaatggtatccagtttttgtttggttggttggttgggtttttttgagacagagtcttgctctattgctcaggatggagtgcagtggctcgatctcggctcactgcaacatccacctcccagattcaagcgattctcctgcctcagcttcccgagtagctgggattatgggtgcccaccaccatacccagctaatttttgtatttttagtagagacggggtttcatcatgttcaccaggctggtctcaaactcctgacctcaagtgatctgtccacctcggcctcccaaagtgttgggaggctgaggcatgagccagcgcgccaggttttaattctcaatgagaacactatttttgttgacaatgagacgcccagaagatagcgcctttctggggacagttgagaatttaatagtgcttccgcatttctaacttttatccctcccccctcccacggactgttttcctctattccacttttcctctttcataagtatttgattgcaggttggtatcctgtatccaagcacagcgcttggcatcgagtaggcgctcaattttatttggtgaatatgagttggaggaatatttgatgaatgaatggaagatgaattaatcatcagggtcagcaagtgatgaaccacaacttggtccagttctttagtcctctagtctcctggtgagactccacagctccgctaacacgaccgggccttcgtgggcctgacaacagacctgacatcccacgggcgggagaggcgtcagcccgaggctgggatgctcggccggaacggcggctggcggcaggctgggcccagggagctgcgcgcgcaaccactcggg

SEQ ID NO: 93575 - DNA, 18689 bp, Homo sapiens
  misc_feature (1)...(18689): n = A,T,C or G
gaccccgtctctacaaaaataataaaaaaaaaaatctactgggacatggtggcgtgtgtctgtggtctcagctactcaggaggctggggcaggaggattgcctgagcaagggagattgaggctgcagtgagctatgatcccaccactgcactccagcctgggtgacagagggagactctgtttaaaaaaaaaaaaaaaatcaccttttaaccattttaaagtgaacaattcagtggcatttggtacattcacagtgttggacaaccgtcacccccacaaagaagacccccatttcccatcctatccccatgccctgttaaccacaaatgtaccctctgtctctatggatgtgtctcttcttagaatttcatatacaagtaatcatataaagtatttattttctcaggctgccgtgacaaaggtccacagactggttggcttagataacatcagcttattctctcacagtcctggaggctggaagttcaagatcaaagtgtgggcagggctggttcctcctgaggcctctctcctgtccttgtagatgccgtcttctccctgtgtcttcacagggtcgtccctctgtgtgggtctgtgtcctcatctcttcttcttatgaggtgtcttagtctatttcaggctgctataaaagaataccatagactgggtggcttagaaacaacagacattgattctcccacagtcctggaggctggaagtctgagatcaaggtgtctgcagggctggttcctcctgaggcctctctcctgggcttggagatgccgtcttctccctgtgtcctcacagggtcatccctctgtgtgtgtctgtgtcctcatttcctcttcttataaagaccccagtcctattggataagggtccactttaacgacctcatgctaccttaatcacctctataaagactccatcttcaaatacagtcacattctgaggtccctgggggttaggacttcagcacaggaatttgggagggacacaatttagctcataacatatggtaagtggtgtttggtgactggcttctttcacttagcgtgatgttttcaagattcattcatattgtagcatgcgtcagcacttnnnnnnnnnnnnnnnnnnnnnnnnnnnnnnnnnnnnnnnnnnnnnnnnnnnnnnnnnnnnnnnnnnnnnnnnnnnnnnnnnnnnnnnnnnnnnnnnnnnnnnnnnnnnnnnnnnnnnnnnnnnnnnnnnnnnnnnnnnnnnnnnnnnnnnnnnnnnnnnnnnnnnnnnnnnnnnnnnnnnnnnnnnnnnnnnnnnnnnnnnnnnnnnnnnnnnnnnnnnnnnnnnnnnnnnnnnnnnnnnnnnnnnnnnnnnnnnnnnnnnnnnnnnnnnnnnnnnnnnnnnnnnnnnnnnnnnnnnnnnnnnnnnnnnnnnnnnnnnnnnnnnnnnnnnnnnnnnnnnnnnnnnnnnnnnnnnnnnnnnnnnnnnnnnnnnnnnnnnnnnnnnnnnnnnnnnnnnnnnnnnnnnnnnnnnnnnnnnnnnnnnnnnnnnnnnnnnnnnnnnnnnnnnnnnnnnnnnnnnnnnnnnnnnnnnnnnnnnnnnnnnnnnnnnnnnnnnnnnnnnnnnnnnnnnnnnnnnnnnnnnnnnnnnnnnnnnnnnnnnnnnnnnnnnnnnnnnnnnnnnnnnnnnnnnnnnnnnnnnnnnnnnnnnnnnnnnnnnnnnnnnnnnnnnnnnnnnnnnnnnnnnnnnnnnnnnnnnnnnnnnnnnnnnnnnnnnnnnnnnnnnnnnnnnnnnnnnnnnnnnnnnnnnnnnnnnnnnnnnnnnnnnnnnnnnnnnnnnnnnnnnnnnnnnnnnnnnnnnnnnnnnnnnnnnnnnnnnnnnnnnnnnnnnnnnnnnnnnnnnnnnnnnnnnnnnnnnnnnnnnnnnnnnnnnnnnnnnnnnnnnnnnnnnnnnnnnnnnnnnnnnnnnnnnnnnnnnnnnnnnnnnnnnnnnnnnnnnnnnnnnnnnnnnnnnnnnnnnnnnnnnnnnnnnnnnnnnnnnnnnnnnnnnnnnnnnnnnnnnnnnnnnnnnnnnnnnnnnnnnnnnnnnnnnnnnnnnnnnnnnnnnnnnnnnnnnnnnnnnnnnnnnnnnnnnnnnnnnnnnnnnnnnnnntttgagaccagcctgggcaaaatagcaagacatgtatctctgcataaaattttaaggccaggtgtggtggatcacacctgcaatcccagcagtttgggaggctggggaaagtggatcacttgaggtcaggagttcaagactagcttggccaacatggtgacacctcatctctactaaaaatataccactgggcgtggtggctcatgcctgtaatcccagctagtcaggaggctgaggcaggaggatcacttgaattgggaggcggaggttgcagtgagctgggatcgcaccactgtactccagcctgggtaatagagtgagaccacgtctcagaaaaaaaattaaattaaatacaaatttaaataaattagtagggcatggtagcgcacacctgtggacctagctacttgagaggctgaggtgggaggatcacttgagcccagggaatttaaggttgcagtgagctataactgcaccactacactccaccctgggcaacagagcaagagactgtctcttaaaaaaatatgaaacacattaaaattttacttaatctaaattacccattaattttaggtccttgataagaagaaattggctaatttttccattgaaatacatttttttctcagactcataaaactgtataccgagtgacctgtattcatttgtaatagttttgactaaagatatattttaaacttatgtttccatttgcttctaaccatcaatgcatataaggaaatagacagattaaagttttaaaaagatggattttaggtttaccagaaatagagtcaacttgacccaaaatagaatagctttgatccttgatcattgtattgagaatttttagaaactcacctgctgaattcttctttggtctgcagcacacctaatattgaccgcctggcaagtgaaggagtgaggcttacccagcatctcgcagctgcttccatgtgcaccccaagtcgggctgccttcctgaccggccggtaccccatcagatcaggtgaggcaataaaaaggcagcaacatttcagtctcaccagaatgcattctaatgattagtttttgcaaatctttataagaattctcaaaaggtcactcagagtattagggatctaaattcaaaggtggttgttatccctgggcagcttaaatatgtgtgcctctcaccaggtaccactgcacctgctcatctctgtgcatatagcgacagggtttaggcctcttgggggcaatttgccaacttatggtcaacactcccattttcaggtacttgtgctaagatttctcaagagacccctgatgtctttaagctagcagagaccatgcagtggttctgagataagtggatcaaatccacctctgcggatgagattggaaaactagacacagttgggaaaaaaggtataactgagaaaacaaaaaggaaatgaaacttttacatactcccttacttgaccccatcatttcaagatttagacttaccaagttgatataacgacaattaaatgtgttcctttgctgcttagcttaggatcaatacctacaaacatccactcaagatcaatattatgaacaacaatttttatacccagctaaaatatagtggtgcccttagacactattgaagtgttcatggttatcagactctatgtgaaatatcgtgtcatgctgttgcattttgtttaattctagtatttgcttgtcataattttagtatacctgccttcacagtttaatttttcagtgaaaaatttttctgtatgaattttcttcctcctaagtagtagattctcatccaatacattcaaggaatgaactaattaggttaatgagaattatactaaaattaagagtaaacattaaaagtttttgtcccataaatattgatttattattatctttttttgttgcctaatgaccttctttcataattcaaggttctccattttgttcaaaatagtttggtttctagataagcagtctctatataacacagtaccgtgtatgaagagggataaagatatgaatttgtatgagtttccaaaaaaaactacacttataatttcaggatttcaggattttttctttttttctttctttcttttttttttttttttgagacagactcttgctctgtcatccaggctggagtgcaagggtctgatctcagctcactgcaatctctgcctccctggttcaagtgattctcctgcctcagttcctgaatagctgggattacagtcatgcaccaccacacccggctaatttttgtatttttagtagagatgggatttcaccatgttggccaggctggtcttgaattcctggcctcatgtgtgatccacctgccttggccacccaaagtgttgggattacaggagtgagccaccatgctctgcctaatttcagggaattttaagtattgattatggtgaaataaaatttatttttaaaaattaagaaaaaaattaggtgattggtggagagatttcaagtcattgccatgtgtatatttttaatcatttgacacaaacggttcagtttaattcattctacttatcaaaaatttcagcaaaacagttcaacagcaagataatggtctaatgcttcccttaataaaactgtttctctttcctatcaatgacactatctagagtctactttcttcttcttccaaggtaggatccttgaaatatacttttttcttttgagatggagtttccttcttgtcacccaggctggagtgcaatggcatgatctcagctcattgcaacctctgcctcccaggttcaagtgattctcctgcctcagcctcctgagtagctgggattacaggtgcctgccaccaagcccagctaatttttgtatttttagtagagacagggtttcaccatattagccaggccggtctcctgatctcaggtgatccaaccactttggcctcccaaaacactgggattacaggcgtaagccactgagcccggcctgaaattatcatttatttatttcttgctgatcttcacttgtggttttcttgtgaattccttttaaactataggtgtataatattgtccaccagtataaatctacataaaattatatggaggccaggcacggtggctcacatctttaatcccaacactttgggaggctgaggtgggtggatcacgtgaggtcaggagttagagaccagcccggccaacatagtgaaacctcgtctctactaaaaacacacacacaaaaaatagccaggtgtggtggcacacatctgtaattccagctagggaggcggaggcacgagaattgcttgaacctgggaggcggaggttgcagtgagccgagatgttgacactgcactccagcctgggtgacagagtgaaactccatctcaaaaaaaaaaaaaaaaaaaaaaaaaaaaaagtatatatatatatatatatatatatatatataatatatatatgtatgtgtatatacacacacacacatatgaaaaagaaattgtcactcctacacttcttcatttcagattctcaaggatacttttaaaaatgtatttatacccagctaaaatgcagtagtgtcctcagatactattgaaacattgaaggttagcagcctctatatgaaaaactaacgaaggttatttgttgttagtctgaaattcaaatggatataactaagtgtcccgtatttattctggcaaccctaattccaagggaatgtttgcatttagcaagtgaaaaaaggagggtcaaggacgtacagccagaaagcaacagaaaacttggggaagaatggctttgaggaggtgcgggaggagaggactttaagcatgtcgggataaattcggtattagcaaagactatggtgctaacttattgacttctgtgaatttagggatggtgtctgcctacaacctgaaccgtgccttcacgtggcttggtgggtcaggtggtcttcccaccaatgaaacgacttttgccaagctgctgcagcaccgtggctaccgcacgggactcataggtatggcgccggaactckgcccgtggaaacgtgatcctgcagcctctctgtcatcgtgtctaaggtgtttccggggatgttggctttgtgcgcgccagtttgaccgacttctctttgagataagacacttggagaaggaaatgatcacacattgattgagcatgtgtagaatcgagggcatagtattggaaaaacaatgagaacagaaagcaaacaagtgtatccaaagttgccactaaaatggaatgttgtgttggagggatasgatgtttgtgacaccattattagcagaaaaaccagtaaatttgtagagaagtactgttgaaatggraaacttacagcattaagagttgtcaaatggaggcaattgctggtcgayttagatcacttaatattctatgcccttttggcgggggtgggggtttggggcsgggggacatgagcttgtgagggagcctttcaccgaaaaataagtttgtagaattccagtcctagaagatagtcctctaagaataacttgtgtgatcaaatccttttgggaaatgctactcaaaagcattgtacggtccactatttttgaggattcctaatgtgaattgtaagccacagctccgagatatccccagttaaaaaaaaggttaagaaattttctatcagtagggcatgtattcccatgcaactcccagcagcgtcctgtgagtgggaattctctagattagctttgagcagcgttcttacatcattagagcacgggattcagatctgactctgctattattcattaatgtgactcaggcttctgaataaatctagatagctgggcacagtggctcagacctgtaatcccagcactttgggaggctgaggcagaagaaggccaggagttcaagaccagcctaggccaccatagcaagaccctggatctacaaaaataaaatgttaaaattagctgggcatggtggcacgcacctatagtcccagctactcaggaggctgaggcaggagaattgcttgagccaaggagttcgaggctacagtgagctataatcatgccactgcgctccagcctgggcaacagagcaagactctgtctcttaaaaaaataatctagacaatgtgttttttattcataataaagggtctgggaagtgttgaatataataatgtgtgcggacaaatcagaacgtgacctggccccctagagtatgtgcttgataaaaggaattacttgcattatcagaatcgtttggttcttgatgaaattctttggctactttgtcatccctagcttgaggacctagaagaggtgttccatctatacataaaatctcggttacctttcagtgagatggaataagagggtcggaaggcactgctagataaaagcatgaatgtgcaaggtgcactgaaagtccttggtattgtccccaccaaacaaccaagacatcgattctgccctcctagcaagctccagatacctggaaagtttctcattgttcatgaggttgtttggtaccaagcaaaaggtttcttctgaatgaacactaggctcctctccttgtcgcaagcaaagaggctcctgctgcatggcttttgtctgaaagaggcatattgtagggagaaggctgttggtggcatgtctataccagggaggtatttggggatatcaagaaaaaaccatgatgacaacagaatgaaagttatatttgacttttccaaagggaagcccacattctagaaacagaccggcattgaatgctgccatgctgccatggtacgattttattttacttttaggcaaatggcacctgggtttgagctgcgcctctcggaatgatcactgttaccacccrctcaaccatggttttcactacttttacggggtgccttttggacttttaagcgactgccaggcatccaagayaccagaactgcaccgctggctcaggatcaaactgtggatctccacggtagcccttgccctggttccttttctgcttctcattcccaagttcgcccgctggttctcagtgccatggaaggtcatctttgtctttgctctcctcgcctttctgtttttcacttcctggtactctarttatggatttaytcgacgttggaattgcatccttatgaggaaccatgaaattatccagcagccaatgaaagaggagaaagtagcttccctcatgctgaaggaggcacttgctttcattgaaaggtatttagccatttcttgcctgatttcctgcatggaaattttatttttatttcataggaggtcatcacaccttgataacatgggcctttaaaagtctcttggagagaatgtgcggcatttggctttctgttcctgtattaatttgcttagaataatggcctccagctgcatccatgttgctgcgaaagacatgatctcattctttttcatggctgtgtagtattttgtgggatataatgggagctaaacattgagcctccatggacataaacatggaaacaatagactgcaaacttctagaggagagagggagacagggagaccaggggcacatggttgcaagactacctattgggtgctctgcttaccccctgagtgcaatagacccacgtaacaaactggcacatggagaccctgtatcgaaaataaaagctgaggaaaaaaaaactttaggtgacatttgtgatagacttgagtctcctcttaggtagaattaaatagttaaatttcctgcaaattttgaatgctcaaaaggcaaaaaaacaaaaaccaaaacaaaaacaaaacataaaaacatattttgctcacctccccatttttaatgttttaattttttttttttttttttactttttgggacaggatctcactctgccacccaggctagagtgcagtggtgcaatcatggctcacagcagcctcgacttcccaagctcaagtgatcctcccacmtcagcctccagagtagctgagactacaggcacctacaggatgcctggctaaattttgcattttttttttagaaatggggttttgtcatattgcccaggctggtctcaagttcctgggctcaagtgattcacccactttggcctcccaaagtactggggatacactacgcctggccacttacccctttttaaaaatgaaaactagagttgccatattttaatctatattgcttcagtgtggattgttatgtaaattgattaaaccyggggggtaaaattttttttctctgtctcagacacagccggaagagctctctgtccataaactattggatagtggctctgtatttacagatacctagttttaagttttctgtgttcaacacaagctatgcaggcataactataatgagctctcatcatcccataccagctcactcctacgttacaaattattactattattatttggagacagggtctcactctgtcactcaggctggagtgcagtggtgcaatcatagttcactgaaacctcaaactcctgggcaccagtgatcctctcaccttggcctcctgagtagctgggactacaggtgcacatgaccacacccagttaattttataaaattatttttccatagagacaaggtcttgctatgttgcccaggctggtctcgaactcctgggttcaagcgatcctcctgccttgacctcccaaaatgctgggattacaggtgtgagccattgtgcccagcctgggttacaaatgagrggcacattaaagttgttggtgtggattctcattgacactgtttgtcaccttccttagtggggttggcagggagtggagaggggaggatatattgttactccaccaggctgaagggtatgcagtggaatatcattcactcatatgcccctgtgcccatcagattcattatttattccaacacaaccatgagaacagtgatcagccacccactcagctctccattcatcttacctgcccttcccgtcccaacccatttgcttgggctatctttttgggaatatattcaatctccatctccttcccttctttctatgctggttgtgaaaaatgtgtaaaggagtagctttagaatgactgcatgtgacattaaaatgcaaaacacaaggtcaggtgtggtggctcatgtctgtaatcccagcactttgggaggctgaggcaggaggattgcttcagcccaggagtttgacaccagactgggcaatatagtgagctcccatctctacaaaaaatgtacaaaattagccaggcttggtggcgtgtacctgtggtctcagctccttggaaggataaggtggaagaatcacttgagcccaggaggttgagccatgattgcaccactgcactccagcctgggcaacagagtgagactttgtctcaaaataaataaatacataaaatgcagaacacaaaaagcaagatgtaaatgaggggaatttatttctctcttggggtaggcaggctacagatacagtgaggttatcttgttctctgccatcctttgtgagcagcctcatggcccaaggtagatgccaaagctccagccatcagacttatgttccaggaaccatgaaggaggtggaagaaagaaagaagggaaaatggagagtaaggagcatcaaatccttactgtggcacatctgagtctgtccttaagatatgattcttctgaactcatacctaaaagaacactttgaaacaatagatgaggagaattcatactttttaacccattcaacaaagattaaaagatttattaagctgctactttatgtcagatgctaaactggacacaagagagtataaaatgaactgcgttaaacatttttgttgttgttgttaagacagggtctcactgcgttgcccaggctggagtgcagtggtgtgataatagctcacggcagcctccacctcccaggctcaagcgaaccccttgcctcagcctcctgagtagctgggatcacaggtgtgccattaagcacagctatatttttgtattttctgtagagacgaggtcttgccatgttgcctgggctggtctcacactcctgggctcatgcaatgctcctgcctcagcctcccaaagtgcaaagaatataggcatgagccactgtgcctggctacatgaaacattttactgggaacacaaatgttctgttatccttcattcctcctcatatcctttcaacataaatcttgtggtatttacgactcacaggagtggtattgtcatctaaagtacatagaaaacctccgccagctattatgagatcttttcatcagtgcagaatcgcatttaaatgatggaaatgacttcatatttgtgaaggtaattttggtaactttctaccccttaggtacaaaagggaaccttttctcctctttttttccttcctgcacgtacatactccactcatctccaaaaagaagttygttgggcgcagtaaatatggcaggtatggggacaatgtagaagaaatggattggatggtgggtaagtattcagtaacagaactgtaaatatctgaagtaygggctacagaaaaacaaatctgtactaactgtctcaaattatgtccagccccttgcatagcatagatacctgaaaagtatctgtttcatcccttaattggattaaaagctggcttttaattgttcagcaataccagtgaaatatattccccaagataagtcacagtttgtaaatacaagttttcccatctttaaaataaagacagccacttttctgaaaaactcattggcaagataaagaaagctgcactgtaaagtatattgtaattcctggccgggcacgcagtggctcacacctgtaatcccagcactttgaaaggccaaggctggcagatcacttgaggtcaggagttctagaccagcctggccaacatggtgaaaccccatctctactgaaaatacaaaaattagccaggcatggttatgcgggcctgtagtcccagctgctcgggagggtgaggcaggagaatcacttggatccaggatgcagaggttgcagtcagccaagatgagaccactgcactccagcctgagtgacacagcgagattctgtttcaaaaaaaaaaaaaaaaaaaagaatattgtaatttcaattcccaattattttgatggatataaaagggaacgttattctgattagtcagttctacaggaaatacatagaaaattgggatggggatttaacacaactaaagcaacttatttcaaaggcatagtgttcactataaagaaatgctaaggataataaatgagcaggtgggaagagttactgtatgcattccagaataataaatagctgtgctagttgaattgcatttgcccacccccgcctctatgtacgtgacagagttgtccttcctctcagcgatggtgtttcattttggaatacagtacttttcttcttcttctgagtgcaaacttctgaaaacggtgctctgccgaaccattgaaacgaacaatctcccagttatcagccgcctctgttgacttatatggagcgcctttgaaagaaacagagctattttaatttaaatgcatttaaggggtgttaatcaatcacattttattataaataactttcttttctctgaaaaccaccatctaagtgagctataaaatactagttaaaattactgaagaactagtggtgtcggataggacaaagaggggaatcttgtcatgggataaatttctcttgtatatttccactatgtgtgtttacctctaattataggtaccattgtaacatttactgtctatatttaatcccaaagaggagatagaatacagagaggggccaggcgtggtggctcatgtctgtagccccagcacttttggaggttcaggcgggaggatcacttgatcccatgagtttgagaccagcctgggcaacataccaaggctccatctctacaaaaaaatacaaacattagccaggcatggtgtcacacgcacgccttgtagttccagctacctaggaggctgaggtgggtggatcacttgaacctgggaggtggcggtagcagtgagccgagattgcaccactgtactccaagaccccgtctcaaaaaaaaaaaaaaaaaaaaaaaaaaaaaaagaggccgagtgcggtggctcacgcctgtaatcccagcactttgggaggccgaggcgggcggatcacaaagtcaggagatcgagaccatcctggctaacacggtgaaaccccgtctctactaaaaatagaaaaaatgagccgggcgcggtggcgggcgcctgtagtcccagctactccggaggctgaggcaggagaatggcgtgaacccgggaggcggagcttgcagtgagccgagattgtgccactgcactccagcctgggcgacagagccagactcagtctcaaaaaaaaaaaaaaaaaaaaaaagaatacaaggaaagtcagtgctgccaggctgccagtaaggcatttaagcagaaatggggagaaaaaaggaatgtgttaaagggaaaaacttatgggcttagttaaagggaactaaccctgacatccaaacccttttgaagcttgctgaactaaagctaagctctgtatttcttaatttaatctttgctgtgggatgtgtatgtgtgtgtatatatatacacacccagctgcagttattttatttgcacggtataaattacaaatcacttttatgcataatactatagtcagatttaatatgaattaagctatatacacacacacaccatatgttatatacatatatatatacacacaccccatatggtttatatgtatacacaagttatgttttatacatatacacacatagcactgtatgttgcatatatacacatttattatatatagtttaattccttggtaacgaaatacaaacactgaaaggtgttacagttaaaaatagctataacactgtagcctttatggaattatataattgggattttttttttttctctgcttcttttgaaatcgcttactatagttgtacttagtcaaaggacagtttcccgtaaagggattttctgttaaagtctatatctgagtgtttatcactaagaaataattatgtttgttttacagtatatgtaaatacatgatgaagacgtgttacaaaagctagcaattgcattattaaatggctaatattatttgacacaggagaaatgatgagtagctatttttctgcgtaacatctcccaaatattctgagttttctccgtcatttcttataaaaattctaccaaaataaagacatattgaaagtcagacaggtatctctgtgggtattattttactatttaacaatatgagtataaaactcaaaggtttagtaacttattaactttactcaaaaataagccataacaatgctatactcatgcaaatgcaaatacaacgtgcaaaatgaacttaatgaatcttcgggaattcagtaacattttaaactttccaatgaaagaaacttgtgcctattaaaaaacacttttagtcctttttttttttttttttaagacacagggtctcactcttttgcccagtctggctggaatgcagtggtgcgatcacagctcaccacacacttgacctcctcggctcaggtgatcctcccacctcagcctcgtgagtagctgggactaaaaatgtgcaccaccatgtctggccaatttgtgtgtgtgtgtgtgtgtgtgtgtgtgtgtgtgtctctgtgtgttttgtagtggagttttgccatcttgcccaggctggtctcgaactcttgggctcaagcaaacttcccacctcggcctcccaaagtcctgggattacatgtgtgagccaccaggcccaaccttaatcacttttcattattggtttctttccaggtgtctttggtaggaggtcttataagtgacctattaccattagtatttatatattcatatgcatctgtgtgttttcactttagacactatacagacaattatttgcaaatatatttgttctggaacagaaaaagaatttgcagctactatatttgcacagtataaattacaaatcacttttatgatttttttatactatagccagatctaatgtgaattgataatttacatataattatgctgttcccagaaagcctttacaatctttcatcttacaaaccctgggctttaaaatatcttaatttctaattatagcatttctaaaaaatagtatatgtcacttctaaaacaaatcactgagtttacgtataaacagttttctgtgcagctagttaagctagttacattttcttttatctttgaatgggacaagagcatagcacagagatgatctagtgtaaactagaaatgcagtgtgacctcaggcccaggacgatgttatctgttgattagcaaatgctcaacagacatcagaaaggaaatgaatgttgtttggaattttgctagaacagctttctacttattattttaaaaaactgtcctcctgagggattgtcaacacattaaagacagtgtctgctgagtctagcgcagcattaattgtcattagatcttaaccataacccaaacagcaagaataacctgcaatttccatgtagacttcagatagcagccaggacagcaagtctctaagggaggtggtgctgtgccctggagtacggggatggctttgctcatatgttcctggaggtgtcattttgcaaactgtatttttttaaattaatgttcatcggtttatttaactgctgggccttcttggcactgtctatttgaatcgtttggggcaatgatgaccttatgtattattacacgatttgtataataaaatagattttattatatattcaataataaaataatgaacacattatacaataaaattgtataataaaccagtactttatatattgtatatgaactattctacattttaaattaatataattaatgtatctagtatatttaatataatttatataattacattaatataataaaattaattaaagtaatatgtgacacatatcattcaattatataaaataatatagtatatatttatataaagatataaatttatgataaaatttaatatattaattagacatatattataaaatttaatatgttcattatatattatacatttattacatatactcatattttatcttatagttaatatattttcctatgtcaataaacatatatttttacatattgcattgatatacaaaatactatataataaaataatagttacatgttattatataattacataacaatttttacacaatgataaactattatataatgatatgtttctagtattgtaaagtcatatggtataataatacatagtatgtattgattgtacatattacaatatattttgttctattccataattgattatattttaatatataacaattctttatgcatttttaatacatcatgttatatattaatatgtatttgtaagaaatatgtactatatatcatacaatatataataaatatataattagtaattcaaatgtataaaagtatgtattatagtaaatatagcatatattatacattattacattatatattaaatattttaactgctggatataatatatattatatacactatattacgtacagtttaaaatagtatgtattacaatattatatgattaattatacaatatcgtgtagtgcagaataacattgaaacgctatgtgtaataaatacatagtagcagatatgtaataaagcagtggtgatctgcatcaagaggtcaacgtctttgtgtctctgaccctctccaggtaaaatcctggatgccctggaccaggagcgcctggccaaccacaccttggtgtacttcacctctgacaacgggggccacctggagcccctggacggggctgttcagctgggtggctggaacgggatctacaaaggtgattgtgtgtagagaaccaacgcctgtccattttaaatcagtagtctctattggctttgtgtttgcttgaattcatttgccatgatgttcagatattttgatgtgagttagactcttattaagctagaccgaaaaaaaaaaaaagctgcaaattttggggcagtttccaagagcttcaaagtaaaatgtttgaagcaacgccaaccccaggagacagcacagcatctcaatgaccatctgtggcagatgtcccagcctccgcacgattgacatttgaggctggaggattctctggctgggggcatcctgtgccgttgtaggtgttgaacagcgtctgtgggctccacccacacatgccagtagcacccaccgcagagcagcaacaaccagaaatgtctcctgatattgcccagtgtcccctggggacaaggtcatttctaagtgagaagtgctcctttagattaatcctcacttggattctcagatgcaggtttttaattcaatcacaccaatgatgctattcattatgctttaactagtgttatgtggatcagaaaaaagagtttttcatttgactggggtgcctagctcctcatggccagcagattcttccagctcactttgatagacttcatgccgggttgttcaagaactccatggcacccactcttaggcatcaccaaaggcatgccaacagaaagaataatttaaaaaagaattctgcattcgctattttccccctacccgctaaccttccaagtaaaacaaaaaaactaaaagggtatcaaaatcgtcatcattataaaatcagaatgtttgaacttccttatatttcattaaaaagttctgtgtgtgtgtgtcttatatatgtattttcctggaggtataatcactatgtatataaattcaccgtattaattgtatgtaatataatatagaatcatatatattcatcatatgtgatatataatcctatatatagtcactatgtatatatagttactatattcattacacataacacatataatcctatatatattcgctatattcattatatataatacatgtaattttacatatttactacatataatatacataatcctgtacacattcactatgtatatatagtcattatattcattatatatacacacataattctatatatttactatatttattgtatagatcattatatataattttatatattcagtatatataatataatatataatactatatatatttactatgtctatagtcacatattaattatatatagtatatagaattctatatattcactgtatagagtatacataaccctacacatattcactatatgtactcactatattcattatatattacacataatcctatatatatattcactatattcattgtatatatataggattgtggatactggattatatattgtaaattaatagaagtgagctcctgaaagcattcacctcctctggcttgtcatgtggacttgctgtagtcataactgttaa

SEQ ID NO: 93576 - DNA, 39513 bp, Homo sapiens
catccactagagaaaattcatgtgtttacctccagtttcctcttaagagcaatcggtgcatcttttccaatacacttcatcacaacttgtaatgtgaagacatcttctattttccaaacttgctgatcaactagtattctgttatcaaacacaataaatattaaaatcatagaatcttcaaagcagaagaaaaatcttaaaatttcatttggtccagccccttcttacaggcaaggattatgaagcccagagaaatgatctacctgcttgagagagtgtaagtagttaaagatcgagacccaatctattaatagtgctattttctctcacattattgtgctgtctttactaaagaacaaattatgtcaggagattatagtaacatatcctatgcatagtcaatgtcaaagggagttaagttttactctcactaatctatgacattagatmatttatatcaattttataaatcccttttcaagctgggtcaacgtcaaccctcacatagtccccgaataactattctgaattaaatatacatatcaattctctcctaccccgcatcagtactattttttttttttttttttgagacagagtctcgctctgttgcccaggctggagtgcagtggcgcgatctcagctcactgcaagctctgcctcctgggttcacgccattctcctgcctcagcctcccaagcagctgggactacaggcacccaccaccacacccggctaatttttgtatttttagtagagacgggctttcaccatggtctcgatctcccgacctcgtgatccgcctgcctcggcctcccaaagtgctgggattacaggcatgagtcactgcgcctggccagtactatgttttaaaataaattaatttagatttcaatgttactcacatctttgttattatggaccctaagagaagtatttccagcctatgtcatccagagtcaggattttaagcttaataaggtatgaaagactgtaactaccaacaaagcctccccaacccctcctcccctcaagaaaggagtttagttttcatctcaatttttttattccagatatatgaggaayaaagaaaaccacatgaagaaagcataagagagttctcacctgaatcccgttcgtagaacatgaacattcttgcatggttccattgcctctaaaacagttgacaaaactgaaaggcatatctcatcacactcattgatacgttcctattgaaatataattacaaaaacactacaggtgatgagcccatagtaaactatcttacccaagcaaaaccactgaactgatgtactgaataaaacgattgagtatcaaaccaacaattcctacagtcagtccacaataaacagcatctttgggaaataaaaagtcatacttactgaattttccagctgactgatacacatccttttatgcatcaacacttttttaccttcaccattatcactgaaaacacatttgatatttattatattccactgcttctgaaacaacttttattaaacattatttttacctcttcttggaattcaaggtcattacaaaggcaaaaacagttaaagtgcaggaatataagaactactgaagtacagaaggtaactagcccatctctaaagatccttaaatggttgtgcctttacaatttccctagatcctttcctgggtatcaagctgaaactttacttgtgagtcttctgattcacatctcctgccacattctaccactgctatctgggtctcaagggaagcctacaccccacagattcttctttcaggtccctttacttagggtactaagtttgattccagaaatagtgggcataatctggaaagtgaatagtaacaacacagcttaactagcagtactctacagtttaatcactagtctataaacctcacaaaaaatcacatctgaggaaacttagcctgaagagagagaagctcttttgctaaaattacataaccaatgaatcacaaagtcttaagtcagaaccaggtaataataagaaatggttatggttagaagaaaaaaaaggtttctttcctatgaaagggtttccttaacaattttacagcattccatccatatctactatgaaagaaaagaccacttgtctatgtgtttgaagggcaaattcattgatggcacactgtcctttcacctctaaaatgtctttacattattccaacaggtcagtgagacaccatcatccatacagatgttttgactacaaaaatctactactcatacctcaccaacacagatgtcatcccgatgcaaatatctgtccaaaatctagtaagagcatcactgaccaggtaaggtgatttattagtcacttttaaataactacataggaactaatacacagcctacaaataaacagggatattctgtggtttaaacaaatacacacacatacactaaataaaaattagttattccttaaggacatatggaaatcacagtaatgtaaaaagttaaaaactttcccatagctatgaacccaattattgaattctatagcaagacaggatatatgccagattatccccaaggaattcctgtcttttaaaaaattattattattattttcagacagggtctggctctgtcacccaggctggagtgcagtggcacgatcatggctcacggcagcttcgacctcccaggctcaagtgatattcccacctcagcctcccaagtagctgggaccacaggcaagtacatcacacccagctaatttttgtattttttgtagagatggagtctccctttgttgcccaggctggtcgcaaactcctgggctcaagagatcctcctgccttggcctcccaaagtgctgggattacaggtgtgagccaccacacctggctaagaaattacttcattatcactgagtttatacgtcagaagtgtacactcttaaaacataaatgattaacaagctaatccttccttccttacatttggcaccatttcagtgacattaaacaggacactgacattcttgctttagactaaaaatggctccctccatccaattttaaccttcttccaatacatcttccactcattcagtgatctaaaatacaaatttgagcacgtcaacccattgcttaaaattcttcaacggattcccattgcctacaggataaatgcatactccttagctagccgtaagaggctctttatgatttggttcctatttttctggcctcttgttctgcccctaagcctcttgcccctcactcctctcctttgatcgccatgtacaaaacttgttcccacccactcaaacatacaactccatcattctgtgcttcagctacaccaaactactttcagctcttcaaatttgccaaacttttcctctgggaacagtagggcatgcaatcctctctacttgaaacaccatccccttcactatcattctgctcatcagtttaggtatcatctactgggcctgaattccaattctaccatggactaaattctcttccttccccttcccttctctccttcttcaactacccaggctttctttgtatatcttgcatctctcctcactttagcttcttcaccactactcaaccctggggatggtaaatgtggaaggctttcataaatttccatagcaaaaggaagaaaatagctaacttaaggcctctaaatcatataatatatatgcagaaataaatataaaggaaactaccattccatttgatagtctcttttaagaaggctacatatctatatcccttcattctttcaaaatattctaaatcaagtaaatgcatgtttaaatctcctttttattttacctgggtcaccctcagcaaagtctgcaccaaaatagtgttctgagggattccaagcttcactatggcgtgaagactgaacagtaggtacttatactgcatgatcttggcttctctcatcatatgttcacagagctgattaaatgcagggtggctaaacatcagtcgtttttcaaagcgcttctggtcatcagacagtcttttggcaattgtccacattgctgtgaaatagttgctactaggaaatgtgggcgcttttgaaaatgcatctaacacatcactcagggaattacattcctcagacagttttctactgctgatacggtttggttttgtttccttggtaagaacatcttcattggagacttcatgattaaggtttactttcttcaattcatcatcagatttatcaacagggacaagagactgctttgagtcaaaaaacagtcttttagcataaagtagtctttcaattctaagggctgttagagtgcttatgccctttgtttgaaagccaacatctgatttaaaaatgaatgcatcctgaaagagatatctaatgatatcagttgattgcattctgttatgaaagttatttaaaatgttccagtttgaatgaactatttttggtttgcaaagtcccaaacaacatagcctcatagttctgcttgttgaaactaatgtactgaattgtctaaggttccagaaaaaggagcccgctttgttattcattttgctctccactgaaacacttccaaatggcttcaaagttgtcaacatgaaaccaacgtcacttctactagtgaaaaagaacacgtgctgtcgttttcctgtaggggaagaagtaatgaaaagaataaaaattaaaacaaaacttttacttaaagaaatgaaatgcatttaacagaagagaaaatggggaacctatggagccattaaacatttacataaaacagtaaaagttttttttaccaatgtgggctccctccaatctaccacaatgtgtccagtttcaaagaagccaggtcactttggaagtagtcattgtattaatgagatttttctggtgcaaaagcgttccataaagctttctctgtaggagagacttttgttggcattgttatggaaatgtcctcggtgaaaattaggggattagcattgatagatcattttcttttctcttctctgttttttttttttttttttttttttttgagacaaagtcttgctatgtcccccaggctagagtgcagtggcgcgatcttggctcactgcaacctccacctcccaggttcaagcaattctcctgtctcagcctcccaagtagctgggattacaggcgtatgccaccacgcccggctaatttttgtattttttgtaaagacggagtttcaccatgttggccaggctggtcctgaactcctgacctcaggtaatccacccgcctcggcctcccaaggcgtgagtcaccgcgcccggctgatagatcattttcaacatgacgatttagcaacggccgaacccagaccatcaagaatagggacctgggcaggtagaacggctcagtggaagaagcagaaaacgaaagcgatgtctgcacgtggcctgcgcttaagaggaagatcttatacaaccagccagcctcaccagaccccagaaccaacttcaagagcctgtccttccgcagctgggccgcccagcattaacccacctcctttaaacttacttccaggacaactcgtgagactcttctcctcgaagtaaaaagtctaggatgtgatacgggctgccgctaagcccaagctcgtcctccactcaccttagagcacaagaccgtractacgtacaggagcagccatracagcttccccgagaagctgcgcttctcacgagatcttacggattccctcaaaggtcaaaaagcatatgttcgcggctgtagctgaaggacttacttgaagaaagtttaccaaggagaatgactaatttccctgcatacaggagtggggctcggggataccacagagcttataagggcgatgtttgatcgtgtatcgcaacgtaacccattcaggtcctaactttaaacacctaacctctgctgkgcgccagactttgtagtgcgcctgcgccttgcccttggctgcgtggttgccaggaaaccgcgaagccgcggtccctgcctctgagtctctctcgaccatggccaaattcgtcatcgcgggtgagtgatccccgcgtccgcccgcagattgctcaaaacgccgacaacagctcacctcccatggccgctyggcttggcagcctctatacggaccgctccatgctttgctatagatttattcaaagttttttactggaccgtgacggtgcgccaagcattgtgggacactggggatgcaatggagggaaacatatccctgccttagaggagctttcagtctcatggggcacagaacatgtacttttgatacggtgtgattaacgcgatgaaggagacctgcacaggcctctgggagcgtagactcctaatctgggtttgggggatgagggagaggtggacacaaggaactggctggggaaggtattacaggagctgagttgtgaaggtgtgagctgaggaggctattccaaataaaagcagagaggcaggaagcttcctggcctaacagaagatctggatatgtggggcgtgacaggacctggggctacaacaggagcaggagccaggtccttgcatttcatgtaggtcaagcaaaggtgtttgaactgtatcctgaaagcaatgaggaattatagaaaaattttaagcaggagagtagtcttaatgagtttgcattttaggaagcctgtcttggcagcaacggagagaatgattgaaagtgctggttgacagcaaggactcaactgagaaggcttttattacaacaatccatggtacctacctcctctcctcgtaaagtttcttaaaagagtagactgctcttccatctccagttctgccttccaatcagtcttggaagaaggcttctacttctgcttcctgacagaaactgctgtcaccaaagtcaccactgacttttatagaagctgtttagtctttgacttatttgatctctttgatgcattgaacacaattgacatctaccatccacaggagatttttttttttttttgagacaggctctcactttgtcacccaggctggattgcagtggtgcaatcgtggctcacagcagctttgacctcctgggctcaagcgatcctcccacctcagcctcccaagtagctgggactacaggcatacaccagcatgcccagctaatttttgtatttttgtagagatggggttttgtcatgttgcccacgctggtcttgaactcctacgctcaagtgatttgcccaccttgacctcccaaagtgccaagattacaggcatgcaccaccacacctggcccagaagaatatttttgaacactgactaaccacatggtgggaagtcagtggaaaacacacagagaatgttgcatgtatgacactgacagggcagggttctataggaacgatagcagggaccttacttaatcaggtaagggtttcccagagggagagattttaagcagatacctgaaagatgataatgaattacctaacagagaagaggtagaaaggaggggagcaatttaggcatgggtaactgggagtggggttagagcaaggagaactagtttggtgacaattgagaatataaaataagtataaaattgaaataagtttattaggactgaagcaaatagtacaaggaagagaatttcataaggtgaggctagagttagataatgtagattcttttgagccacattcagtagtttagactttatccagagtacatgaaaggtttttagaaggggaggagggcctaatcaaatctgaattttatctgaatgttacggctatagtgtgggacaaaaagactggataccaagaaaccagttaggagactagtgctatagtccaggagggagttgattgtgacctggcctagagtggcaaacaatggagatggagagaagtgaatggattggagagatattagggaggcagaatctatagaactggatgtctaattgactggaggagggcagataagggagaaaaaggagttaaacattgttcccaagcagaggtttgaataattgcagagattaggagtcactgaaaaaaaaaaaaaagcggatgagtaggtttaatactctggatactcttactactcttagataattagggagatggacataataaatataagcgactaagcacatttagtaggggaatggtgacaaaatacatcatagaccttctgagtgtctatgagacattttgaaggagatgggaaaatacaggagggtgtaggcatctagataaggagatctgagctggaaatatagattgctacttgaagccaagggaatgaagcagattggccaaaaagaatatgtaagttataaaracaagatgcttctcagaatgataccttttaatgggttgataaaggaatggaaacctacaaaggatagaaaggagtgaccatagaataggagaactgggagaatgcccccactatagcagtgtttcaaaagcctggaagggggcagtggtggcaaatgctgccaagggtcaacaagaaaaggatcggaaagtatctgctggatttagtggcatggaagtcttcagtgaccttcaagagaattgtggggtctgctacattgcagtggrtgagaaataaatggaagtgaagaactgaggatggcaaatatagggaactctttcaagatattttgatcaaaaaggacatacgaaaggcaatagctagagggggagatgagttttttgtctcttaggacaggagaaacataatgtaatgagtatatttaaatatgacagaaagggactattagaaacagatacaagactctagaaagagaggataattaactaagcaaggttcctatgaaggcagatgaggatgggattcagagcataagtggtgggattagattagacaggaggtaggactcctcttccattgaaatgaagaaaggaggaaaggatgagtccaagtacagacaggcatgtagatgtgatggacgaggttggagattttccaaactaatgccattttgttttgtttgggttggtttttgtaaagtaaaaagcaaagttgtctgttgtgttctgataatgcagaggaatgttggggagaaggaaaagatttggaggaagaggaaaaagactggaatagtaatgaggagaacagaagagagtgctgataagggaaacagagggatctccacgcagggttgagggccaattaaagctggtgaccatgaattttaaaggtgccctccgcttggttctacaatgtttctgtagtggtggctagcaggtaggacccagctacagaaaaggcaagtaattgagttcatccaggataaggggcttttatcaggctcatttcccaaaaggatagtggagaaagataatttaagacatggaccagaaagtggtttgaagagatgaaccatagatttgaactagacagggtggctgatagacaggggtagcttcagacaggttggtaacttaggagttaagttatcttaactgaggaagaatgctacagagagggctctgcatttttccccatccctcctgctctatcagatgcccaattccatctgttgtagtggctttaacttcctgggtgttgatggctacaaattgtgtgtctgaaacccttacatggcacctgcaccccatatatatgtatacatatacatatacatgtacatatacatatacatatatatccagctacttgctgatcatatccacttagacacactacaagtatctccaactgcacttgactaaagttaaatttctcattcatgatttttctctagttaaggtcagcatcatctgcccaagccggaaaatagaagttatcccagattcttctttcccacccccacaacttcctgacacacatcaaatccaaaagtgactttaccaccactcctcacttcaaactttaccttttggtggccattagtgagtagttcattatcagtactaattcatgctgaattagtagtagttagcagcctcctagaggaagtgaggtctagcatattactagaaaagaataaatattcagtagggttttttttctttccacattttgttacttaagattctgacctcctatgaagtttattttatttgtattaatctaataaacatcagaagtttatgtaatagcagtttatactgcaactttatgttatcaaattatatcataactatgactaattctgtaattacatagcaaatacttagaactacataataatttctgcatgatgaaagaaaacattgctaatttgaactcttttaggtagagcagattgtccatattatgctaaaacagaacttgtggcagactatttacaaaagaatcttcctgattttcggatacataaaatcacacaacgtcctgaggtttgggaggtaagaagcctttatagtttgttgaactcactcatgcacaaaatgtgttttaatttgrttaaatattaactggtgtattagactggcttctaggaatgactgttcatgtgctagtgatatttgaatactagtaaaacaagtccctacttaccagtctcaaaataatatttatgttttttccctaatacctagtagaacaaatgagaccctaatcaataagtagaataagtttgactgcaccccctgaagaatccaggtagcttacactgcacttgttaacttttcattctccttggtattgatttccaatgacttatttgggatacccttctttgggactctgtttccccagaaacagactttgagatgtagattttggtgaaggggctttactgggaagtggtcttgggaacagcatcctgaaacggaatgagggyggcaggattgggtaaagggagaakttgaagtttgacatagctgcaacagagggctcagcggatcccacagtgaactcttgatggcctttcagaattattccaaactgaggcaaggtagctgagcttttgtgctccctcctcaaccagccatcggatatcagctgcccctgggaaggaacttaaccttaggcaaggcaatttgctttggctgaagtcaattcctagagagagaatggagtcagactttaagttatcagcctctaatacaccaggtgcctgggagagtgagtgcctcatttgtgaagggggaacctggagtgtacatgacagcactggctacagttcacctgttgtgccttttggatccacatgctccctataatcagttcacaccatcttggaacagctcctccaggattctggttgccatctttccctgggtaaacttgataagagaaaggatagtcaaatgaactatagtctccactgctcatagtttcagggccaaactgacagtcatcaccttttctctccctctcttctctaccatccattatagatttccctcactctctgctggtctggtcttcagctaagttatctcatctgctgggttggtagtgcttctgtyacaataaatgttgtctggttggcactgcccactggcctctattgtttcaggattttatcatctcaattgccagggagttcaggtgtgtggcagcatgtcctttaacagccttggctacaatcatatgaaaaaatgctcaacattrcaggttattagagaaatgcaaatcaaaaccacaataagattccatctcatacccgtcagaatgactattatttaaaagtcaaaaaataacagatgctggcgaggttgtggagaaaaaggaacacttataggctattggtggaagcatagaaagatagaaataacattcaacccaaaaatcccattactgtgtatatacccctgaaaatataaatcattcttttataaagacacatgcacacatatgttcattgcaacactagtcacaatagcaaagacatggaatcaacccaaatgcctatcaatgatagactggagaaagaaaatgtggtacatatacatcatgaaatactacacagccacgaaaaggaatgagatcatgtcctttgcagggacatggatggagctggagatcattatccttagcaaagtaatacaggaacagaaaaccaaataccacatattctcacttagaagtgggggctaaatgataagaacacgtggacacagggagggaaacaacacacactggggcctatcggagggtggagggtgggaggaggaagaagatcacgagaaataactaacgggcactaggctgaatacctgggtgatgaaataatttgtaaaacaaacccccatgacacaaatttacctatgtaacaaaactgcacttgtacccctgaacttaaaatagaagtttaaataaagaaaaaaaaaaaaaacaaacagccttggcctagaacggacagccacactgggctcctcagtgacaccaggacccctctcaccagtgcattccttatcacttaggtgcatgttgtatcctccaatcccttccagagaacatggttgaatggcgggctttctagccttccatagtaccacgttcactagttttttttttgtgtgtgtgtgttttgagatggagtttcgcccttgtcgcccaggctagagtgcaatggtgcaatctcggctcactgcaacctccgcctcccaggttcaagcaattctcctgcctcagcctcctgagtagctgggattataggcacccatcaccacgcctggctaaattttgtgtttttagtagagatggagtttcaccatgttgaccaggcttgtctcgaactcttgacctcagatgttccccccgcctcggcctcccaaagtgctgggattataggagtgagccaccacacctggcatcactagtcttttgatccattcttctaccgtcttccatgaagtctggcatttctattttatttaattactctctccaagtttctaagagccagtctggcaacatgttgtccctgtcttctgaggtccttgccagggtatacactcttgaattgccgaaaagtgattcatactaataaattctcccttgtctaacttcatgttccactcttgattcagcactgtaagggtccagtcttgtacatgcccttgcagctcctgctgggacattaacatgctttgcagggtgcagaaggttttttggggtaatgtctctttccttcatgggcccagtagttcactggtctggctatgctgtggctagagggaccgtgttggaatcctcatagcagcattgtttgctttaagtgagataaaggcaggcagatcttcaatattagcaaggaaatcagtttccaggattttattggtaaggtggcctcattacccatgcctccaatgacgtggtttttaagactgctgccatgtactttgctgataaaaatgtttctgtttgactgtactcagatcttgtcattggaaggcctagcctatataaatcagataatgataatttaaattttttctgataaatattgtcggaaatctccaaataacttttagcttattaatwtagtctgaactacataaaccacactcacagattttaaaaaaagtatcaagttttatatgcccctaagactggaaatattgcatgtgtaaaagaataagggcaaaactagttgaatttttttaaaaatcagttgagttggaacatgtgacctctctttaagctaaacacttggattccaggtctcctcagcaaaaagagcaactttcagtacctttatttggtcaattaatttgaagaatatgctttcttatctaattaatctgttactaacatcactattttctatatttacattttactctttgaagatatctaaattatattatgtgtatatagtgacattaaaagcaacctagtattttaatgtttgaattctaaagtatgaaattgaattctcaggcagatttaatatatgacttcacttgggatatcattcaacaggattggctaaaagatgtgtgtgaaaagaataagtggagtcacaagaattcccctatcatctggagagagctgttggatcgtggaggaaagggtttgcttttgggaggatataatgagttcctggagcatgctcaggtatataagttaacttatctgttctaataatgataattctcttacattattttatttttcaaatatcttgctttctgagacattctctcatgtctctttttattgtcttttgactttaaacaaaaactttccattatagccaatttcaactagttatctattctctgatattgactttttctctcccaatatttagctttaytatgatgtcacctctagcatgacgactgaactgatgatggtaattgctcaagagaacctgggggcacatatagaaaaagagcaggaggaagaagccctgaaaacttgcatcaaccccttgcaggtctggatcaccaggtgggacagtcaaatcccaggattcatgagatttactttttatatttagaaaggacaatgagatgggattaatttcatgatggaagaatacctgaatgtcaggtttgaaatttgtgtgtatgtatacttatatgtatacacatatacatatgcatctctgtgtgtgtgtgtttgtatcctccatataactcataaatgagttttatgttttatagacacaaacacagtcacttggtctaaaaacaactctatagcatggctgctttgcagaagctcaccctctctgactgttgctctctccctctttcccacgtgctagagctttctttgccttttctctatgcacccactccctctctgtaaccccactcccctcgccttgctcccctttgcttttctccttctcatgtgtgctccactttgctcccagtctgggcacatgcagtctttgttgtcatactctctctctttctttctctgcactgkctctctgtctctcttgctctctctctccctccccttctcctttcctcacccctcagtttgtcttttgcacttttcctgctcttacgtgcatgtgtatcctaatatatactcatttttaaaattgttattatgaaatattttaaatacagaaaggaattgagaatgatgtaataaacatccatgatcctataacccagatttaataactatcacatcttctttagatgtttcaaaggattaaatcggtacagatactgttgaaacccccattatacacctccccaaacccactgtgaataccagaaatgcccggatgcatttctgaacttcccatggtgggcattacagttcacagctgatagtcacagctgtagacaactgcagaattgtggctacagatacaccttacatagcctatgttgatcccaccatctttgtaaggatttttctgtgtaagaatttggaaaagatagccctttccaaaaaaaaaaaaaaagtcattattgtgtagatgaggttgtattttttaaaaaagagctatggctaactgaaacttacatctttatctttttaggaggaaatataaacacataattacagtaatataatagttttttwattttgatttctgcatagggggaattctgttttctttgaaaaacctaataaacaggtatatttcttatttggggactgatttcagatggccagagcaagggattggtagtgagaagtttttgttctacttttgacttctagccttagaatgtcagkgcagctatgtgtgtgcttatttaaatattaarccaccctattgatgcacatgcagaaatatctattaagaataaaggcttaaaagggacaaaggatataactattcacartgcggctttgcatttttatcagtgcctctgctcctgcctgctacaacctaattcccatattgacgagtggcgaagtgtttgggatgcatacagaaattagcataactctatttgacaacaagcaggcggaagaacatctcaaaagccttgtggtggagacccaagacctggcatctcccgtcctgcgcagtgtctccatctgcacgaaggtggaggaggccttccgccaggcccacgtcattgtggtgctggatgacagcaccaacaaggaggtgttcactctggaggactgcctccgaagcagggtgcctctctgcaggctctatgggtacctgatagagaaaaatgctcatgagtctgtcagagtcatcgtgggagggagaacctttgtaaacctgaagacagttttactcatgagatatgccccacgcattgcacacaacattattgctgtggcgctgggggtggaaggygaagcraaagccatactggccagaaaactgaagacagctccttcatgtgagtgaatgtctctttatgtttttgtttttattttgaaacaacatgatttcaaagcagctaggaagaacactgtcccctctaggaacattctgagtatctggaataggaagtataaaacagacataaagaacttattgtgtgatttgactactgtgcaaacatttttttttactggcttttgtgtctggctttttccatcattataaaaatcaataaatatttaataagatacaatttatattattcaggtgataatgtgacacatcgtattccatttttcccatggtaatagtcaattaagataaccagtgttttaaaaaaaatcaaaactatgtgcaagtggctctgccctacttcccacccgtatgatcttgagccgtcatttagtctttcagtgcgtcagtttcctcatctgtaaaatgaggacgttaacagtgcctatctcctagaattgatgtggggattcaatgagatgtattcctaaagtgctaagaagagtgtatggcacataataaacatttctaaggatgttaaacttatcaataggattatgatatctgatcggtttctgctcctattaatctttgaatggtaaatatcagaatcataggaagatgagaagatgagactagatcagaaaatggattgttgtatttgaaaagggagataatattggacatattttagctacttttgcccttagatggagcaggtgcaacagtgtccattgagaagggaaggagatgacaggcattctctcaagcaaaattggaaagacaatgaaatgtgagcctagaatgttcccagttaggacaattaggcttcagtgaacccctaacattatagccagagctatattttcttttttgttacaatgaaactgtaaataataatttccggtattcttgcatacatatctttagtattttatccccacagtcactacaacactcaaccaaattgatgctaaaattattcagaaggaaatgaaaacttttttctattttatctctgtcatcaaccttataattatatgtgtagacagtgacttatctcagaaagtctatgatacactactgaaaagtatcaagaagaatctaaaacaaggtgtatgtgtgggtggggtgtggggttgaggggggttgggggctttcagccagaaagctgctgtcttgtgggtctgctggtgccatgactctaagctccactctactcaaatccaataagcatgtgagaagcagaaaaaagaaaaatggaggaaagttggtaaaaggaaaaaggcattagagggacagagtccaagtagaattgtcagtgaggcagcaaagagacagccagcaatgaccaaagttgagcaaaacatcatgaaagagaaaaaccaccaaggaaatgattcagggattattctagatgccaagagggtggcaaaccttttcagaaaagcaagattcatgataayccctaagttcagttcataaatcactatttatcagaccatgtgtattggctcgtcaggactccttctgttgcaaaaaagtcaactcacrgtgactgaagtcaccaggtaccatggctcacacctgtaattccagctacttgggaggctgaggcgggaggatcacttaagcacaggagtttgaggctgcaagtgagccatgaggctgcagtgagcctggccaacagagaaggaccttgactcaaaaaaatacaaagtgattgaagtcaagtagagaacttttttccccacataactgaaaaacacaggaggtagttcttatttcagacatagctggatgctggggctcaaacggtggtgccaggacatacctgtgctctctctgctggcctatccctctgctctgctctctgtgttgatcttctcagttcagccctaaaaggtggcagaatggtcactggcatcccagactcacatgcttgtagtttacgtaccccaggagaatgagggctttctttcccaattgtttgtgcaaaaaggaatacaaactcctcgtccaggcttggactgcatgcccatctctaaatcaatcatcatggccaggggcagggggtgggtgggtggaatctgcatctaatgcctataggtggacctaaggcgtgaggacagtcccacccgacagatagggactgacactggagaaggagtagttatttaaagaagaatcaggatgctcttaatgaaaaaaaaaaaaaaggaggaggggaaattcatgccaagagggaagaaagcagatgtccactatcattctctgtagcataatttgggatgtttagagctatcaagggcctcaaagctgataagaaaaatgaaacccagcacaattaaaagggttctttaggctgtaggaaggaagcctaccatatgcttacctggcccaagaattattttccccatgtgggatcctatgagctccaaaccctgactcccaccctccccaccctcctacaacctgcagctgagggacccgggagcacatcactaactcccctgagagttgggtggtggagggagaactagctattcctactgcaggaatcattccgatgggggcgggaatctcacaggacaaaggtagacagtgatggtgggctaccgaaaatctgtttcctsctctcttctgctagcctctctctactatagaggctcaaacaatcatcccttttcttagcttcattgcaactaggagtggttgagtgatatagtctatttggggtcccctgggaagaatatttcactttttgaaaagagaaaaggcaaaagaggaagcttctaccccatccttttccctattgcctgcccttgaacacaactgtgttagggtaatacttgaacacaactgtgtgacagagggtgatagttggagctgctgcagccattttatgatcatgaggggaaggccaagagaatcacatctctgagctgctgaaccagcacatgtcactgcctaccatgaattacctgagaaaagtagtccttctagttaagacaagtcagtaggatattctgttagttgaagacaaaagcaatcttatacaggagaagagggaagaagttaatctccacagtaagaagtggtgtggacttaaaagtgattaagtttttaggcaaataagttaaataagtaaataaaattatttatttaaagttttcatacaacattcctagacagttaacaatgataaaatcatattgaatgccaatgcctatttctctctaaccactatggtcttattttacttcttagcatgtatcgctttgtataatagttgttttctcatccacttcccaccacccctagaatgttgtaaggatttgggctgatttgttttcttctaaacctggtacctagaggtgtctcacacatagaatagaattcataactatytgttgactaagatgttgcccagggtcctcttacaatatcctcattttgccagagatgaaacccatcagagagttaaatgatttgccctaatttctattctagtctagaacaagaactccttgtgaaaaaccaaagcatattaaaaagtcctttctccctcacctctcttgacctctcactcactctctctccacctctctctctctcaatggtaagcaaagtcaggacaaacaccagtgaaataattttcagtagcagtttctttcaaggaacatttcattatttctttaatttaattatacaccataccattcatagaacattattagggactgccaaactatgacagttagggaggtgatccacacaatttgcacaattttaggaatcataaacctagattcattttataccaaaaagaccaatcctaaaacaaacatgcacgcaaacaaaaaataggcttcaggyaattttttatattaacatacattattattatttttctaaactttctrttcttcacagacattaaagacgtgatcatttggggtaatatcagtggaaataattacgttgatctgagaaaaacaagggtgtacaratatgagagtgccatttggggacctcttcattattcacgccctgttttaaacttgatttttgacaggtacagtatattttgaagtgaagcatactgacaatgttaaaataaatgtttaatggttgtaatcttttaaatcatctcataaatctttgtacaaaaataacttgcattgttcacactcatatttgttcatgctgtstactgaagaaacagaaaattccacagaatrtcaactaggtaattgatttgattttgaaattatgaatttttatatttcagatccttcagtagttcatatattcaagtaaggttatctctaaagcaagcatgtataagggaatcttacttcgtgtaaagacagagctatctatccaggttgaaattaattgaaacgttttcaagaaaggagttaagacgatgagcaggcacaggccaggctgggcattctgtggcaggaggccgaagcaagaggtggtgaggaacacagtcctaggaccaagccacccaggctgggattctcacttagccacttagtagctgtgtgaccttagtagctgtgtgaccatcatgttaccatttccactttgcagatgaaaaactgagttacagagaggctaagcagcctctctgtaactcagtttttcatctgcaaagtggaaatggtaacatgataagggtcctccctatagggtcttggggaagataaaatggattactcccaataaaggacttagggctgtgtctgtacaataagcactagcaattatgatgaggcagaggagaagcaggaaggagcacctctgaagcattttttctaaactttgcagcactttcccagttgtaggattttctttccattgccctttgctttccttttcttcctcagaccataggagcttcgcccctgcctagggatgatgtgtcccgagttcactattttgaagcatgattcctctgcatttgctgcgtgggcaggaccagtgttgcatagagctgtgtcgtgcagggttagcagaagctaaccagctggactattctctgaatttagacttcagatcataaaaacataattattttcctaattctcaacgtgaatccagcttgaacaccccaatccaaaaatcagaaatctgaaatgcaccaaaaactgaaactttttgagcaccaacatgatgccacaagtggaaaattctacattcggcacctttgctttctgatggtttaatttacacaatctttgctttgtgcacaaaattattaaacatgttgtataaaattaccttcaggctatgtgtataaggtgtatgtgaaacataaatgaactttgtgtttagacctgagttccatcctcatgatatttcattgtgtatatgcaaatattccaaaatctggaacactctggtcctaagcatttaggctaagggatacgcaacctgtaattcaatgtttaatgaaattattttgtttaatatgtagggtactactggttccaaggtagagtctacacaggatcaattctttgtaatgaaaataatggttcttgccattttcagccacttttctatgttccatatttatagtatcatatttttagtttgacatcttgggactcctttctactacatttcactatttttcaattgactttttatggggatcaaagacacttgaggaaagacactagaaataaagctgtatttctattttgactgtggattaggtttctgatacttagttccaytgagccagggaacatcctttttctctttaattcctctctccattgtaaaattgtttctttctctccttacagtgagtgggtaaaaagagaatttgtggcaattcttaaaaacttgaccaccacaggaagacaatttggaggcattttggctgcacacagtatagccactacactgaaatactggtaccatggctcaccacctggggagattgtatctttaggaatattgagtgaaggtaaatctgggtttttcatatcttgtaaaatcttaaaacctctatctataactsgtgctcctaattctgtgtccccacccatctagctcttaacatggtccattagctgcctggacttttacaatttcatactcattcattcattcaattactcattcagaaagtcaacaatattttgtatggatgcattggaaatacacataggagttaagacctggcctctgccttcaggaaacctacagtggaataaacaagagccagatacataaacaaaatcatgttgttaggttttcctagcaatagataaagggaaagcaaggtcaattctaggcaggaagcaggtggaaccaggacaggcttcataaagaaggtgacactacagtaagcctaaagtatgaggagctttgacctggaagacaagtgtggaaagaacactgggcacagggaaccataggagcacagacacaaaggcaggatagagagaggcacttcaggacccagatctcagggtaccaggcagcgctgggaatgtggaaaggttgctctccatccacgaatactgcatataaacttttacagccctaatgttttaatccgctaaaaactatgcagaagaattctacatttttgtttgtttgcttgagatggagtcttgctgtgacgctcaggctggggtgcaatggcaccatctcagctcactgcaaccccctccttctgggttcaagtgattctcctgccycagcctcccgagtagctgggaccacaggcgcatgccactatgcccagctaatttttgtatttttagtagagatggggtttcaccatgttggccagaatggtctcgatctcctgaccttgtgatctacctgccttggcctcccaaagtgctggggttacaggcctgagccaccacgcccggctgacttctaccatttttacaaaacaggaaagagaatagctgctgttctgtcatctgtaaggtctatctgaagcatctcttccctttgggttctactttctcccttagcaagctaattcactcccagagctgcagacctggacctctctgccgagctctagcttctgaaacattgtcacctggatgtcatgtcatcacttccatccaacatrtaccagactgaatgtactgtcatccttcccaattggttccatctcttgtattctttatgttataagtagaaccaccatcttccctattgtttcagtgacgccagtacaggttaaggaaatctccccaaatcccccatgtcagaattaatctctgtctctcctccgtatccccacatagcattttgttcgcctatcacggagaatattatagtgtgcctgtttttgatagtatgattagttgcattgtccccttccttgtggcaccctgagggcaaaggctttttctgggccacctctttgcttcttcacaggagaagcattttatatggtagacactcaatcaatcttgttcaattgaagttaaggtgcatgaacattgccataatgtgaattcagatcagcaaattatctccttagggaaataggcacttaaaaccttacctttatttgtagaaagaaagtttaattaatctctgtaggaattgtattcaaaaataaacaatgcagtacttgggggaggagggtaaatgatcattatctgtctctctgaaaccataccaaataggtaaaccctcagaccttgtctgcccataaggctagctcttcacagattaaacaaaatacagcattacttgaggacctgggaagccctctaaggaaaagtcttttagatcttggtttctcgaatgtcctcaatgttttgttgttgttgttgttgttgtttgttttttttgccctggtgatatttttgttgtctagtatggcagaaataattttcttatgtgatygaggcaccagaaacggggacaattttgtctgaatggtgctcagttagtaataaatatggtcaatctttttatttagagcacatccaaatataagtatttctgtatatcttaaagaaattaaatgtgttattaaatgaaggatggcttctgcttaagacatagaaatatgtaaaggaaatcatcccccatgaagcaaacgcacaccaaaacacatggcaaactgggggctgcaaaggaataaccaaatttcctgcctcccctcctttcccttcccaattcttcatactctggctgtgtgagtgctgtagcaggtgagaagagtggaaggccagatggacaaatgacttaggctcatgggctgcataggggtccagggaaaagccatgcagacagacaraaagaatacagacagggttcaaaagagaaagactgcattagcctctggatgtcagataaatacagatggcagaattgttagaacttgratagtcgctcagtcaatccttctagagggagtgtttcagtcctctttggagaagaattccgagaaatttaattccatcattatmattaaaaatcctatactatgtctgtcmttttctacaatgcttaacagaaaaggtgcatgtttctaagttctgctgcattgctttgctttgtgtttgctcactgcaggccagtttggtattccgaaagggatcgtcttttctatgcctgtgaaatttgagaatggaacttgggtggttcttacagatctcaaagatgttgaaataagtgaacaaataatgacccgaatgacaagtgatctaattcaggtaatgtcagaatagatgcaaggggactgaccttgataatgaccttaaactgattctcctaggccaaggcatacattggtttttctatggattcaaatttttttttaattcttaaaaataatgagataataaaagtttgaaaaaaatcagtgaaggaacactactcatttagttatacaatttctggtatgttaaaaatatttgttcgttatttaaaaatgaagaatcaaggtgtttttctattaaagaatagttaagttgccgggtgcagtggctcatgcctgtaatactttgggaggtcgaggtgggtggatcacctgaggtcgggagtttgcgaccagcctgaccaacatggagaaaccctgtctctattaaaaatagaaaaattagctgggcatggtggcacatgcctataatcccagctactcgggaggctgaggcaggagaatcgcttgaaccaagaagggagaggttgtggtgagctgagattgcgccactgcactccagcctgggcaacaagagtgaaactctgtctcaaaaaaaaaaaaaaaaaaaagaagaattaagttaggaattgtggtcatttaattctgtgattataaaatttcaacaggagaaacttgttgcacttggagacaagatacattttcagccataccaatcaggtaagctcttagacgtgatgttttattggactgctattaaaagagtattaaaatatttgttataactgaatcactgttaatatgaataactctcatttatattttgtcatttctaaactaatgacaaaataaactgttaagttcaatgtgtcctttgaaataaaacatctcataagaatgttaaagaaaacacaacttatgaacactatgatcttataaatgttgtaggtaacatatttattaatttcctaggactaccataacaaattaccacaaagtggatggcttaaaaacaacaraaatttacttgttcacagctcaggagactagaagacctgatgtgaggtatcagcagggccacactctctctgaaggcttgagaaagaattccttcttgctttttctagctttgggttgcactgcttgcattcctggcttgttgctgcatcactccaacctgtgcttccctcttcacatgtccatctttcctctgtgtgtgtctgtgtttctaagtctctctttctctctaaggataccagtcattgcattcaagacctgccctaaaccagtctgaacccatcttaaattgattatatccaccaagactccatttcccataagatcacattcataggtaccaggcgttaggacttcaacatatatatatatatwttwtttatttatttatttatttatttagacrgagtcttgctctgttgcccagactgaagtgcagtggtgccatctcggctcaccacaagccccgcctcccaggtacgagcgattctcctgtctcagcctcctgaktagctggaactacaggtgcacaccaccatgcctggctaatttttgtatttttagtagagacgaggtttcactatgttggccgggctggtctcaaactgctgacctcgtgatccacccacctcagcctcccaaagtgatgagattacaggcatgagccaccatgcctggccaacttcagcatatctttttggaaacacaattcaactcacaacaccagatttatttttagataactttattaaaagccaacaaatttcaagaagcttatttttcttattggtattttctccactcataagaaataggggagggctgacatcttttctttgccttaaagatgatctcatcttaggtatggatatatacatgtagaaataaatcaatttatttatgcaaagggctttagtcaagtgtcttttggagcccaatattccttccttctgctaatgtgtgtgcagtaccaactataagccagtgctaggagctggaaatacagaggtgaatgagatagacctgatcttgccctctgggaacctgcagtccatcaagaggctggccacacattatatagatgactgcaactgtggtgcgtgggaggagtaaatgttggctgctgtgctgtcagagctcatgcctgcggatagaagggaagaatctgaagcaggaaagtacatatcaacttgtttggaaaaactgtggaaaagctcatgtggccaaagccagaagagatggagctgagagatacagccatgaggagtagatgtgagagctacagaagatttctagatggagagaacctggtcagttgtgggattagtttgaaaaacatcctggaataaggcaaggctgtttgcagaaagactggtattgagggggagtgcatacagccaagaccagaggcagtagaaatttgagagatatttaggatgtggaaatatcaagamttgctgatgaatctgattggctttggtgaatcccagggttcttctggctgarcaactgggcagatttactattgataaggggaaawtggtaaaagaatgagagagagagagaaaatatgagaatgtgggaggggtgtgtgtgtgcatgcacgcctgtggatggaagaggaagaagcatggtgccagattagaaaaagcatgagtttcatttcttacattttgattctgaaatacctgtgtgatatctaaaatggaaatgtcacatggagaactgcatacttcctggagctcagaaagatctggactacagttgccaaatggggagttgttgcctcataaatagaaatgaagctatcagtatggtggagattgtctagagagaaggtaagagaaaaaagcctggaggaacttagcctgtcatggttaagtagaacaggagcaactgacagaggaccatgagaaaggggtggtcagagagtcaggataagtccctggaatctgatgatgtaaaagacctgaaggcagagggtgtttcaagaacaaggactgttctacactgtcagatgctactggtgtgtcagataaaatgatacctgaaaaatacccaatggatgtatgacaaaggtcatttgtgactttaatgagagcaattttgtgcaatggagagggcagaaatgagaccagagtagaaagcttcctgagctgcaacattaaacgccaagtccctacttagtaggcccaagtcaataaattcagcctgatccaactctgtgttccttcaactattatcccatacccttaatatccattcccatacctgttctccagatttctgtttatataaattagagacatcggctgggcgtggtggctcacacctgtaatcccagcactttgggaggccgaggtgggcagatcacaaagtcaggagatcgagaccatcytggctaacayrgtgaaacccygtctctactaaaaatacaaaaacaaaattagccaggcatggtggcaggcacctgtagtcccagctacttgggaggctgaggcaggagaatgrcgtgaacccaggaggtggagcttgagctgagattgcaccactgcactccagcctggatgacagaatgagactctgtctcaaaaaaaaaaaaaaaaaaaaaaatagagacatcaagcagctctttttgagtgtagcacacttcttcatgggtcatactctcaacctcacctctagaggcccaccaagactttagtctagttataggtctagaagcaaacaagggtgttaggggtggctactgaggagaatcaacattttccctggcaactgcctcaggggaggccgtcactcttgcctcaggcagcacagggtttatctcctcagacaaaggtggaaaggctgatgacagcatgggtcagggaggggatgttgccactactgggtatggggaagctgttccatctggcaaaaaaggttcatcagagtttacaaactcagtgtccccagcttcatcagggttctcccacacgtctccattccaagttgcagcatcccattcttttccaattaatgccctcactttaacaggagacacctggcaaggctgtgcatacacttttcgttgcagttcarccactcacataataagagcttgtgtctgtttttccacaatttcagctctttctctacaggagataagactcactcagggcaatctttgcagatttgaggctcagtatctgccaggagacagaatctcygagttcatcattttctttcatcactttgtccactgaacttaggagcagctaaccagcttcattatgttcctttgttcaccacatatggtcaaaggtattatgtatagagtcactaaactccctgcctctcatgggcagtgaatcaggagtgtcaaatkcatttattttgcataactcattaaacagttcatgccaaggactatcagtgttctccatactattaaaagtagagtccttaggtccttagcatttggaggtcgaatcatactaagcagccaactccagaaacccgaaaaccaacaaaagaactccatccttaatattttgtttctctagaaccactcctggtaccaaaatctgtatagtcaaggttccgtagagggacagaactaataggatacttatgtataaataaaggggaatttattgagtattaagttacacaatcacagggtcccacaatgggctgkctgcaagcttgaggagmaaggagagccagtctgagtctcaaaattgaaaaacttggagtccaatgtttgagggcaggaagcatccagcatgggagaaaaatgtaggctaggaggctaggcaattctcaccttttcacatttttcttcctgctttatatttgctggcagctgattagattgtgcccaccagattaagggtgggtctgtcttccccagcccactgactcaaatgttaatttcctttggcaacaccctcacagacacacccaggatcaatactttgcatccttcaatccaatcaagttggcactcggtattaaccatcacaattagaaaaagataagtattatttcatgtatttttttgtttcattaatatgtacacaaatgtrcacattggactataatgtaaaatgtgtcttttattgtgggtcatagtcactgaagtttgaaaaacattgactcagaacatctcatgacctagtyaggttgttggttatattctaaatccagcatgttttatttaattttgatttcaggacataaagatctggtccctgatgaagaaaaaaatctagctatgtcagatggtaagtcagtggggttataaacaatgtctatattgctaatagtcrtgactcatattgtccagttgttagagaataatgttatggtctagcgaccaaagcaagttttaaataactgcttcttttcatatgcttcacaaacactttgaaatgggcataaaaatgtcaacktttttttaaaaagcactaaaactgcttccttgtcatattcacctcaaactctcccaaaatactctaacttcagctccagtcccttgtatctcttgcttctcacctttcccttttcttctcaattctctattatgaagcccaaaataaccaatagggcaagatagcatcttcctcagaacacaggtgagaggaaaagaccgagagaaccaagttagaattctccttaacagggaaaatctgggattttttgtctcattatgtgtatatatatctcatcatatatataatttataatgtattacataaatacacacacatatgctgttgacccttgaacagcatgggtttgaactgtgcaggtccacttatgcagattttcttccacctctgccatccctaagacagcaagaccaatgcctcctcttcctcctgctcctccccagcctagtcaacataaagaaaatgaggataaagaaccttatgatgatccatttccacttaatgaatagtaaatatattttctcttccttatgattttcttaataacattttcttttctctagctcactttattgttagaatgcagtatgtgatacatataacatacaaaatatatgttaatcaactgttattggcaagacttctggtcaacagtgggctattagttaagttttgggggagtcaaaagttacrtgtagattactgatcacacagaggaatggtgtccgtaacctccacattgttcaggggtcaactgtatacatataatgtgagtgcttgcaaatatttatgtagagaattgtattttttctaaagctgcctatacaaaccatatatcaaaaaaataataatttagtctgtttccatttttatggcttcatctgaaactatctatttagaaggaagctagcaatcattgagaagttgcccagtggtttatgggggccagggaaggaggcttcatagggatgttggtagaaagatgctatactgagcagttgactgaacatctgcttgttcatattgtccactcaggacatagataagtcatcatcaatggttgagactttatataacagtggtctagcatcttgtaactcctaggagagcaatgcattcagagaaacctcagagtggaaggaacaagatagaagaaaatggaaataactgcaaaaattattgcgctttacatactaaaaactattcttttaactctatttgcagcagcagagtttccaaatcagattcctcaaaccacctttgaaaagccacagagtcttgagttcctaaatggtaggtggtagacaaaacattaactagtattttcttattctacaagtggaactgggtaatagaggatcaaatttccttgcaatactattcttgtcaaaccctccccacttcccacattccccagggacccagccttggttgcttactctcctggatcccagcgtcccactttttttttttaagacaaggtctgctctgttgcccaggctgaagtgcagtggtgcggttacagctcactgcaacctcagcctcctagatttgtgcccctcccaactcagcccctgaagtagctgggaccacaggcatgcatcaccactcccaactaatttttaattttttttgtagatctagggtctcacaatgtttcccaggctggtctcaaactcctgggcccaagtgaccatccactttggccttccaaagtgctagaattacaggcgtgagccaccgtgcctggcctgcttcccacttttgcaaccaaatccttaaatccttcattaaatccttccctcaagatgaataagtaaggaaattgacacaagtaatctgcatgtccagatttcccaagtatataactgagttgaaaacaaagctgacgtagatttctttgtggttgaccaatcaggatattcacccaagcccccacccttttatttaaatgtccaataaaatgaacaaaatttcatgcacctttcattctgaaatgtatggtatgatggacttaggaatggggctaatcagggggaattagaattggtacatagaggagcagcaaagtcgagcagaaatggagctgacaacatagctgcatacataatttggaatgaaaagcaaggtgacagragagagcacataaaaatagcttgtggccagggaagaggccacaattagttttgctatatgaaaatacctaactatgatctcatggctttatttccccatagaatcactctcacacaygcactttctcagctattgaatcatgaatacaggaatccagcaaacaaaaaagctaataataacatatgctactaacatattttggaaatagttatgtcttttcattcttttccttttacagamtttgaaggcaaarccgtggaatcctaacagatcaaattggatgaaatatataattacttgatagcacaataaacatagaaagaatttatatgaatgtctatatttaaggaagaataatttgaaagatttatgtcagtcttagataataccatgcaaggcaattaaatcactgtgacagcacagaggtcagagttccgtcattttgcattacttgtatccactcatgtttgtttcataataattgcattttcttagaactattttggtgtcaaatgctattttttatattacattaaaatagagttgtcagtcattgcatctgcccatacatcttctgagagaamctgcttccttccatcagccatacctaagacctgcacctaagtggccatgtttgctcaaatgtcctcatcaccttggcctcaactaattaggccaaacagatgtacttcactcaaggagaaccaatcatattttctctctgtctctcaaaaaaaaattgaactgagaccagtgagtaagttggtgtctgggtcaggttaatggtggtgaactatgtgcctgtgagctcttcagagctggttgggttcaccaccttcataagacctgcctctgtaccatttttccttgagtgtgctttgtataaaggtctgtacaataaatcacacttttttaaagcttagattgaataggtttctgctccttgacaagagatatggcctgaataaaatgaattttgaaagaaaagcctaatatttttactatataattgcatggtttaagtaaaaattacagtcttttattaaagcagtaatagccaaaccagtatgctgagatattttccagctaataaggccctttaccaatgccaattaggaacttttgaaagcccaggagtcatgtgaagaactgctgatatctgtgctttctctgtatgtttaatagctcttaagatacaaatcactttctgaaaattcagggaaattgtagctgcatcttctgcattgcttctgcaccatcataatgcaatgggtaatttcaaacccatgactgacttctgcttgtttccaaagtcagcacttcatttgatgttattgtgaagaaagcttaatatccgtgttaaggacattgattttgtgccctaatcctaccaataccattgcctgaccttgtagggtcctcaacccaaggaatgtgaccacagagaacaagagctggatgggaaatcaaatggtgctttacgcagagctgggcacatggcgattgctcctcaacatacagggcttcttatgataaaactaagcgagattagaaactgtgattcagaccaagaagcccaagctaaatttcccgctccataccccttgaatcagttatgtgactcacttattacccataaccagatagaaaagctagaccaaagaacacaaccacgaacacatcacctttcaaagtagtggccctgccccttagtgattttcttcccatgagtgtcaagttgtgaacaatgagataataagcttcttctccaattggtggacaactaggaaagggctagaggagacctagacagagttttgtccccttttgggacatattagtccccatccccagaagtctctacttccagcgtgaatatgaactgccatatgtttggaccaccataggatgacaagaatgctctagaatatactcctatagaagaatagaatggattgattttagtcaccatatctactaccacacatttgtcccaaactaatatatggaattacactgggaggaaagtgttaagtgtttgctatttatttagaaataattacgatgccacttcaaaagtatttttcagggtgatgtggtttggctttctgtccctacccaaatttcatcttgtagctcccataattcccacgtgttgtgggagggacccagtgggagataactgaaacatgggggtgggtcttttccatgctgttctcacaatagtgaacaagtctcacaagatctgatggctttaaaaatgggagtttgcctgcacaacctctctctttgcttgccgccatccacataagatgtgacttgttcctccttgccatccaccatgattgagaggcctccccaccctgtggaactgtgagtccattaaacctctttcttttgtaaattgcccagcctcgggtatgtctttatcagcagcatgaaaatggactaatacacagggagttttttttttttctttattttttcgactgatgcactggttctcatggtagcctgttatatataatagaccaacttgggaaatctcaagtctgatttccccattaaaagtaactttaatgtgaggttattataaatagtttctctatgttgttaaagctatcatggtaaagccatgagagaggaatattctgtagaaaaattagagtattgtttggagaaaggcattatgtgtataaagtaattaattggtcactggaatatgagttaagtgtctataaatctttgtaactatagcaagcactattagttgccctccctacagccctgcttaattctcatgaccaacagaactctgattttgttgggatggttgatgggcccaataaatagtgagatacctaatttagtcccatttgccagtgattggcctaggggtaggcatacagcccattttggacactgatagataagtcttctggaggcctgcatgagacagagagaataaatggtatgtaaggagaaagcactttggctcccacctacttccttcctgcttaaaatgctgtcctactgggatgtaatgctcacagcttcagcaaccattttgtagccatgagaagagacatcaccagcataggagggtagcagtaaagaaagacagaaaaagcatggtgcctaatcctgagggcttgatggcttcaaagagcctctgaaccaaccctggatcaactccagaatttctgtctaataaacaataaataactctatgttttaagtgcatgttattgatgggttctattacttatagacaatggctgcatacttaaatatgtggctatatatacttatagctaacagctatttaacttactagagaaatatctttcaatttttcattttaagggaattaataagaaatatatttagatcatttgttttttagagacaagttctcgctctgtacccagcccagagtgaagaggcacaattatggctcagtacaacctagaattcctgggctcaagcgatcttcccacctcagcctctcaaatagctgggactacaggaacatgccaccacacccagctaatttttaatttcatttttatttttgtagagatggggtcttgctatgttacccaggctggtcttgaacttctggactcaagtgatcctcctgcttcagcctcctgagtagctgggactacaagcatgaacaaccacactcagcccctagacaaactgacttttccgactcagctaggctcaaaatctgtactgactgttatatttgttttatcttccctaaatccagtcagtaaatgccaccaacttacttcaattccagaccatgatttttgacattagcatgaatcagaatcacttgttaaaatagattgctgagggccaggcatggtggcttatgcctgttatcccagctccttgggaggctgaggtgggcagatcacttgaagtcaggagtttgagaccagcctggccaacatggtgaaactccctctccactaaaaatacaaaaattagccaggcatggtggcacctgcctgtggtcccagctactccagaggctgaggctggagaatagcttgaacccgggaagcagaggctacagtgagccaagatcgtgccactgcactgtagcctggatgacagagcaagactctgtctcaaaaaaaaaaaaaaaaaaaagaaaaccaacaaaaaaaaaaattgctggggactatctccagagtttgtgactcagtaaatcttaggtagggcctgagaatttgcatttctaacaagttcccaggtgatgctgatgctactgatctggggaccatactttgacaaccactgccctacactatgtcctcaaacttcatctcactgaagccttgatagatcttacacagtgatgtggcctttcctctcttggcgaaccattacttatttctttttatttcagggagatgaacattatgagactccaagagacagaaataggataaagagctattcctccatctacacactaccagatgcaactgtgaagtaatgtgtaacttccatttgctcctttgctggccttaaaactaacatctttaactctaaaatggtcctggctcagagctgaaagcttactcggtctgcagaggacacagaaaggtcacccaagcttgtagctgagtttctggaagcaaactggtgactctcccaacagtgagcagctgttctacccctcatattaatttcttctgggcagaaaaagtgagcccacagagctatctaatcacaagtctctcagtttattggtacaaagaagcatgatttctaaacaaagaggccatagcaaaggttttgcagagtcctggcagtctcctcctttgtaggtgtgctacccatctctgggaaagcagccacaaaccctagtgtgtcttgctcaagatcaacacacataagtcatacttaaacaatgccattaaaattaagttttcatctatggcccctaaaattaccaccatgtttgcaaaatcccatgataagccctcagtcctcatgctgacttgacctatcagtagcatttgacatatgtcttagtcccttcgtgctgctataacaaagtaccattgaccagtagcttagaagcaacagagatttatttatcaccattctgggaattcttgattatttatcaccattcttgatctgagacttggaagtccaagatcaaggtgccagcagattcagtgttaggtaagaacatatttcttggttcatagacagcaccttttcactgtgtctccacatggtggaaggggctaggcagctctcagatgcatcttttataaggacactaatcctattcatgaggcctctaccctcatgacctaatcacctcccaaaggccccacctcctaaagcctgctatggtttggacgttcatcccaactaaaccttatgttaaaatttggtcctaatgttggatgtggagcctaataagtgttggggtcataggggtggatccctcatgaatagattaatgccctcccttggggtgagtgagttctcttgctcttagttcctgcaagagctgattgttgaaaattgtctggcacctccccgcctctcttgcttcctctctcaccatgtgatctttacatatgccagtccccttttgccttccaccatgagtagaagctgcctggggccctcaccagatgtccaatcttgaaccttccagccagcagaattgtgagccaaataaacctcttttctttataaactacctagcctcaggtattcctttatagcaacacaaagctaactaagacagcatcacattgggtattagtttttgaaatactagtttgggtagggggagcaaacattcagcccataacaacataatcaatcatttccttgtctctgatacacttacttcacctgccttttagggcatgagactttcatggttttcttcctacttcatccccatgaagtgctttactatttctcagtctcctttgctgatttatcctcttatacccttataatattggagtacaccagggatctgtccttgattgccatctgtagctactcatgaccccatccagtcctatgattctatattccatctatatacaagtaatcccctaatttatatctccaggccagtcacctcttccaaacttaagattcccctatcctacttgcaatttgcacttaaaatggctaataggcaaatgaattaacatgtttcaaacttacctcttaattcttatatctcccacctgctcctcaatctcaaacaaaatctcaataaaaaggaattttatctttccgttcactcaaaccaaaattcttggagtcatccttaccttccttttcttttacactcaatgctcaatcacaggaagtcctgatagctctaccttcaaaatagtcttctggatttaccagaagccaaatttcaccattactctctgggtccaagcctctactgtcttctggattattgtagagcctcttaagtagtctcccttctttatccttgaaatcttacagattattcttagaatagtagctattgtggtttgtatatttgattgaactttctaaatgtcatgttgaaattttatccccaatataggttctagcaggaggttattgggtcatgagagtggatccctcattaactgctttgtgccatcctcacaatgaatgagtctcactctattaatttccacgagagctgattgttgacaagcatcctggatttccctcttcactctcttgcttcctctctcattgtgtgatctgcataggccagcttcccttcaccttctgccatgaatagaagtttactgagatgctcatcagaaacagatgttggcaccatgcttcttgtacagccagcagaactatgagccaaataaacttatttttgttataaattatccagcctcaggtattccct

SEQ ID NO: 93577 - DNA, 13242 bp, Homo sapiens
cttgaatcatgccacctcttccctggtccctcaaggctgcagcttccctgagaatagaaagggactttttataccttttgttcttcctcttccttcattccccagccacccatcaccgctcttcgctccccccacccaacaccactcacttctgccgcacaattacagaaactgaacagcacattatagaggaaagcattcaggacttaaatgatttaatgatgatgagccttcggcttcccaactgcaatcctggtgatctgttccctaaaatcctgtcctagaggtgctgatgcataagattacttcatccattctgacaacctcatcatggtgtcatgtgctccgtaagcctgagattagtgggattgttaccccattacaccgggttttacatacacaagcatttccctagggatgaaaaactaagttctagagtgacagtggcttgctcaaggtcatatgtctaattcagtagttccagggacaattggataatgtctggagacatttttggttgtcacaaccaggagttgctactggcctgtggccagggatattgctgaacatcccacatttcacaggacagctcccataacaaagaattatccagaccaagatgtaaataacactgaggttgtgaagccctggtctaaataattagctaatcaaatttcttaaccaaagcagacttacttgtatcttatgtattaaaaaaatgataaacatctgggacatcaaaatatttttgttaaacaaatgttgattgtaatggtgctgattctaccagaaaaatgtgtattgatagttcaccattgaaacaataactgagttgtttttcctgtaaagatgaccctctgcatgtaatcatttacacattctctcccttccctccccaatggtaagcatttatagaacaactggctagggtggcaggtgcaagggtgactccctatgactgaggagaaccccaaaattttgctctgagtgggctcaccatgatctcattggcattatcttttgccctgtccaattcaagttgctcaaacaatatactgtgtcatggacagttcctgggctgtccttgaacctgaaggattgcctcagccatctcaaccttcttctcatagcatcacctcaaacccagggctgaagtctagaagccgcattgtcacttcctcatctgttaaccatctctgtgggctggaggcaatcccacctcagactgggatcattcaggagcagacggaatgccttctaaaagttgaatcagttagggtcacttatatgcaaggcattatgctatatactgtgaaatgtgcaaaagaaatgtaacgggtggtcctcatcttgtgggaattgacagtctaagagaaaaataatacatacacatgaagaaataaccagtgattcaaggcagaaaattatacattctgaagacagtaaatgctgtaggaatttagaggtgagaaagatgtctctgaattgggagggtcagagaaagttttcctgaagggtcaccctggcttggaaatggatctcatggtgaagttagaagttcagtggagataaagaggattatgaaagacatgcttgaaaaatggggggaaaccggtctggctggggttgaggcactcagtgggagaaaaatcagagataaagttagaaagacaggtttgcccgattgtgacagaccctgattaccaggctaaggaaatgatactttgctctgtagataaatggggagctgggagggcttgtgagacaaggccccagtgaacccccaaatcagtttcctctttcctccatcctggcttgtctaaacgcattggtctgggagccaaggattccaaatttctgtcagtgctgcctcctcctgacccacagctgttccaggaaaggtcatgggaattcaaggacctgaagaaagtcccacatctgacctcaacttgctgtatgtttcactttctcagtctacaaaaatgagcccattacctttatttatcaaaggaccaacaaaattaggataacagaacttggatctgcttttgcttggaagggaactctcacgggctttccattggtatccagaggctgtgtggaactccggaaggcagagaggcttggctctgaagggtaggcaccaatccaggcccggccctcctctctcccttcccccttcactccctcccagcacaggcgagargaagcagcagctgttgtcctgtggggaagacaggcagaggtccacctggcactgttgggattttcacaacacccgccccaacttaaacacacacacaacagcctaaggagaagctgggccaacagcagtgacttcgacgatagaatgagaaggaagcaggggtagagattgctggtgtaagggactttttcttcccttctgtcttctctcccactgttttgtcttctgctcttgctctctctctcagagtctttcttctcctcctgtgaaactcctgaaccagtccctggcctgatgcctgaatctttttgttcttcctaaacttgtcccccttcctccatctttttctgttgccccatgaatgcagtgaagccaaaatagcaaaatcagcctaccaagtacaaggtgaagcagatcttggaagctggataatttgggcacacaaacaaaatcacctcccttatccaaataattgaggcaaaacaaagatttcagttgaattgcacgtatggtaggtacgactcaatttcgattttcatgtgcaaacttaaaaccttactctcttttccctttggactgaagcagcagggccatgtttatttcactttcacacagtcctaaggcagccttctacgcagcccagcatactcgagttgaagagcaaactaggataattataatatcaggaaaacacaagtgtagagggaaatttaaatcatggcttgaaaacatcccactctaggataatgagaagtagaaaggagaccaagctaggcattcaaatgagcttgcagccttccatccagcctccactccaaaggctagactggcctgtgctgatacacatttgatacacagcctggtttaaaccgtggattttatctcctaacattcatgtttctacggcagcaggggcataattctctatccagaacttctatccagaagttcagcctgcaaagtttgggataccttaacaaagaagtgaacagctgctcccccaaccaaggcctcgctgaggacaaaccagaagagccagaggcctgtgtgaacttgttcttgattctcttttgccatctagtggcatttctcatctccagcaccacttttgcttctaaagatccttcatcctgacccccaacccacagctgtgctgtccagctactaaaataatgtcctcctggcctcaaaacaaactccccatcctcctgacttagaatcataaattctggaccagaacacaaactttatgatcaggatgggttgtgcgacttctccacagttataatccacacaacagccaggtaatcctttaagctgacacgttctttattcatctacttagaacccttccagggttccctactgtgcttggagtaaaagccacaggccttcaaatggtccgtaagtcttcccaatgacctggtctctggtccctctctgaactctcagttacctgctccagccacactggacacactgctgttcctccaacacctcaggcatctgtctgctctggggcttttgcagtgctagtctcttcacttggaacattcttcctccggataatcacaagttcactcttatcttcaagtctctgccccagagtcagcgatttcaacgatgttacgtaaaattactgaccaccaacccctatactgttctacttttttccctagccattatcactttgagcaaagtatacgtatttttttttactgtctttctccaatggaatgtaagctctacaaaggcagggacttttgtctttgttttttgttgtttgtttgtttgtttgtttgtttgttttttgagacagggtctcactctgtgacccaggctggagtgcagtggtgcaatcatgattttcactgcagattttatctctcaagctcaagcaatcctccctcctcagcctctggagtagctgggaccacaggcatgcaccaccatgcctggctaatttttcaaattttttatagagacagggtttcgccacattgcccaggctggtcttgaattcgtggccttaggcaatcctcctgccatggcctcccaaagtgctaggattacaggtgtgggccaccgtacctggccatttttgccttttttgttcagtgatatatcccaagtatcttgacacttagtagatgctcgataaatgtttgttgaccacatgaatgaagcatgcccaagattctgagattgcctactacttacaggtaaattctgaaaacaaaaatattcctcatctcagttttacaggccttctcacccacagagggtgatgcttctctgccttggtgtctcggttctcctgagtgtcatattccaagctcacaagagcttggagtagcactgacccagatgctccacacagctgtaaccaccacaaggaacaggacatacaaggtgaaggaagcactaaggcaggatgtcgagagcagcaacagcattttaaacacaaacatttgggcagtattaaatttttgcaattttcaataaaaaagggagggaacaagtgaaattgagaggtgttggctgccttctccagctaaagccatgtggccttggttggtacctggaactggagaggcctgtgaatcattgtggaatggcttcgctattggggatggtgccaggcctcgtgacagtgatgattcattcacccacttccctcgtgtctgttccatctcctccgaaagataaccagtatctccagatgacaaggaaccagacaaagcatctttctaggctgtcctatctgtgcctcaggtcagagaagaagcaacccttaacaccacagtgattgactcttcccaggatcaagggccagaagtgtatatgagaggatatgaatgacaactcttcctgaaattgatttcagwtgacacctgggtcaggtgctctattaaagagtcattaaaatcatgtggccagggaacaaatacagtcttcgaatgtgacgattcaagcttcctcattgctgaacatgtttaggcaggtacaggcwtccttaggtgtccacgtatttgggacatgtaagtggagaggcatgaacctgattcatttcctgatccagtgatgctcccagcccacccccaaacagacacagcgtagcccgggccagctcttaaggagttcaggagtgagaagaggccctcagagatctgacagcctaggagtgcgtggacaccacctcagcccactgagcaggagtcacagcacgaagaccaagcgcaaaggtgaggctgtggcaggatctggggaggagtgaggacagagaaggagggatgggttctgatcctgagagtacactcaggtgagcgataaaatggataaaggagggactggatttaggggagatgaggacacgcattggggaaaggggagagtgatgttggggatggaggcaaaaaatgaaaaagaatgggaacacagacgagatgggaatcgggagaggatgagacacagacacaggaacatggagacacaaaagggatgagacttaagggaaaggggagaggacaaagagtgacaggcaacagggacagaatgaagggaacagaaatacaagatgagagatggggccacagggttgttgttggggctgcagtggatgtggacacacagaagaagaggcagagatgagacacaaagtgaggaaaggagacaaccgagtagggagatgggtgactagctcatatgagcaggtataagaggactaatttctcaactgaacacctctgtcccagcgacccctgccctccatcctgactgctcctcctaagagagatggcaycggccagagcaggattctgcccccttctgctgcttctgctgctggggctgtgggtggcagagatcccagtcagtgccaagcccaagggcatgacctcatcacagtggtttaaaattcagcacatgcagcccagccctcaagcatgcaactcagccatgaaaaacattaacaagcacacaaaacggtgcaaagacctcaacaccttcctgcacgagcctttctccagtgtggccgccacctgccagacccccaaaatagcctgcaagaatggcgataaaaactgccaccagagccacgggsccgtgtccctgaccatgtgtaagctcacctcagggaagyatccgaactgcaggtacaaagagaagcgacagaacaagtcttacgtagtggcctgtaagcctccccagaaaamggactctcagcaattccacctggttcctgtacacttggacagagtcctttaggtttccagactggcttgctctttggctgaccttcaattccctctccaggactccgcaccactcccctacacccagagcattctcttcccctcatctcttggggctgttcctggttcagcctctgctgggaggctgaagctgacactctggtgagctgagctctagarggatggcttttcatctttttgttgctgttttcccagatgcttatccccaagaaacagcaagctcaggtctgtgggttccctggtctatgccattgcacatgtctcccctgccccctggcattagggcagcatgacaaggagaggaaataaatggaaagggggcatatgggatttgtggacacagctgtttctgttcctgaactagaagtcttccccagctctgacgtggcagtgaggtgacctgaaggaaagaaaaatataaataaataccacttcatatttgtatagaatcctctaatcccttgtgacatagacttgacagggattgtatgccttctttatggatgaggaaattaaggttttagaaagcttaatgaattaaagagcttgtctaattagttagtagcagaacctggacttgaacctaggtctccttgctctaaatacagtgtaccttctactctaccagttgcgcaagaaagaagtcactgttacagaggcaagcggtgaactaggtaagagttcactcatgaagaaacgagtgctctgaagagccagttaccctgtgttggctgcaataaaggtcattacctctctagccaagagattgtttatgaggtgctctggcattttattccttctctctcttcctctctaactgcccctcccgtttctctagaccactgctcttccaacctaggccctggacctggctctggccagatccccttggcctgaagacataaggtaaagggagtgtctgagcttcatcccccagatccaggatcacatttcctttgaccttaagggacttccgtggccctgagcctgcttgtcacaaacaggctggtgggagctgccagagcttccttcctcctgataatgatctcccctgcctcattgctaccctggctctccactctggcagtctgcccaggcctgaggggttgagatgcgaaaatgccatttccctgtccccctgggctacagataccatttctctcgttctggggactggagctggagaaggtatggcttggtattggccagtcctgatggtctctccaacattgcttgaccagcaccatccccttctttcttcctttatctcagtcccaaacaagctgcattgtgtcccatgcctgttctatttcaaacccaaattcattataagacattcccaaccctgctgaggattccactctacctatccctccccatcaactcctgtgcttttttactactgaccagagtcagagtaagctttggagccagacagaatcaggtgtaaatcctgactcccgtctacatgacctcgaacaattggcttgtctgtttctctacagcaaaatgtgaggaatcctacctgccaaataggattccaggtaaagatgtggaaatgctatctatgaaacgcttgtcagccccaagtactgacaggtgttagatcataactagtagtagcaatatccatctttggaaaacacgcagaccaaggcaaatacccccactaaggtctcccgagagacttccttctgccagagtgatgatcatgagtgggttagaggacaagcccgcaggcagagtcctgggagggcagccaggttgtctgagatgatgaggagagaaagtaaggaaaggatgattaaaggaaaggagagcagatcattaaacagttctaacagaatgagggccaataagtggatgagttggtcacaacagccaaacgactgagtgtaaaaacaactgttacctgaaaacagaacattgccatcatcgaatggacttctgggattcttgaataaatctgaagtttatccaaaatctgaatttgttttgaactcttgtggtcagtatactacatttaccatcctaaagagatgattttcacttgtggtgcacagaaaagcaagatacttggggcagccgatttttctcttcattttattcttttttcacaactctatcttctttattgatgatctttcttatggataatatggttttagagacattctcctcacaaaatttaaagtggctaaaattatgccttcaatgcatcctcccaaaataagaagaatttccaactaaaactttttcttgaaacttgacctaatatagcattaaaagttgacctaaatagcattaaataactagaaagttctgaagtaacctgtggtgatacaggtcagaatagttgtagccttggggaagtataactgtgaaggggcatgggggagccttctgaggacctggaaatattctattcttggtctggatatgtttcctatgtgaaagctcattgaactgtatacttaagatttgtttcaaaaggcagcaggtggtcataaaaataaataagaaaaaaagatttgtgtattttatgtaagttatatctcattttcaaaaaagtctttcaaatatgtatacttcttaagggattattttatttacataataaatcataatacaccaatcaattctaaaaagagtaattaaatcatagatagaattatgatataatctaatttctattgttctgttctgtactatttgttaaattaaatactacttgtggtgtttattaaattgttgtaaatacattgggctcagccgggcacagtggctctcacttgtaatcccagcactttgggaggcctaaccagagcagcttacttgagcccaggagtttgagaccagtctgggcaacatagtgaaaccccatatctacaaaaaatacaattagctgggtatgatgacacatgcctgtagtccctgctactccagaggctgaggtggcggatctcttgagcccagaaggttgaggctgcagtgagccatgatctgcactccagcctgggtaacactccagcctgggcaccactgcactccagcctgagtaacagaatgagagcctgtctcaaaacaaatacatacatacatacatacatacatacatacatacatacatacatacatacatacataccttggtctcagaaagtacagttggcttttgaacaacatggaggttaagggtgcctagtgtacagtcgaaaatccaagtataacctttgactcccccaaaacttaactactaatagcctattgatcacctgaagccttaccaataacataaacgttcagttaacatatattttgtatgctatatgtattatgtaccatattcctacaataaagtaagctagagaaaaaaaaggtgtcattaagaaaatcataaggaagaaaaaaatatttactattcgtttagtggaagtggctcatcataaaagtcttcatcctcattgtcttcacgttaaggaggctgaggaggagaaggaagaggaggggttggtcttgctgtctcagggatggcagaagcagatgaaaatttgaatgtaagtggacttgcacagttcaaatcattgttgatcaagggacataaggttctccctaaagttatctagctaacacactctctcctattatttatattatcggtcaactaatttcctattttttaaccatgtggaaattttaaataattgtttcatatataagctttcacaacaattaataatagcatctttcttaaaaataataaataataataaatacccatttatacttccactggctggtagaatttcaatataataatttttttttaagctcacaaggaaaatttcactccaggttacatctagagtactcaccaatatttggaagtaactattcagatattaacaataaatccaaatggcctggcctattcttattagtggtgccctacctgaatagatttgtcactcaatccttcgtgtgaccttgatcacagccaagttaaaggatgccaggaatagtgatgaaataggaatttgactattcagccttccaaaagccaaagctgagatacaagaagataataatttgggccaaataccaaggctggctgaactgtgatgcattcctacttgaaagctgaagaatgggaaaaggagaatgcttaattatgagatatttatgtttctagggctgggagcttggagagaggaggatggtgtccaggggagctttgcccagtcttgtgcagatggacttaaattgtttcaacatggagtaaaggagcggaaatggagttcagtaaagaaagtaacccaagaactggagctagatgagctggctctcctagaagggagactatctgaggtagactggggaggagacttttctacatgactctggttcccagaagtctccacacactgaagtaaatgagccctagacaccatgaagagggccaacagaatcactgtgaagagaaggatcctcagctccagggatttcctctgcctacaccctgcccttaagatcaggaccctttggccctcttcatagtgtctggggctctgggggataacccttgagctatggcaccaaaaaacataccagtagcaacaacatccagggggccttctcttctccttgggagagcttcaactcatttcatcacatttcttccatgcacctgcacaactgggcttccaaaagtgcttcaaagacttcagagcttcattctaatgtcctccccctacccccaccccaccatgaatgggcaaaaagaagagcagttatagctcttatcaggatgcttacctgtgcaagactccaaaaccagtaagsttgggaacatccacggagccacagggacatgagaaagcccacattgctaatgagatcttgtaagaagtccacagttcataagaggaaaggtaaataaaaatgtgtgctcgtgatgaaaatacacactgtgatagaacgcctcttagcttagggaggtgggagtttccccatctatataagctgatctcaaactcctgagctcaggtgatctactctcctcagcctcccaaaactgctgagattacaggtgtgagccaatgcgcctggcaataatgttaccaacagatggtttttgggcttgaataccttcagggacatggatcttcactaccacttcacaagagtataatgtggattaaaagtaacaatacatataaagcacttagtacagtgactagcatgtagggaaagtttgaatggtgttagcatttctatttatcattgtggtgtcaaatgttgagtggtcaaacctgtgatgaatggagcaggcctgacttccgtgacagaagaacaaaggatttaaacaagggaggccaaactcctcctcatccgcctcttgccaaaaagctcctagccaagagtagataagggaaggttcaaggtcagacaaaaaggacaatatgtattagtttctgtagataaggttatttgggaggaatggatgggtactttgagttgaaggagaagtaaaagggggctttggagaatttctgttaagattacttaagggaagtttttctcctctgcaacctctgtgaatttatgaatccaaagatatgaaaataagttggaggacttaggaccactaacttttgagggtgccctctgtattccctcccatccaaaggatttgattattgcagcaattgatggagacagggctctagtgacatttccaacttcccctcctgagatatttaaattagtccttaggaaggcttactatcccctcacttccatcgtggaagcctcttatatttttcccaccctctgattcagctccattttctggttcatttttcatcactcaaaacctccaccaacgcctgtgactcatgtccagtggattggttatagcagaaaaacattgtggtcattactttctatggttttttcatagaaacttagttgaacttacacatttaaaacataaactaactgtggtgtgaattagtacaaattcctgcttgggtcgtggcatttagcacaagatgaaatttcctatctccatggctttagggctctcccagtagtaatcataacattataatgctgcaagacatcttgtccagtgttctcggagatcatctagtcatgccttcctcatgttgcaaatgagcaaaataaccctgaggacttaaacactttgcccaagattacatgaataatttaggcaagaactcgggcttttttgaacaagccttgtgatatttacaaagtggcattcaatatcaaatggatctcagacatctttcttcttttttttttttttttgagatagagtcttgctctgtcacccaggctagagtgcagtggcacgatctcgactcattgcaaccttgttgagctttttggcctcccaggttcaagcgattcacctacctcagcctcctgagtagctgagattacaggtatgcaccaccatgcccggctaatttttgtatttttagtaaagactgggtttcaccatgttggtcaggctgctcttgaactcctgacctcatgttctgcctgccttggcctcccaaagtgttgggattacaggtgagccactgtgcccagcccagatatctttcaagatcaaatcatacatggactggcaaatcaatctgcaaatgggcagacccccggatttgagacaaaagcatgttcatccaaaagagtattaagtgcccgtaatcctgacacgttgcatttctg

SEQ ID NO: 93578 - DNA, 148764 bp, Homo sapiens
  misc_feature (1)...(148764): n = A,T,C or G
taattttaatattaggatttttgggagttgaatcatgcattatggaagtttctttctttttggattatggaacaaatctttcttttcattcattttctgtggttgtttattaaaaataataactgcacagttatctatatactttaatccatctgtataagtactgcctatgtaattatttttagttaccgatttctaggaaatacagtcattaggtagactaacttcctatttctagatagggaaatattaaaagggtcacttagcatagagtttgcatctataccgtgttattaggtaatgaattctgttctgttttgtgtaataatttatgaataaaaatattttgtagaacccctgttctagactttgcctgatatctaatattcttggtcaactagtgttgtagttttcctatgaagattggacttttgcatttgtataggctgaaaggaaaggagtatatatttaaaaagtagagaaatgttggttaagagaagcaaggacaatactcttgaccttaccccgtggcattttctgtggttactcatctgcacttgtaaaatgagtgaatcctggatttcttggtgtgcctttggaagttttgtaagatgagactgagggagagggtagagtaaggggtctggagtcaccatcattataattttctttgagagacctctgggcaaatgtgatttttcatcaaggctctgggctttcctgaagctgactacgttctgtgcacatggactttttctgcttgttcctttgctgctacttggcagctcaggccttgccctttgaagaagtagcagagtgctgctgatggaagcaaagttcaaaagtaaaatgatagtaaatatacagaggcagtcagccaattgggccaccgaaaagatgaaatgagatgattgtgaaagggagtcagagtgttctgcaaatgtagttattcatggttattcatactagtagcagcaataataaagtcatagaaagatagttgccctgagcctcagcctaaggcacctgggagagagtccccaccacttcattctccaccagggttgtggcgtgtcttgttgttggatttatgtgtgttctgcaataatttttaaatcatatttcatttttctaatgtaaattttttaactaaagaagatacatttctcatttgataatacattttcccttaaaatagctgcactttaatcttgattccattagttaacagaaatcatttagaatgtttgttttatgtattaacctggttagtacaggacagaaaaaaatatataacacaagaagttatacgattagcaaaatacatgggaaggggttcgttcttagggagaattaaaaatgggaattaggccaggcatggtggctcacacctgtattcccagtactttgagaggttggggtaggccgatcacttgagcccaggagttggacagcagcccgggcaacatggtgaaaccccatctctgccaaaaaaaaaaaaaaaattcaaaaacaattagccaggcaaggcgatgtgtgcctgtagtccccgctactcaggaggctgaggtgggaggatggcttcagcacaggaatgggaggtgcagtgagctgtgatcctgctaccacacttcagaataatagtaatattggatgcagtaattccttaataaatatgtttaagtgaagtaccaatgaatatctaataaatgaaaaaattaaaagaatgagactggtgaaatgccctaaatggtagtttgttttttgtttgattgctttttaccaaatgaaaatagttttctcatttttttttctgattgtaaaaataagtagtcacttagaaatttcaaacaagacagaactgtatagaaggacaaattaaaatgaccccaaatctctccatcaagagggaaccactgttgacattttggtcagtatcttttttattattactattatactttaagttctggggtacatgtgcagaacgtgcaggtttgttacataggcaaacacgtgccacggtggtttgctgcacccatcaacccgtcatctacattaggtatttctcctaatgatatcccttccctagtcccccaccccctgacaggccctggtgtgtgatattcccctccctgtgtccatgtgttttcactgttcaagtcccactttggtgagtatcttttaaaacagctttcttttcttttctttttttccttttcgagacagagtctcgctctgtcgcccaggctggagttcaatcaatggctcgatctcggctcactgcaacctccgcctcccatattcaagcgatttcctgcctcagcctcccgagtggctgggactacaggcacccaccatcatgtccggctaatttttgtatttttatggagacagggtttcgccatgttggccaggctggtcttgaactcctgatctcaggtgatccgcctgcctcggcctcccaaaatgctggggttacaggtgtgagccacggtgcctggccttaaacagctttctgtgaagataaacacaaaattaaattgttactaagatagataaatgctgtctgcaacctgaacatggaggtatactgtattcggtttaaccaactgtgttaagtgatggactcagcttctttgaattttctagtagtaaacaactctaagaacatccttgaatatgcatccatccacactcgaaaaagtacagcctggaagaaataatgataagtagaatgtctagcaaagaatatataaattttaaattttgattcataagggcagaatacattccagaaatacagaaatgtacagttccaataatagtcattcactgttttcttatatcctctccaacatttgatattatcaatatatttttaaaattttaatgagataaaaagacttcatttttaaaatttattattactgagattgttttttcactgtttttgctattagcatttttctagttgctaatgcctcttactaacttttattctatttttatttttacttttttgagacagggtttcattctcttgccgaggctggagggcagtgcccaatcacagctcactgcagcctccacctcccaaggctcaggtgatcctctcacctcagcccccacgggccaccacactcagttattttttgtatttttagtagagatggggtttcaatgtgttgcccaggctggtcttgagctcctgggctcaaaagatccaccagccttggtctcccaaagtgctgggattacaggagtgagccactgcacccagcctcttactgacttttcaatagggatgcttgcttcttattttttagagctaatcgcatattgggaatattaagtctttatacatgttgaaaatattttcccagcttatcactgtttttcaattttgtttaaagtatttaaattttttttacataagtatattttaaatttttgagtagttacttgtatttcctggattttatggcatgcttgaaaataccttctccacccatatgttaacagaggacagggagaggtgaaaaaagagaataatatatagatagacattttacaatttataaagatagggaaaaaactcaatttatattttaatcaaatcacaacaaaacaaacaactacaaaacaaaaattctgagcctttctggataaagaaaattgaaccagataaattttgaaggtttttatctcttctgggatggtaccaatacctggagaaatgcttttactgattcaacaaatatctgttaagtatcaggcactgtgctttagttttgactcagaaaaaaaagcattgattctgaaaataaagtaaaattactactgccagcaaagagcttacagactacaatagtcatgtatgtacaaggcacagcaggagcctagaacccgcctcccttctttatcttattctacttctaaaacataggaggaacagttggcaaaatgctaaaaattctaatttcttcaaaaatatttcttatgatttcaagagaacatacttagaagagccccaaagtcccttcttctgcttctgcatccacagttacttccctgagaggaggcaatgttgcctttgagacattgactgggctgtaatacttaaacctgtaatcatgtttgatgccaggaaaatgttttcaaaactctgcactatttaaccagccaagacattttgtgaaaaatatttgtgaatgatttcatcaagagatactcgttcacttgaagtaacagatgaaagcatttgaaaatatttggtcatcttaactctgtgtatgtgtgtgtgtgttgagtgtgtgagaatgaaggtgcatatgctcatgtgtagcagtagaattttacatataatcatgttttgaagttaatacactttctgtatttgattttataagaaagaatgaaaggacataagaatctatcttggcagccgggcgcggtggctcatgcctgtaatcccagcactttgggaggctgaggcaggtggatcacctgaggtcaggagtttgagaccagcctggccaacatggagaaaccctgtctctactaaaaatacaaaaaaattagctgggtgtagtggtacatgcctgtaatcccagctacttgggagactgaggcaggagaatcacttgaacctgggaggtggaggttgtggtgagccaagatcgcgccaccgcactgcagcctgggcaacaagagcaaaactctgtctcaaaagaaaaaaaaaaaagaatctatcttaaaaatgaatgaaataataataatcccttattattttaatagttgtttagaaattattttacctttattattcagtcttcaccaaagcctatgaaataagcaccaatattttcattttacatgattgattaaaaaatatgactcagtgtgattaggtaattgaagttcaaaggtaaaagtaaagccccaagttcattgctgtttccaccacactacatcacactatgctaaatgcctgtctaacctgtaaaaggaggtttagcaagttagttctcagctatctaagctctgtctttatcatgatttcatcggcacattgtggtagaaggaacatgaactttggagtcaaatactgttcagtttagcctaaagctgcctccttgtaaattcagcctaaaggtttctctggacatagtgaattgtaacgtaacgggatgtgtgaacagactgtaatctactcttgtaccaaccaccaagtttcagccagtcacaggcgaccaactattcagataagaccaaagccaagctcgaatcaatccagctgttgatgcacctcacttcgttcctttctctgtacatcactttgctgttttctgtcagtaaatcctgcccaaccacatcacagagccacagtggctctgaacctattctagttttggaattgtctgatttatgaaggattccttgcttaattaaacactgttggatttcatttgtttaaagtttttcttttaacaatacctaggtttgaattccagttctgccacttactagctgtgcatatttgggcctaaactctctgccttgccttcactaggaaccttggcaatgataacacaatggagatttgttgtgatagctctggcaaataacaggtgatcgagaatgtctttgagacatagactgaactctcctgggatgctgtcaagagacacacaattgacttgggcaatgtaagaattgtgggcaatggggccctggacatataggcaagagccaataaataggagtcagtgttgagctttgcactgatccacatgcagagaattggtatttggccatgattagatttttctcatctctgattctcatattcacatacgtctaggaggcattatatcaagaagacggaagtggaatcttgggaacatgagagaaaagtaggaatgacacttgtgaatactttttacgaaggccaaagtgagtttatctaatcctttttttttttttttttttttttactctttatagccagtggcgtctgtgtctttaaatgcttactcaacagagacactgagtgttgctgtgtgtggaaggagtccatcttgatgactctggggtacagcagtgctttactgaaggttgagtctcatgctggtaagttttgtgcatatccaggccctctgtcttatccaaagaagaatctcctgattcttctcactttcagtggttactgattagttggcttttgaagcatgtttcctgataccagtcaattctcatgcattgatgaaatgattttaagctggtcttggtacttacttgataccatagctagagaaaaatcaatcttttcctagagtatgagaatgtttttattcttttattattattattattatwataatactttgagttttagggtacatgtgcacaacgtgcaggttagttacatatgtatacatgtgccatgctggtgtgctgcacccattaactcgtcatttagcattaggtatatatcctaatgctatccctcccccatcccccaaccccacaacagtccccttcctgtgtccatgtgttgtcattcttcaattcccatctatgagtgagaacatgcggtgtttggttttttgtccttgcaatagtttactgagaatgatgatttccaatttcatccctgtccctacaaaggacatgaattcatcattttttatggctgcatagtattccatggtgtatatgtgccacattttcttaatccagtctatcattgttggacatttggcttggttccaagtctttgctattgtgaatagtgccgcaataaacatacgtgtgcatgtgtctttatagcagcatgatttatagtcctttgggtatatacccagtaatgggatggctgggtcaaatggtatttctagttctagatccctgaggattygccacactgacttccacaatggttgaactagtttacagtcccaccaacagtgtaaaagtgttcctatttctccacatcctctccagcamctgttgtttcctgactttttaatgatagccattctaactggtgtgagatggtatctcattgtggttttgatttgcatgtctccgatggccagtgatgatgagcattttttcatgtgtcttttggctgcataaatgtcttcttttgagaagtgtctgttcatatcctttgcccagtttttgatgaggttatttgtttttttcttgtaaatttgtttgagttcattgtagattctggatattagccctttgtcagatgagtaggttgcgaaaattttctcccattwtgtaggttgcctgttcactctgatggtagtttctgttgctgtgcagaagctctttagtttaattagatcccatttgtcaattttggcttttgttgccattgcttttggtgttttagacatgaagcccttgcccatgcstatgtcctgaatggtaatgcctaggttttcttctagggtttttatggttttaggtctaaggtttaagtcttcaatccatcttgaattaatttttgtataaggtgtaaggaagggatccagtttcagctttctacatatggctagccagttttcccagcaccatttattaaatagggaatcctttccccattgcttgtttttctcaggtttgtcaaagatcagatagttgtagatatgcggcattatttctgagggctctgttctgttccatggatctatatctctgttttggtaccagtaccatgctgttttggttactgtagccttgtagtatagtttgaagtcaggtagcctgatgcctccagctttgttcttttggcttaggattgacttggcgatgcaggctcttttttggttccatatgaactttaaagtagttttttccagttctgtgaagaaagtcattagtagcttgatggggatggcactgaatctataaattaccttgggcagtatggccattttcacgatattgattcttcctatccacgagcatggaatgttcttccatttgtttgtatcctcttttatttcgttgagcagtggtttgtagttctccttgaagaggtccttcacatcccttgtaagttggattcctaagtattttattctctttgaagcaattgtgaatgggagttcactcatgatttggctctctgtttgtctgttattggtgtataagaatggttgtgatttttgtacattgattatgtatcctgagactttgctgaagttgcttatcagcttaaggagattttgggctgagacaatggggttttctagatatacaatcatgtcatctgcaaacagggacaattcgacttcctcttttcctaattgaataatgtttttattcttagccctccttttggtcttccttcatcctaagctgcaggagagactaccaaaggttgtccagatcttcaccactgttgtcaattctccttgaagatgaggttgtttgcagaaatgcgactttcagtttgagyggtggtcagaatgatttcatcctgtttttgtctttgaatcatttactgagcattttttgactctgggcaataaaaatcaagcaacagagaagtaaattaaagtgtaactagaagtattttaagaaagtactgaaccaccctctgaaagatttccagcctgataaagaaaattagaactaacagtgccttgggtcaaccttggatggttgagtgtcatttctttaacttagatataagttgttccatctcacatatggtgttaatccacatacagtgtaaaatgctagcaatggtatggattcttctctggttaactaaaatatccaaggctcttttattattaactaccttgggataaagaagttaaactgatttctaaactgactctggagtcagccagagtgaggaactttctttatcatatatctatccatacatctgtctctgwatccatcagtctaccttatctttaatymtgaatttcagagtaaattttaatagtcagcatgtttcacccccgtatattgtgcatatcattaattagaattcaaaatttgttgatgatttttatttgtttctattgaggttaaatttacaaattgtccattgaagtacacaaatcttaagacactatcgttcctgaaaattacctcatgccctttcccagtcattccccactgccattctgccaggggtaatcatcactcttctgatatttttcccaccatagagtagctttgtcttttctagaacttcctataaatgaaataattcaatatatactctctttattaaggtcactcagcatagtgttttcaggctcgtctgtgttgttacaagtattagcaatttgttcatctttcttgctaagtagtagtcacaatttgtttattctcattttgatggatattgaggctgtttccagattttgtctattatgaatatggctgctrtaaatattctcattccaatatatttctatacatatttttttcatttctcgagtcaaaaatctaagagtaaaattcctgggtcatasagtaagtgcatgatgagttttacaggaaatagccagaattttttttccaaagtggttatagcattttacactcccagcaacaaataatgaatgagagtwctggttgttccacgttcttgctaaaatttgctcttgcatgagatatgagttatatctcattacagtttcaatttccattttcctgatgtctaatgatgttaagcactttttcatgtgcttatgagttcaaattgtttgcctgttactaactggctgtgtgtccatagagtagttgttctgtatatatccaggataccacgcttgtatcagatatgtaatttatggatgctttgtagttgcttattcattaccataatgttgtcttatgttgagcagaagttttaaaatttgaagtctaattaatcattcttcttctttgtttattgctctctgtgtcctaagaaccctttgctactttcagtactaaatgatttgtcctatgtttccttctagaagtttcctagctttagcttttatattttaggtatgtaattcatctaaattatttttcatatgatatgaagtatgaggccaagaattatttttagttcatacagatatcccgctattctaataatgtttactgaaaagatattttcaagtcaaatgaccatataaaagtcttgaactttattctgtgcctttgattatccttataccaatatcgcattgtctggattacctttaaagtaactcttgaggtcagatagtctatgtccttgaacttagttcttctttgacatgattgttctggatcttttggtcctttgcatttctgtatmcatttataattaagttgtcaatttctacaaaaatgcttgatccgattataattgagattgatcartttggtgagaattgtacttttaacaatttattgaatgtattgagcaatttattgaaaaggcaaaagagagcaactgtccctgacagtttccaaattatagataaaagtccagtatgctaccatgaagtataatatttgttgtatttttttgtggatgatctttctcagattcaggaaattcccttctatccttagtttgcagaaaatttttatcattattaggcattggattttgtcaaacttttttaaaactattgatatgataatattctataactttggttaattgctttgaatgatgtgctttgtgtagaattgatattatttgtctgttaaatgtttgatagaatccacctgtgaatttattgaggcttgagattttattcatgggaatattcatggcaattctttaatagatatggggctcttcagattttcttcttgtttcaatttgatattttatatcctttcatggaattttccatttcatcaaagatgtcagattcattggcaaaattgttcataatttgcatgttatccttttaattttgtaagatttgtaataatttctgctatttgttttctgatagttgttattaatgtttcctctttttttctttgatcagcgtaggtaggggtttatcaattttattagtttctcaacaaatcaaatttggctgtattcgtttctctatagtttttctattttttatttcattgatttctagtcttatttttattattttcttcattctacattctttgggcttgctttgctcttttgttacagcttcttatagtgaaaacctaggtcactaacttcattcttttactttttctaatacagtttcttaaaaccattagrtttccactaagcatggattatctatataaccaaattttggtatgttgcatcatcattattattcagttcaaaatatatactactttctattgtaattacttctttgacccctgggataatgagaagtggtttaatttccatgtacttgggaatttttcgtatattttttggttatcgaagctggacattctaaatgttgtgcgtcaagtgtctggattttgtaaccttcctttaaggaatattgaggtttgctcaggtaggcagattacctagtataggtcagcttcattattctgaggcttatttttagttgtgctatggctaagaaatctttattccaggtccagtttagatatgctactaaagtgtgaacaaactgtgttttctgatgtatgtctgaagtgttcaacaaggtcttctcacactgacttgttggaactataaactttctccatgttatattatctctggsaattgttcagcttagaaaaattagagctccttgaagttattcttttcccatagaggtttttgtccacttgcggaaacttaccatatatatgcgctgcttagaatttatcaagctagaaactcaaggggagccttttgtagatattttgagctccttcttgatataactcctttctgtttgacaatccactgtagaaattccagcagcagcttcagcctccctgaatgccattctttgtatttttaactcagcaagaccattttgctctattttgcttcccacaccctacgctgaagtctggatagtgcctcaagacagaaaaccaagttaatcatagcactgaccttattggtttagcttcttttaaagatcacagtttggcatggactgttctccattgtgtgacagctattgtttcacatattttgcttagttttcttatggcaatgggtgggaaggtatggtagcagttaatgtcatgattatgagtagaagtcctccatatttctttgaagaaaaagagattcatacacttagaaccctttagatttggatgaaaagccagactcgatcaacatttccattcctctgtattctcattctgacacacattcttgcccgttcatgcaattgaacagagtcagaaacttctgctctctgagccaggcaaaacagtcttcaactcaaaatatttgcaaatgcttccttccaattaatgatagatcagcctttttgacttcgatattcctataatgtatgcaaatgacatgtttctattatcttcaggaatcctcctgtgatcttaaagtgtgcctccaaaatactgacyactgatacatagggctaccattacagaccatatcgaaaagccaattttttttggatcaagatttgtgaagaatctgagattttatcctatttgcaaggtaacaagttacattgccwctgtttcatggktgctgacaaaggacatagggatcctggttcagagataaaggctttattactcagagaaagagcattagccagagtgtcagcacattgtcagttctgtgagctccagttcccacaggcagatgcagaggccaggtggttacctatagatgtagtcagttgcattataggagaggaccactgaacttggagaacctgctattttatagcaagaagtaagaaagcctgctgtttattccagaggaagatgtcacttcatcccttgagattgcttgctgcatacataactctgagaaatagcccagacaaagagtggtcgaagtcttgcattcttggcatactcagcaagacaggtatgaatcccagtatgagactgacagagaaacgtctcccagcatttttgttccatgtggaggagggaaaagatactcttacgtatagacacaaacactgagacaatggtagtataggaagcttaattcatacatcagatcaaactagacacaaacacatacatgaacaatctttgtaggaaatacagacatggttgaggcaatttagaatttcctctacagctaagataaaatgatatttgtagtataagatattccatagtatacctctcttaataattcaattgcgacaagcctcacaccttgaaaaattatgcccccaccaacctggttatagagaagtaggtgcttcagtcattcaagatatcctgaaaactacagagaaacaacactgaatgaggataaataccagcctcagggcttttcacttatttgaggggaccagatatccattagataaaaataatttaagtaggcttgagacagaaatacaaccaggtattcggatagcaataaaccggaaataatttagaaacagactcagtgagagcaaaatcactctctcggttcagttagctgcaccccagaagccaaggaagacaggcctagttataaggggtttgtaggttgtacttcttgggcagtgcagcttggttagccctggtggatcagtccatgtggacatcttggtgggtcctttatgttaaaagtcaaaaaaataaaaaacatttttttaatactgagttttatctgcaacagtaaaacatatatgaaggaattctgccttcacaacaaatggctcccagataaagagagccatgtttacttatatttataggtcaaatataacatcttgcaatcctgattggattacatttgggtcagttttaataaaagcaagaaattcctatcttcggtaatgaaaatcaggataagccttatctcaggatgtgacttggaaggtcccagatggcccagatcccaggtggcagtggatcttgattgtcatttgtcagcctgggtgttgacagaaggctgtctacttatatcactgcctatcagatacaatcactgagttttcaagatgtgtgctgatttcctggaataagaggatgtggagtttgaaatgcaaggcttttgttttatatttagaaatgagtgaacagctgccaagtatctgwaacttgggtaaaaaataaatccaccttcactggggggttgacctgtgttgataattaggaggcactactaggaaagaaatgatcaaatatacaaatatgacagtgtgaggactatttcttccctctcttccttcttcagaattgtgactcagtgatttccaagcctgatttggtcatatgtcagataatctccagtaatctcaaatactggtatgaaatcctaaaaataaaatatattttaattcagtgtattttggaagcagtgggaatatttaatgagtgtcataaaaaaaaaaaaagagtctcactctgtcacccaggctggagtgcaatggcacaatctcgctcagtgcaaccactgcctcccgggttcaagtggttctcgtgcctcagtctcctgagtagctgggattacgggcgcgtgccaccacacccagctaatttttgtgtttttagtagagatggggttttatcatgtagtccaaactggtcttgaactcctgatctcaggtgatccacttgccttggcctcctaaattgctgggattataggtgtgagccaccgcacctggccaagtgtcaaaaatttttttaagttttttttttttaaagtttaattaatggacttacagtaatatctgtgaagcattgactatgtacttacaagatatctgcaaggttaattcctgttcatctatccattcatccastcattcaacaaatacttattgagagtcagttatgtgccaagtacttctttatgtgctgaagatacagcactgaagaaatagaagttcttacarttacaaagctgacattttcaggaagggacacagacaataagcaaataaacatatagtgggttacgtgcgataagtgtggaaaagacaaaccagaataagaaacagagaatagctgggaattaartcaatgtactacatataggtaattttggagggggtagcctcataataagatgacatctgagtagaaaactacaatggggatggggaggagccgtgtgcatctgtgctaagggtggtccagacagagggagcagaactacaargcccttgaagcaagatgtgttcaaaggatggaggagaaggcaggagacaggatcagattgctagaggcctggtcaggtgagacactagggaccataatgaggactttagctatgttttgagggagatgagaagctttggagaacttgtagcaggggcttgacatggtctgggaatgatatcatttttatatactttttaaaggtacgcatttataccctctctcactgtaattctcatagcagayccatgaggttggtatatttcattattcccatttttcagcaaagacactaaggctcacaamtattaagaaaattgcctaggtgacaaaaataaaatacaaggccccttctctttctatgtcctccagacttccccttcacctttcattgcattggctgctgccgtctaacgtagaaaactcatgtcattatatgggatgatatcaagaacatgggaaaaccaacttttatcaacgtttcactaactgtcaaaaacaaatagagacaccggcagacttcattctggggacttatgagtcatggaaagstttcttcaggaatttgaaaaattttcaaacttacagaacagttacataaacataacagagaacttatgaataccctttaaatagattcattaatgtgtagtgttttgtcacattgggtttatctctttctctgtatgtgtgtgtgcacatatataatcacataattttatttctgaaccttttgagaataatttgcatatgacacattcctttaccctttgtacttcattgggcattgcctgtgaataagaatattctcttacgtaaccatagtagagttatcaaattcaggaatttaacatttatataatatttgcttgatctatagcccatagtccaatttcataaatggtcccaatttatgcctttatagcatatttttccctctccattactggatctggcccaggaccaagtcttgcatttagttgtcatgtttctttagtctcctttaatttgaaacagttcttcagccttttctttcttttatgacatggatatattcaaagaatatggaccagttatgttatagaatattccccatttgtgtttcttttctggtttcctcatgaaaagattagtttacacatccccaggcagaaaactacccaagttctattgtgtccttctcaggatatcacatcagggagcaccaaagcccatctacccctcattggttttgatcaccagatcaggatgttttccagttcctccactgcaaagttactcttctttccctgttagccataactcataagcaatctgtgcaaaagcactttgagatcccacaaatatcctgttcctcrtcatatagcctcctacctcaaatttagtatccgattgttatccattgctttggaaagacagttgatctttttgtgtgttagccttgtatcctgcaaccttgctaagtcacttagttcttatatgattttttggatagattcctagaagtttctacataagtggttatatcagctgtgattagagacagttttactttcttcctatcctgtctgtatgtctcgccttccttccttttttttctttttyttttttttgccttattgcatcagctaggtgctctagtacaatgtacaatgttgtatagaagagagtgagcatccttgcctctttcatgaactcgagagtatttactttccctcgtgttagctgtaggttttttttaaaatagatgccctttattaagctgagaaaggtctattatatttctaatttgccgagagtttctactttgaatgtatgtttcatgaaatgctttttctgaatctacagagatgattatatcatttttattttagtctgttaatatatggatttttcaatgctaaaacaaccttgaatttctgagttaaacctcattgtcatgatgtatgacccttttaasatattgctagatkaagtttgctagaattttataaatgatttttgtgtctgtgtttatttggtattgctttgtagttttcttaatgcctttgtggggcttgggtatcagagtaatattggccttataaaatgagctgggacatgctccctaatctttggggaactgtatagaattggtgtcatttcttcaaatatctcatgttttatattgataataggtcttatctttttattttcttgattagcctaacaagaggcttatcaattttgttgatcttttcaatgaaacagcttttggtttcattcatttttctctattttgtccattttctatcttattgattctttctctcatctttgttattttcttttctctgattactttgtttctctgattacacttctctaacttaagcttagattgttaaattctttcctttgttgtaatgcactcctttaatgctggacatttctttccacactctgctctagcaacatctcataaatttgggtatgttgtggtttccttgctatacagttcaatatattttctaatttttattgttattttctctttgacctatggatttattttttgatscatggattatktggggatgtttaatttccaatcatttggggattttccagatatctcttggttatgatttctagttgaattctttcttgatctgggaaaatgctctgtacgatattaatggtttcacatttgttggagtctgttttatggcccacaatatggtccatgttggtgaatgttccatgagcacttaaaaagaatgtgtgttttgttcttgttgggtggcgttttctctaaatatcagttgggtcaagttggttgatccctaatggttcttggtctacttgttctattaattattgagggaggagaattggaattacaagctataactgtttatgttttatgtcccttttccatatcatagatgatatttcattgagtatatgtgaagttatgcttcagacgattacaaaagaaggcaaaaagtaaaaactccaactttctaccagctgtttttcaatttttttcttctagcagctgtttttcaatttttttctcttatagggaaaactcatacttcatttaaacccagctggagcatgactgctgtatgcctctctgctctcagtatttattatagcaaccatcttctctggtccctgtttcctgctgagcaagtgcacaaaatatgcgttctactgaaagatttatgggtaaaataacatgatgtctggaattagctttaaaatgtacagcaaaaaaaaaaattccccaaaaggcacggcagtacagatgaattaagatgaaaaaaatcttaacaaattttaaatcttgggaataggattctgtatattaatctaactgtgtacatttgagatttttcataacaaaagttgaaaaaactcataatgcttgaaaagttcacaaaaacatgacttggggtatgaggagctacaaagaaaggatgtcactcatctacaagttgattaatctgctggtcgtctaaagtgtaatgatcaaaagtattggagctgccttgaaatactctcttaacaattacagtagcaagagcaggaggctggggtggctgactagtggaacttgagaatctttatagtttgcaatttgctgcatgtgactattagcttccaggtgaagtagaacatagttatttgttataggacacactgtgctcagcattaacatttgtatccccctctttcttcttcaaaatgcattcaaatctctcagctctcttaggagcatgaaaggaataaatatcatttaataaattaaaacaaaagaaaatgttctggcagcgtgccgtggctcacgcctttgatcccagcactctgagaagccaagatgggagaattgcttgaggctgggagtttgagaccagcctgggcaacacaggcagaccctgactctaccaaaaaaaaaaaattaaaagtgatccgggcatagtggtagtcccctatgccccaaatataatgtgtatagatattacatatattatatattttacatatataataaattatttatattatatattatacattttatgtatataataaattatttatattatatattatatatgttaaatatataatatattatttatattatatattatatataacatataatatatattatttatattatatattatatgtaacatataatatatattatttacattatatattatatgtaacatatataatatatattatttacattatatattatatgtaacatataatatatattatttacattatatattacatgtaacatatattatatattatttacattatatattacatgtaacatataatatatattatttacattatatattacatgtaacatatataatatatattatttatattatatattatatgtaacatatataatatataatatgaataatatatattatatgttacatataatatatattattcatattatatattatatgtaacatataatatatattattcatattatatattatatgtaacattatatattattcatattatatattatacataacatattatatattatttatattatatattatataacatattttatatataaaaataacatatataatataacatatgttatatatgttacatatataaattacatatggggcataggggaataccattatgcctagctgatttttaatttcatatatatatatagagagagagagagagaccgacagacagacacagagacagacagacagacagacagacagacagagacagagtctcactctgttgcccaggctggagtgcaatagtgtgatctcgtctcactgcaaccaccacctccggggcacaggtgattctcctgcctcagcctcctgagtaactgggattacaggcacctgccaccacacgtggctaatttttgtatacttagtagaaatgggggctttaccatgttggccaagctggtttcgaactcctgacctaagcgatccgcccacctcagcctcccaaagtgctgggattacaggtgtgagccactgcacctggctggcaatatattttacaataaaaaaaaaaaaaaatatatatatatatatatatatatacacacacatatatatatatatgtatgtcttttgatctgacttctaggaatttaacctaaacatattcataaatgagcaaaatgaaatttaagaaactattaacattaaatcattattcgtaatagcaatatactgaaaacaacaaaagtgttcatcttcaggcgatgggtggtttggaataccatacagctattttaaaaatttttacttatgaaaagaacttctagttcaattaaaattttctgttcttggctaaaattaaagcaagtttattacgaaagcaaaggaataataaaaaaagtctaatccataggcagagcagcggcatgagctgcttgactgagtatacttatagttacttcttgagtatatgctaaacggggtggattattcatgagttttctgggaaaggggtggatatttcctggaactgagggtccttctcttttttagacttaactaggggaaactgtttatactgtctgttactcagtttaagaaatatttattcagtgtttagaactcccagcccttcaggtactgtgctgggtgctaaggatgtaatattttattttattgattttccattttttgagcactttgtcaccagataagtgcctcccacaactctctcaacttctctttgtaagagaaacctccctatgcttcccagataaggtagtgatacctccaaaccagtttgattcatggaatctcaggagagtatattgcatcctatgggcccactgaccatgtatgaagaggcagtgtgctatattaaacccacctcggggaaggaaactctttattaataatttattgatgagacaatatattgtttgtccacttatagaatttccatattgggaaatttccatattgtgccctccaatgtagctttttacaaccctccctcctttctaaagatacacatacttggccttcttcacctatttatggcacctgtgtgaccgtgaaggacttgagtatgccacccctttccagggtagaccatggaagaacaggcaaggactaatcggtgtgctcaaggactatcatagtccacatggcaccttgtccaaattgggaagaaaaaaaccaaccttccttaagacaggttttttctttcatctgtcataaagttatgatatactgattttgttagaaaaatgaattcactgccatttgctaaagaatttataataaataaatctatgatgcttttgataaaaaaaaaaacatggtcccagggttgtgcaatgcacatcctgcacaactgtacatggctgtcttgtatatttaaattaagtatggtctgtatttcataaggaaacttatggaaaacttacaggctttcctgggcattccattaagtgatctgagtttggagcagatcattaaaagaacaaggaagatcacagagtgacagtaagatcacccttatctcattttctctttggttaagagaaaacaccttgttctttctaacaggcagcttttcagctcaaactctgttctggaccagtcttgggggtaggaggagcaaaatccagggaggaatggttgaatgggagaaggaaaccaaagtggaggagatttttgagaggtaatgtcaaggaggtaaagagttttttccatttggtttgtggccgctasaccttcttgcccatacagaactgaccctgggaagctgttctttctgggcctgaaaatgacttctctcattagtgattaatgttacctattcaggggtcttaagagagatggcccttcgactttcatgttctcagctcaacattcatttattccttttctattttttctttattcatctttttccttttatttatacaataactgtttttgagcacctactaagaaaaggcactattacagatccctgttctcatggacagaccatgttctaaatagagcttctgcccaagcagctgcttcagagaacccctctcaactgaagatacattttagtttgttccgattccatgttaaagtttatttttcattattatatttgagataaaaataaggctaatatatcactgttagcattttggtttaattattttcwgcatttttgttttgtatccatttttgaatagttgtgatcattatttaaatgttattttatattcaccatcttcatttaatgctctataataagcatattttcatgtttgttagactttatgacttcaaaaatatataaataatagtccacatgagaattcctgtaatttgcttaaccaatcgcctrwagtagaacatttaaatagtttctgcttttttctatcataaataatattttttctattataattagtagtagcaactttgaaaattataaataaatagacgtctttgggaggggtagcttttggatggtttcattcagatcartcctaagaggttggacaactctgccaaaggatatgaactttttgttttttgctctgctacatgctgccaaattgcttcccaaaacacatgttctgttttgtgatttatgatgattccagcagtgtttgaaagtatcatttcactgaaacctcataaaaattggacattggaagtttttaaatactgcctaattcagttgttctgaaaaaaaaataagtagatcctttaaatttgtatttctttatattctattgatgtgaaactgaggaggattttgttaacataccagaatttgatcttgggacactgggtggcatcatctctctgccatcgtgaaaccatctactcaggcagtggcggtcatcagagctgttcatgggcattcattcttgtctccttcttctagtcacatgatgagattacacttccctactccctcaagttaggcgcggacatatggcttgctttgtctaatgagtgtgagtgagagcaacgtgtcacttctggctgaagattttacacatcattgtgagaatcaccatgttcctgttttcttgcgtccatgatcccaggcactttctagcctgggtttttgggtgaggataacatgaagcaaaggccctacagtggtctgtgatggacaggcagaataactgagaagtaaatttgttctaggccactgagatttgaagattgtgtgttacaaagcacagccacctgtcctgactgatttggscaacatgaacagttcagttgcctgcattgccgtgccacagcactagggtgccaggccattgcaacactacagagcactgcagcagatcttggagtcaggtgcttttccaaacaaggaaagagttcagcggtatttatgtataatccattcaattccaagcaacaaagtgggtgacaacactatgccatctgccagctcaaattatttttgtcatctcagattaaaaattctgttttaatattcagcagggaaatgacttaatgctggttggctgcgggcaactttttaaaaatggcttttcttttacaacaggcccataaaagctaataaaaagagccagcatgtattgatcattcattatgcttcaggggccatgccaagcatcctgccaacataatccccttcatttcttttcaaaaggtcatggggtcagtgctataatcattgctggtttacagatgaagagggaggctcagagtcagtatctcttgtcaaggtcatttgatggttaatggaagtgccaggatttgaacaaagccacttgtaattccaggggctgtgtagcagccactgcacaataggggacacactggttcttctgaagctttctcaaggcctcttgtgtggcccatttgattctgccaggttgttgtcctttgctgctatcttctttccctatttcctgcctttgctacattggcaccaagacttttatcctatgcatgatttcatccatccaacactcaccaaacggacaccatgcagatgctagagacacaaaaatcaatagaacctagttcctgccctctaggagcttacactccaaccaacagaaatacaacataagccataaatgcaagccgcagaagtacatgttaaaataaccaaaagaaacaggtgaccttcctttaactaatatatttcatttaacccagtatctctaaagtgttatcatttaaatatgaaagcagtatagaaaattattaatgagacattttacattgtttttctttttactatgtttttgaaatctagtacattttattttgtacttgacaccccatrtgaattttgactagccccatttcaagggctccgtcacctcctgtgactactggctatcryagtgctcagtgcaggtcttgagggaaagataaaggcatagatggttatttcaaagtaatggggagagygatgggacagaagtccagcgggcattgtgagaccacagcaaagggacacttagcccaacctggaactccagggaagcttccagaggaagacacctgggctgagtaaaagcagaatgaggctcagtcatgaagggccttgtaggaggagccaaggagtatgattttctgtgcatgaccctcttcagctttacagtgttcttccaygtacactaggacatttgggaagagcagcggccctcaaagtaggcatttgtggtgaccaagactgctagttgtctccccgttctattctctccttccacactaacagaagtcctatatttttaggtgtggcaatgggtggagttaaaaatctgcacctcccagtgagccttgcaagtaaagacagtagctaaagttgggtagggtttctgcaaaatttccttaacacaggctaactcagagaaaaggtatgtcatttcttcattgcctcttcctgctgcttgctgccgggaatgtagacatgattkccagagctgcagcagtcactttgtgacttccaggcactctcagatggaaagtgtgctctaagcacatcrgagaagtatgcctttgccttgtycttccttgtgtctgcmtaactgtggaactgctgaactgtctaattctggacttctgttatgagagagaaaaataaattactaattcatttaatctactataattttggggagctttttgttgttatatgcatacaaatctaatcttgactcatatacaatacataactcacaaatgagctaatattaactatattaactcattttatagggaagttcataatattaactatcttagctcattttgcagggaagttcaccaaaaatctgaaaaattaagtgaccaaacaataatcatacaaggagtagtagtgtcagaggtaaaactcaagcctggggcttctggtccccaaagcctgtgttttacttattgtaccattttgttttccaaggaggtggtttctgctactctcttccctctattactgcacattttcaggatagctgtgcagaacagtggctgtagagtaccagatcaccatgagttaccctcctgtatggagcatctggtatgaactagtgtagtggccactttgtcccagcccctactaggacatgcgtggcctttggcttgaccatcggcaggaggtccataaaatatcggggcaatcatgcgaccatctcttccccttacctgagcccccaaaccctggccttcagggttcccttctgcttccactgggttctcttggctgagcagagagaaggttcaactgagcccttckcatcctgcaggtactggattgtgcaggcacctggcttgtacctctctctcccttcctgctatctgcctcctggctatggcattcctcaattaccatccctagcacagggtgataatactcaaatctgtcaattctgcaacttgtcagctgctctacagagggcttggtgggaaaggaggttgctgactcaaagctaaaygtaattttatatcatctgcagaactcagtcaaccgcaagacacatattgcttgcaagttgaccrcatcagtcaatggtttattgagcatcttcattgaccttcagaactaccattagctctatcctcgctgccaagaaatggcctgagccaactgcctggtgctgcctgcctcactggtttcaggtgcggtcaggctgtagccatggcctttggrataggatgtaagtaagctgwcctggcactcatcactccaggatttctctagccttgcatgtcaatctgtcttcacttttggacagaggagcatgtctgcctcttagtgcgtctggacctagagcagggatgaaaattttttttctgtaaagggtcagacagtaaatactttaggctccatgggccatgggcttagttgcaaccactyagctctgtcattgtagcatgaaagcagccayagacaatatgcgtagaaatgaatgtggctgtgctaccgtaacactttatttatggacactgaaatttgaatttcatatgattttcatktgtcacaaaatattattcttactttgattttttaaaccatgtaaaaaacatgaaaactattcttgactawtatgctatacagaaagagacaaggggctggatttggcctgtgggctgtaatttgccaatccctgatctagaagcagaggaatatggtggttaaaagggatggccttttgcaaagcctgtggatgtctgcaatcagctgtgtaacttaacgtctgctgcctcatctttctaatcttcagtgtcctcatttgtgagatggggacagttccaatacatagtacagagggctactggttgattaaatgagataatccagctactctgsaggatctcctgagcccaggagttcaaggctgcagtgagctgtgattstgccactgcactgcagcctcggtgacagagcaagaccctgtctcaaaaaaaaaaaaaaaaagaaaagaaaaaagaaaaagatgtatatcactcaggacactgtgaggctccactatgggcccagtggtgagcgaggcactctaggagatcaaaaaatgaaccagacacagctgcacactccccaggaacgtggtgtctagtagggaggtggccgtgtgccccaataattgtcacgcatggcagagtgagcttgtctgcaagagaggcacagcagtgacaatttgtcatctcactgtgtgcagtactgcttcctagggttttggaatgctcagggtgtttgctcaaagagacagcagacccacctgggactgccacacaagctcagtccttgcacttctgctaatctcctacagcccacaactgtgctgcwgcattctcartccagcatcaccattacctttgccagcaccccttgccctttcatctgctcacagtcccttggcagccacaggggtagaacttccactttccatcgtttgtaatgtagtccagttcagcttatggcagatagcaccttgtcactgatgaatttctattaaatagaaggtattctaataaaatrtatatagttttttgataagtcatttacaagcgaggtgagaaatatggtaatctatgtttttatgtgttagcattattttaacttctacttagaaatgaatcatacccttacctctttctgtaagataacttatttcacccaatctggccaccaaccagaatcctaacggggctatcacctggggaccacctagactttgttcctgtctttagttatagaatttttaagctcagcccttaaagacgaagataacaaagtgacttcttgtaaattactggaacctccatatggttttaatagcatacagttctccaaattgttttctgttatattaygtataaatcataggacatacttctgagactaaaataataaaargtgatattcagatgctaacagctaatctcacttccagaaagaattgataaatcctataayaacagtactgataaattcagtttgtttgtctcctgaagtcttcctggatcaacattacccacgaattctttcatgtgctgtctgctcatgtcctgtgctgttgcatgccccattcacctctcaggatcttgaatcagggattttataacaatcgcagagcttttttatgtgtcttcgactgtagttactcaagttcatgcttttaaagtagtgatctctccactcttcctttttgcaaaccctttaggagagttcttttcttccaatacacttttaaaatgctgctgcagctaccagttaccttgggaattacttctctcatttttgcactgttayagtttctttctgctctgtccactctttgatctgccttctgctgtgatggcaggaagggtttttgaggttattctaggatgttgaagtatgaaaggagcttccaagttgggtatgacatgaaaagcttgtctgcacagggctgctgtgtaacatagttccaaggaacactattctcttcatagcctatgtgagtgttgtaaactggagttgtacagtgcacaatctgtatggtgatatccagctgccctgggatcccaagggacaggactcatttgagaccatgatgagtactctgtattctattggcttactcatgaagaaaaaggaggaagaggaagaggaggaggaggaggatgcagataaagaggataaaagaatagcagtactttgatggagcttcttttgtgctaggcactccgccaagcgctttatatatatatatatgtgatggttaatattgagtgtcaacttgattggattgaaggatgcaaagtattgttcctgggtgtgtctgtgaggctgttgccaaagaagattaacatctgagtcagtagactgggagaggcagacccaccctcattctgggtgggcaccatccaatcagccgacagcataaaagcaggcatggaaagagcagacttgctgagtcttcgggcctccatccttctcccatgctgaatgcatcctgccttcaaacatcggactccaagttattcagcttttggactcttgggcttacaccagtgatttgccaggggctcttggaccttcgaccacagactgaaggctgcactgtcagcttccctacttttgaggttttgggattcagacaggcttccttgcccctcaatttgcagacagcctattgcagacacaatcacaatcaccttgtgattgtgtgagtcaataaaatctccttcatgtatacatctatcctattagtcctgtctctctacagaacctttactaatacaatatattaaattttaattactaaataggtggctggttgtggtggctcacacctgtattccagccctttgggaggctgaggtgggagaatcacttcagctcaggagtttgagatcagcctgggcaacataatgagacctcatctctactaaaaaataaaaaataaaaataattagctgggtgtgatggcacatgcctgtaatcccagctactctggaagctgaggcaggaggattgcttgagcacaggaggccaaggttgcaatgggccctgatggtgccactgcactccagcctggatgacaraatgagactcctgtctcaataaataaactaattaattaattaataggggatttttttcttattcatcatgggaatgattggttttctggagtacaccagttactgaccttggtaatggtgagcaagccagaaacaggcttccttccctcatgtaggctgcaacctaatgaattttgatggaagtgatcataaagtcagctatgctattcatggcaggaccaaagttcagcacaaagaaaactgctaaaattgccatcagaaccttctcaaaaacccacacaggctaccagttgcgtaaaatgacaaatccaaccttacatttaacattacatcaccaactgggctttctgtttagcctttatttttttctgtaactctgcatctcagttctttcacactggaaaatcaggctacacctttgcctgcataggaactccaaatttccccgctggaagctttgcctcaagtccttgtcccccttcctcctttctgcctacccaaatgtctccttcttcctttggttcacagttcacctcctctaagcagccttccytgatggaacacacagagctccgtcccctggatctttgaatacaaattattctaaaaacattttgtgtgtaacaatgtattsctttgcagtagttctcgtgtgtgtccgtttcttctgtctctctctctctctctcctctctctctcctcgtcacatattccttgatgggggaagtctcatttctaattttgtttgtagccatcctccatatcccctactcctgtgcctagcacacagcaggtgatcaataaatctttttaataaggagctgactcaccgccagcactctggcccccttggctcaggttgttctgaggcatgcagccttccaagaaaagctggctttcttggcttccttccatagtgctggtatgaatttcaatgctagatcttcaaagaaaaaactcagaaagggccatcctaccctggggtaattgtgaaagaaacagatccccagtagagacctgggggccagttggataaaattcacacttatgtccattttcctttatcaaaatgaaacagaatttccaacctaaattaacactcwtttaagttcttactatatgatatctatatgggtgtgtgcatgcacacatgtactcatgtataaataggtattaacatwtaacacatgtacatatagtatgtatgcatgtggattttatctatctgtctacctagcaagagagaaagagagagagagtctgagctctctgcctctgcactgaatacttctatactacacctcttagaattaatttatgtatttgtttgtgtgtgttgtgtgtgtgtgtacatgtgtatatgtacctgtgtataggcaacacagggagcaatttaaggtgcagtattttataaacatggtgttcttgttgctttacggtgataaatcacacattgtataattgatagatacctgctttataagtacaggaggagttcagctagagtatttttcataaatttctggcaacactttaccagcccagaataatagataactagttttcaaataattatctccaaagaaaaaacgtctgcagttacacagagaaattttcactgtcttgattttgtaaactttgggatcagaaaacctttccctgtctagccaatctttctggttggagctgaagccacttccctgttagttacgttacatgaatatgttacatcttaattttgtgtgtatcttttcttctcagccatcgtcaactgattcactaacagcttattccgaggtagaacatgcccctcagtgttgtcctaggtttcagaatttcccactttctggaatgcagatattggtgctggaatgaacagtggcctggctggtttgtctcagagcaaactgtgtctgtagttctcttccatctgtatgatggagatcrtaatatctcttggcaatggggattggattaagtggcactatgaatgtgaaaatggtactaaatggagcacttcctgagtgcgtgtttgcttttgaccctggctgagactggcagcaggaagtatctcctctccactcccgattgttcttttgtgtttccccttgtgctcctttcccccagcctcctcctcttcactttggttcctgggcagctgctactgtgaagacagtgcagctcccatctgctttcagcatatgggaccaaggctgttgcttccaaagtcctcatgtttgctgttcagagcagggtgggttattgtgtggaaagtgaggcagaaaaattgcagcatgatttaatcagtctctgttaaagcttcatgtagtattgatgggattaattgatcagtctttctacctatctgttcatctatccatccgtccattcatccatctatccatccatgtatccatctcctaacttttaccacagaaagtttgagtttcstcacacatctctatagtaaaatataaacagataaagttcaaaattagagaacatatagaaagcacagaagtctgaggccaagagcaaattaaaacacagatctgcatattagaggactcrtaagtattactgccaacccatgattttgactctgggcatcttgacattcaagcaaaaggggaaacactgtgaatttacatgatctccagagtccataaaagatagagcagtggcaggagggcagaatatgtcaaacaaagcttcttttggcatttggatctgaagaaaatttttatatgggttcccaataggacttggaatatgccttcataccagagtgtcaaggaatctagactcaacagtcactcaatagctacattctcaataagatttagaatatccctttttatcaaagtatcaaaaaattatagatttgacactcattctagagctggattgcagttaaagctgaaggtaagccgtatatatacaaagatctgctggttgtggttataaaaatattgaatgataaccaatatccctggattgaatcctcctggctttcagtccatgttatcccctcttctgtgtaaggaaagtgcagatggatgtcaaccaggaagcactaatttaactattgctggatctattagttgcttgtcatagagtagatggttgatcactttgttagggaaggatgataaagcggtgggtggcataggcatcctctctgagtggaatcactcttcaatrtagatgccatactccakgatcccatggatcattagtaattatacaggaagggtggggaaatgaatggtttgagaaaaactcrttttcatagctgaaatcagtcaacagtaccatattcatataaaaatatgttgtttgggaatgatagtgactgactcaccagaacttatctgatagctctagatttaagtttgaacctgccctaatgagtgtctgcacaaaatgaccaaataaggtcattgccaagaaacacaactacttctcatacacatttaaaataaaaccgtcaattgattgaaataagcatacaatactatgtttggctatcatttttcttagtttttatgattttgtggtgctcaaaaatagaagggaagtacttgatattttaagttgcagactttttgtccatgaagttttgtaatggggccttgagtataygggaagcacagactcaaatgcctatgcagcccaagcaagtcatggaaatgcatgaagagggctggttgcaaagaagagagaatggggcaactatggcaactggaggtctcatgtccattcaaaaggttgcagtagctacttccctcatgtcggttgttgctacacagtaattcagaccccwgtgtgccctgtcatactatttaaggtagaaatccttgtttcctgtgacattcttctgacttttaaaacacatcatggccaaattaaatattcctacagaccagatttagcctctgctcattttgcacccagttgactatcaatataaatatgaaagagaaaacaagataaaagcaaagagattgagctaagaagacagatgcacatcacgcttttagccaattatagattcacttcactgagaactaccgtgggtacattttgctctctaaaagaatgaatacaagatgaatttcttaaataggattaggtagcacaaccatgccgaattattgttaaatgcrtgttagaatgggaagagagctagatcttaaaaatcgcatggcaaaactaacaaagcagttacttgtcatccaaactggtctttttaaatttgaaatctcaagtcttccaggtacaaaatactttctttcctctgtcttgtaccagctatagcatttctcaactgagtttgtaagtgtttttgtctsattcatttatggataatatataaagggaaagcccagagagattttgaagtctacgtattatgcaaagtttcctcttggcaaaataaagtgccccaagcattatgtagtgaaggtacagactgctgtttcagttttttaaactgaatgctatataggattacactaatgcttctccaaagttatttgttaggggaatggagggagtatggcataagcaatcatgaaaatgttcatttcagttgtcaaatgtcattttttaaacagtgtaaatctaatcaaattggaaatgtgcctgtatgccacctgtttggtgtttacctgtgctgctttacttgctgggaggcatgcagaggcctcaggaggctatgagaactaattgaataatagctcatgctacaacataaataaattagtccctctgtgaatacatgttaaatgctccagaaggtgcattctggccttacgtagtgaaygaaggtaccatttatctttctataagtctggtgaccttcaaatgactaggaggttgtctgaaattccatcttcatcccaagtaatattaatatggggtggtcttcactggattggttaaagcacagtggtagaaataggcctaattgcaaatagactgattcacctctagcgttcagaaaagcatggtgcagattttaaaagcacatgaaatgagtaagacattaaaatatataaaatttttagtaaaaacaaatgaaaataatacactctcagcaaactctagtgtctggcaatgacccaggaaaaaaatacattattgtaaattgggggaatttctgttttaatcaaagctacctatacaaagtagctcaagtcaaaaagaaaaagttatcgaagtgaagtgtctcctggaatgtaaggcattcaggcccagacagtgtcttggtaccatggtggggaaggaggtatatcgtctccagctttcaagtattgcatggtctcctcataatcatctttctgtttccccatctctctcagttgtgagtggctacctcccccaaaattacatgaacttataggcaggacgactcaaatcatttctcatccaaatcatgaatcttttgaatatgaaaggcagtaggattgattatttctccaggacagcaggtataaactgagatgttccgggtgaaccaagacataggattgcctgactaccaccaacaacattagagcttcagaacctgtccctctttggttacagtgccttagtcttttgcttcaggctgagttaccctctggtcaacagctcattcttaatctactggttggctatggggtccaatggtgtaagcagaacatcagaagcttggagcagggccagctattcttagtgagtgtggacagagaaacagtgctggcaactgtggcagtgtcagagactcaacatgttatatgaccagaaattttccaccaattggcttgtagtagcctgtcacaacaaccaccggctgctggaagcaaaatcggggtttaagctaatgcaagcttcaagatttcagaagctgatgagctgagtgggtgttttccatgactcaccttcctcccatttgcccctgaagcatgcagattttctcagtcctgtttcctttcttttagcttagtctacaatgtttctacctgtttttcagtagtagttaactgtgattttgcttacctttaatatatgctcctttcttcggataatggaagcccagtcttccttttgggttagataaggctggctcaaggctagtccattggcattgatcccctggccacagaaatggattcagagatgggtctttaattgaacrtggttcaacaagactcaatatggggcttttgttggaacactttggagggactgaggttgctgagcttgtagcagtgttgttttagagttgctggtaatcatcttgttctatgagggggaagcctgcctaacggggaggcaaaaacagagaaatgcagagcaagaaaacaagaaaaaacgaaaaagagcaagagagtgacagcacacacaagtgagagaacaagtcctaacaacagcacaggagagcttgaaaataactattcttgaaaatggaactttaatcctgtatttttcggttttttgagccataaagctcctattcaagttatacgtagttgagttttccaccacttgttaataaaagagttttcacagatataccttagaatcttggttctgttctggttcagtcaattattcctctatttaaggttgacctcctgttccrtctgtttattggagaccatgaagttcttacatcttgagccttctttgttgatgggtagagcatcagggcaagtctaccaggattctacagggattagggatctcactcaatgttcaaacaaatgaacaaactgcccttgcctttataaatgtttaacattactattttactaatgtttaggtcactacttgtcatctcaataagtgttctttggttttgaagatatgcatgaagatcatctctgatttgaaaaaacatgatctcaattgttttgccataagattcttgacagttaaagacttgactaatacacraaatactcccaacaatagtcctacccagtgctttgcaccaatcttttggttggacaaaaatagtgttaggttagtgttacacaacttatgaactgtaggcttggttgttaattgtaaggctttgrgtgaagaggaaacccaaataatatattcagtttcttagaacttataagtaactttgttttaagagagtttgattcgatggctgcttttgctgacaaattctttttaaagaggagaaaaaagcactaaaagggggaaattagcttgaagtttgatgaagctgtgcatttttctagttttttcatgtatcagtaggaamatacagtgtcttataataatgctatttatgttgggcactcagagaatctgctttatatctaaacgctttttgctactttactaagtaaacaaacccttgtataaagtgtaagaagggccacccgtatgttgaatttcactcagcagcagagtcccctgtctatatatacatttggaacgtattcattttcctatactacttcaactcttaccacctgagatatctgtgcctttctctggaaaaacacacacagcatatctgtataggaaaattcctaaaatttggtttatgtttatctaactttgagagttgggatgaagaaggtgtgggaactgtcttatgcaaatatgtccctatccattgaaaaaaagagaagcaaaaatatattgtcatatttaggagtttaggtaataaatggattttgacttgaaaaatataatggatcagataatttggttttgctactgagacactaactcaaagaactttatgattagactttttaagtaaatagatggagcccaaatatttaagtttacacacctatgattagggaagaaataagtaaatgagaaaataaactccttatyctgaagtaattgctttagaagacgtgaaccagtcaagaggtagaagtcgaaatggatcaaaaaaggagaaagaggatgaggaggaaaaataaagagaagaataaaaaaggagaaagaggacgaggaggaaaaataaagagagagaagaataaaaaaggaggaggaggaggaaaagaagaaaaaggagtaggaagaagaagaaaagaagagatgaggaagaagaagaggtagaagaagaaggagaggagcagaagcaggagaaaaggaagaagaaggagaaggaagaggaaaggaagcaagaaaaagaaagaatgctttcattaattcatttacttacgcattcaatgatatttattgcatacttactatgtgccaggtatcataacttgatctaggatttgatggtgaatgaatctttgtactctctaaatcttttaagcttacattccatggagcaagatagaaaaaactaagtaactagacaaaatagtaattattatcctatatgttatacgaagaactaataagaggcagacacagagaaaaagacaagtattccagctgtagatatcacatccatcctgcttgaatgatgttctgagtgtaattccacttctctcagcactgaccaggtcaggagatcgagaccatcctggtaaacacgttgaaaccccgtctctactaaaaatacaaaaacaaaattagccgggcctggtggcggacgcctgtagtcccagctgctcgggaggctgaggtgggaggatggtgtgaacccaggaggcagagcttgcagtgagccgagatcacaccactgcactccagcctgggtgacagagcaagactccgtctcaaaaaaaaaaaaaaaaaaaaaaaaatgggggaagaagaattaaatgaagcaagtggttagtgttgctctcttctttgtacactgattaaaatggtatctttttcttccttgagtgtccagtaaagagagcttaattggggaagctcaatctgatggactagagagaactgaaatgagctgtcggcaaattcttccagatagcccagaatcagttttgcagcaatgtctagagtttgacattattttataaaaatccacaccatgactattctattgtcagttgtatattttctggtataatgttgggacatgtggccagaacagctggggtagtcagacaggtattaccctttcctggcacggaaagaagctagtgtcttggtaaataatctctttgtatggaaagcaccacagacagtgtgacttgtaaatagcagctatttaagagaagcaagcaaacaaaaacagatcccttcaatctggtcttttaggagtagcagaacagaaagaaaatggtacatctgagtagtctgtattgattcgtgagtagaaatacatactaaaattgaaaagtaatggtttgttatgaagaagcctaaatcaagcctgagaagggaaggaaagtaattggaatcatggctgtagcatggagctgctatgtccttggtaaaatatctacatgacagagaaaattacatttgtgtatttgtgatcaaaaaaattacaagacacaatggtttacagcctgagagcttataatagtagttccaccaggtcattccttttagaaacagtgtgggtagatgtgtcctttgaaaggagttctcattttactcatgatgtgtgctctaggcataggaactgggcttttacgaataactgagggcagttccccatccttatatactcagcccactgccctcaggcttctagacaatatccccatagggacctctttattccagagcagcaattctaatccatgtcttcccacctctctaccctgagcagctgaaggagccactgtgcaaatgtggacatccattttgactttcttatactctaaatagctggcctttcttccctctcctctggtaaacattccagctctacagaattaacagcgttyttcaaacaaatggtacctgcagatcaaaagcctcctccacatcaaaaaaaaaaaagaaaaaaaaaaagcactccttgccaaaatcttctccaaaggcaaaattacctgctggatttaaagagcccttcacttctcttaccccaaattctgtccgccagtttggagaactgaggaggagaggaggataggctattactgctcctttccttttgggttctccaaagtcgctgaggagaggggagaaatcaacaattaagtttcttttcctttttacagaggttttttttatttattaatttttttgactctttacacaccrtgtggaaacatagacacttttctttatttatacacatttatttaaccattaaaataaaagtgagggtaaattgtgaaaaaacaaaaacaaaaacaaaarccttttgacagaattccccacggggaggaattagctgatgatggttcctggacttgccaggatattcctgattttctaaatcccatcaatcccataaatacatcttaaacttgtcaaacaagaggctgtgattttcggtttgttaaatgtggcccctgtattaagattataaatagctgtgactatagtgtctgccgtggactgaattgtgtcccrtccagattcacatgttgaaatcctaaccccagtgtggctgtatttggagtaaggaagcaattaagtttaaacgaggtcatgaggtggagccttggttctgcagaattcacgtccttataaaaagagacatcagagagctcaayagcttgctgtctctgccatgtgaggatgcagtggaaaaggcagaaaactgcaagccagaaagggaacccttgccaggaacctaaccatctggcaccttgaccttggacttcccagtctccaaaactttgagaaaataaatttctgttgtttaagccacccaatctgtggcattttattatggcagcctaagcagactaacaytgttaataatataataaaattggatttttaaaatatcaaacacaatagaactgacacatccagctcagtacttactttgtaggctatttatgtattgcatggatgctcgtgtaacacaaaactttgttggagcttctcttttacattttctttttggagataattggcgagccatacaagaccagctgtgtaactttatagtcaaaatcttgttttttaaccaaaaatgatatttttcaacttgccatatatcctactaacttaattgggcagccattattttgggtkgtattaaggtctcaaatttcccccaaaggatagagacttgcaactgttgagaatattcaaaagattattkgttaaacaaattaatttaccgtaggctttgaaagcccaaacaacagagactcaaagaactcacagatgggtgacaaaaaccactgctggcaatctctgagaactcagagagaattggagaggtgccaggaaactagagctgggtaaatattgtccaatatctttttaaaagagaaaaacgcaaatataggaaattgtagcttaacagacttgatatttttgactcccaatcaaattttataagcaaatagttgggtccagaatttaagggaacatagtcaaaaaacaytgttgaaattaagataaattaagttctacttagtctctgatgttgcctctgagaacaaattggagaaatgagcaaaatgacatgacaattaaagagctttgaagctttatgtgtagttgagtgaatctctatgaaaagtgttgacacagaawaaagctgacagtatattgttaatagtgaaaaagcaggttgtaaaccaatggagtacaatactattgttgtatatattatagagatagatgtgaaaatgtaaagaaaaattcctgggaaaatcccaaaatgttatcagtgattatatctgggaattatttttcctttttgacttttctgcatttctaaattttatacggttaagtaagagacaaattttttcaattgcaaaagaaaatggttaaggcygggtgtggtggctcacacctgtaatcccagcactttgggaggctgagaaggatggatcatttgaggtcaggagttcaagaccagcctgtccaacatggtgaaaccctgtctctactaaaaatacaaaaattagccaggcggtagtggcacacagccataatcccagctacttgggaggccgaagcaggagaattgcttgaacctaggaggcagaggttgtggtgagctgagatcgtgccactgcactccagtctgggggacagagtgagactgtatctcaaaaaaaaaaaaaaaaaaaaaaaaatagaaaagaaaaggtcaaaagaaaaaatataatgggagaacagaaatatcaaccaatacattgatttttatgtgtaggaagatgctgtgaagaaatggcattgcttttactgtaataggatattcttactatatgaatgttgccatactttattggctgaaactctcttgttaccagaatcaccgggaatacagattctgggttttatcattctgatacaatagacttggagtgaggcttggaaatttagccacagggaattggtcaaattatggcacattactgagttgaaatcatatatccattagcagtgaggtggagaagactacttaatggcctaggacgttattcatagcatcttaaataaaaagtgctggttataaaataatacaatgtaattttataagtaagaggcatttttacatacacacaaacgtacccagaatgttaagcataattagtcacttgtataatggaattattmtttttattgtattctttttgatttgtggcatttttctaaattttttatacttttcatttgttggttttgtagttatttttaaaccaycatttgcatcctttcctttatagggatataactgcaaaagatagagttgagagaaattttataatgaagatacatttttaaccaaagaatccttctgttttcatttaaaaaaatccacatggaaacattagctaggtgaggttaattatttgggatgagcccttacaaattggtgaaatagtgattgttcagggtatactgtaaatttaatcctgatctacatttccacctagaactgctccctttatccctttccgggtcctttggaggagatggcattcccctgtgcaggaggggcagtggttatatgtgtttgcatgtttatttttcaacaaggtctttttttcaaactatctgtccttacatgggatggacccagggccttacagggctgcttctcaaattaaatagtttcaccaagttcattagtcatttttccaaatgtattgaatttacatttcagacttatttattgggatggctgctacattagcactgtgttctagagactagcgataaatgaggcttaaacttctgctacggtttaagtgtcacctgcaaaactcatattaaaagttaattgccattgtgacagtattaataagtgtgactttggctaggcatggtggctcatgcctataaacccagcactttgggaaaccgaggtgggtggatcatctgaggtcaggagttcaagaccagcctggccaacatggtgaaaacccatctctactaaaaacacaaaaattagctgggcatggtggcaggwgcttgtaatcccagctacttgggaggctgaggcaggagaattgcttgaaaccaggaggtggaggttgcagtgagctgagatggtgccattgcactctaccctgagtgacaagagtgaacttcgactcaaaaaaataaattaaaaaaagaagtatgacttttaagaagtgagtaagccatgagggctccactcgcatgaaatggttaatgtcaatagagtgggttgttataaaagtggccctctctgtctcttgctcttgcacttgcttgccctctgccttctgccgtggtaagacacagcaagaaggtcctcaccagatgtagttcctcagccttggacttcccagactccagaactgtaagaaattaactactcttctttataaattacccagtctgtggtattctgatatagcaacacaaaatggactaagacaccccctaaacagtttcccaaaaacttgatttaggtagagaaatggagatttttttaaaaaaactataagttcagtataacatgaatgatgatggtaagcttagaacatgaggttggagggatatttgtcatccttggctccacgggagaatttactctggaggcttttttaaaaatagagatgccttgtctctaccactagaacatttaattactagatgtagggtgagggcccattatccataggttaaaaacacttcccaggtgattcggatctagagctgagtttgagatccactctattacagcaactaattttgtctgtgatgttccagaatatagcagtgaagaaatgctagttgaatagaatctgggaggatgaatagaagtttgacatcaaaagataatctaacagaaaaaaatagggggattcaaaatcaagatgcctggccaggactgggttgatgtgggaatttgtaagtgttcagcatggtggaagcatggaggtcacagggcaggtctcatgtgtgcaggaagagagcacagagagggttctggaaagtgcgtacaggttactggacaagatcatctagaacgctaggttgggtctagaatgtgaggggccagagcttatcatgaaccaagagtgtgtgggcattagggatccagccaaggctataatataagggagagaccgggtcacagtgcctgtggtggagtggaaagaggccacagacagtagagactgctgggcagtattcaggagacatctctgaggcagaagtyacaggaactggccactgtgaacactgtgttgtctatcagcaatatcacttctggaattttttgagctttcacttctatattctttcctcaaatgacagagcatttctttgygttcacatattcccagttattttaccttttctctataaatctagataatactaaatgagagagaaaaaactgtcatgacaatagaatgagattagatgaatgtatatataaaatatatgtgtgtatatgtacgtatatattctatttttttgtattcacatatatgtttttttttcttatcatcaacaatcaccttccctagagcactttctgagtataaatctrtgagctttgttaagcacagcactgggagaatttctggagcccagtctctgcctgtgtttctttgtgctctctcacttgacatttctgaatgcaaatatgtctgacaagtgtaaataagggtgtcacagctcggaatagtacccatttccgccttgccatctcttatcatgtatgtgttcagggatgaatgtgccattttcatcttctaatattttcacagttrgaattttttacagagtgcaatggtgagctctatggtttcsaaggtgaagaratggatctactttttatccttgcagaattcagtgcatttgcaaatactttgaaaatatgccaaaataaaaaaaaggaatactcagcgttcagccagtggaccgaagcagcgtctgttgcacagtacttccaggtcaggagggtgatcctgggtggaataaactgatttgtttcaaggtgtgcctctgaacacatcraggcagggtgggtggagaggagataatttctattctattgcagtggttctcaaaatgtggtcaccaggccagcagcatcagccttacatagatttaaatccccattctgccacttattacattgtcaggacttgggcaagttgctggatctttctgagcctcagcttcctcatctgaggaacataattcacctgattgtcatgatgctttaatttaattagatgagactgtgaagcacttagcatggtacctggcccatagaaagctccacaaaatggtggcaattacaacaataatatttcttaccagcgttcagcgctggatttatatgcaccagatcacccaactggcttgcctctgtttccatcaggattaccacaatcattgccttctgccccacttccacctccaccaggatttctatccaagttctgttttcctgtcgaggctaatggggctcatcagggcaggccatcccttttggtcctggctattttctctcttgcctcttttcttttttttttttttgacagagtctcgctctcttgcctaggctggatcacacttgtgtgattatagctcamtgcagcctccaactcttgggctcaagtgatcctcctactttaacctcccgaagttctgggattgcaggtgtcaaccatcccaacttgtctattattctcaatatgtgctctctcacaacctctgatttaggaagggaccttgagtacttatctcatcaatacctaggtccaaatctattgaatctatgtagtcagaagtctgggatctacttagaattctatgctttacatatagggccaacgtggccaggtcactatgtstctcagagcctcagcttctctgtttgtgaaagatcatgycttccctgaccaaagtgcctgtcagaaccagatgctcatgatcgtgctgactttgtgggttgtttactccccctcttttctctttcccttatagttttatgrctgcatttctcaacagcagaacatgatgcaagattttgtgaggacagccacttaccacagagccgtcctccrgaatcacattgactttagagacaaggtaatgccggcagcaggttatgaatctcatgcatttcagaaacgttttcaagaccagaatcaaaatgaagctttagtagaattaccatatgacccagcaattcccctcctagctatacacccaaaagaattgaaacaggcattcaaacaaatacttgtgcacaaatgttcataacagcgctattcaaaatagccagaaagtggaaacaatccaaatgcccatcaactgaagaatatataagcaaaatgtggtatatttacacatggagtattatgactattattcacatttgtattattcataagaagggatgcagtgctgatacatgcatcaccatgggtgaacccccaaaaaaatgctaagtgaaagaagtcagtcacaaaaggtcatgtgattccatttatgcgaagcatcagartagataaatttatagagatggaaagtgcactagtggtgtggctgccagggttgagggaggaagggaagtaggaagtgactgcttaacggggacggagcttccttttggggtgataaaaatatcttataaccagataaaggtaatggtcgcccaatgtaatgaacgtctgaaatgacgccatactgtatactttaaaatagttaatggttaattggatgttatgtgaattyatctcactaaaattattaacctttgagtgccaggaactcgagagactgaatgcactgttttggtgcatcgaacagtttaggagctttattgctacataatraatagctcttcatgagacactctatttcaattttttcatagactccacaagtacatgcgtttatttccttaatgaaatggatatgaatgatgaatggttgccagcacattatacacctgttgtccagggttattctacctgttaaagagacaaactgttcagaacactcaacagcttatctctcaggcaacagtactagtccaaagactcggcagtatgggatctagtttcatattttctccttaactagctgtgtgatcttaggcaaaatgctgaagttctctmagcctcacagtctagtctactgacataacaattgtagatccatggtcctttagctttgcagcattacttcccagggaggttgttgtagaatattgaaataattattccaataatcatgcctccctgtatccacacatacatagtcatgtagctgcttctctcatcaagagcattctaattttttggcccttatctctgtgctggctttgtgacttgctttgaccaatagaatatgacagtggtgatgttgtgtgagttccagagcctaggccctaatgagccttatagcttttgctctccatttcttggaacccagtgattaccatactgtgaaggagtctagcctgctagagttcagaggtcacagggagaactgaagcacctcagccaacagccatcaccaacaactgccagacctgtgagcgaggccatcttgggtcttccagtccaacccaccctcctgccggatgcagaggaatgaacaaatccaagcaagaccaggagagaaactgcccagccctcccacagaattgagagaattcataaattgttcctggtttaagtcactaaatattcttgcatctttccctctgttttcactaactattgttgcataacagtagttatagttgtatacaatacaattatacaaccgcatacaagtatatacaactgtacagtattattatacaacaatatttaatgaaaacagagggaaagatgcatgaaaggtagtgataaataggcccccagccagaagctggtttgcacatggctttctattctttgtcatgtccattctgctattgagcccatcagtgaagtttttattttggttatcatatttttcagtgccaaaatttccattkggcactttgttatatcatctgtttcttggctgacactttctattttccattggttttagtggtattcatgattgccggttggaactttttaaataatagctgctttaaaagtctttgtcagattgttctgacctctatgtcayggcagtgttagtttcagctgattatcttttcccataggaattgaggttttcccawttcttcttgattgggttcgggctgcaagttccttccccatagttggtcttctgagggctatgtttcctatgtcagttcatttttcaaagccttggcggtgctatttggatctgtcctctgtgtatgtcacccagtggtcagcctggcacctgggcagagttctcaaagttttggtatgctaattagtaccagatccatgcatgcaccggctgaggatgaccccaggaacttataaaagaaactgtatggagctgctttgccaagctccttcctctctgtgatactttttggttccctgtgaccacttttcagtctcttgccaacaagtttactctgccatgtacttccacgactttgcctgcatattggccaagcagagagagaccaagagagaaaaaaaagcactgggggtcagcccaggcttgggaatgacagctccactgaatggggagaaaggtttccttcccttatagttttggttaatgcaggctgatgttgccaataccacaagattcttggggacgggagtgtggaagaaggaaggaaarggaagggaaatagagggaagagaggagggggagaagagagcaacacagagaattttcacaccctgactattagaaatttacttttctgctgctaaagccagaactacagggtgtctcaggagctctctttgtaccctggtgctcatttctggtgtgttgactttaggccagggtttactgggggaagaaaggagttaactcactgttggttgggtaatatttcaaatcccagtcttatttcctgatatggtttggctgtgtccctacccaaatctcatcttgaattgtagttcccataatccccacatgtcctgggagggacccagtggaggtaatttaatcatgaggtggctaccctcatgctgttcttgggatagtgaatgaattttcatgagctgtgatggttttataagaggcttttccccttttgctcggcacttctccttcctgtcatcatgtgaagaaggatgtgtttgcttccccttctgccatgattacaagtttcctgaggcctccccagccatgtkgaattgtgagtcaattaaacctctttcctttgtaaattacccagtctcaggtaggtctttagtagcagcgtgagaacggactaatgcatttcctaatctgcctgacgttcttaactcttcggagtcctcaagtagttgctctaggcattctgtccaggtgttacagctgtattcaattcagtgcgagagagagagagagagagagagagagagagagagagagagaaagagagaaagagagaaagagagggtgaagtgggccttgtccaacccacctaggactggactctatctaaaagccacctctgtgtgctctgatgggtgagagtaatgggtaaaaggcaaaggtgagaccagaaatggcggggtttagccaaagagtcttatatatcatatgtcttgaggtgcccagcaaacaaccttactttgccagtgggacaagcctgttaacagttacgaagtaaacattcccagtgaagaggatctgctaggatagatgggcaggatgaagacaaaggagaaaaactagttcatttttgagcttatctggcctttaaggttgtaagtaagcaatcttgtcaacctaaggtaggttttttccgattaaaataaaatttagctctgaattgctgatttcttcttcacggtttgagcatgtttcctggaggtattagttttatttagggaatattctctttctgtatagggacttagttttaatctacaatctattttctatgttatctatgatctattttaaattctggttacaattttaaagaccactccctaaactactaatgacactgataacttacattataaaagtctttcacagacttttcacatggatcgtatcacttggccatttcatttttgtatcttttcatctataacaatgaagatattgggctagattatctttaaggtcactcccagctctaacttcctttgattttacaaaataccctttccctgcctgcctgaaatagtttcatctgccaatgaaatgaaataggcatccatctgttaggggttatgaaggtgataattaatcacatggttgataattaattatatccctttccttctttgagttctgaaccaatttagaaatagacacagatgtcatgaagaaatcacaatatcaatgttattgttgctgtttggagaacagggttcagacctattgccaaatgcagtttcctaaatcttctgctccgaaaccgaacttttccactcacttacatgctgaactactggtctcccaaacaagtccagagcctgccccataaggttctcacatgggggactcaagggcacacacttggtttggagtgggcaggccgacccctcccaagcgcatgcactatgcttgctccatcctatttcccaatgtcaccatcaaggtgaatcattcctgctaaggggaaaaaagagggagggtaaatgaccactcttaattccattactgccctctcctgggagtaaatatttcctccattctgaaaatgaatgagaaaactgacccactttagtgtcccgggaatcctctggttctgaacaaaccaggatggttgggacccctcactccaaatccaccaaatccatcgcaaatgcaaaatcttttttagtcctttttttgtttgcttacatcatactgaagagcattctggaataacgcctgggggtctgtggaggatgctcctttttcactaaatccttgtgttcttcctcattgaaattgactatttaaaagggcattgaaattgactgcctaaaagcacaggggtttagaatgatcaataacaatagttattatttattgaggagcttagtatgggcaagcaccatgctaagggctttccacacaccgtttcttttaatcttcatcacaactttatgagataaatactaatattattgcccttttacagatgagagaataagggcccaggaaggttgatagtttacctgattttatacaactagaaataaaaaggccagaataagacccacttagtctaactttggagcctgtacacataatccctgaaaggcattgcccatgggaaggttggctaaaattgctaagggagatttttgttgctccaggcctaaggatgggataaaaacattttggttacttaaacattcccatgaatacatgaggttgccttgcacaatggttacattcatgagttctggagccggagagctgagtggaaactcctgcttgaccacttaccatatacctgccatagacctttgtcctgtttgtcttgagatcttgggcaggttgtctacagtttctgggctttggcttctttgtctataaaagtaggaaaatgataagagtagtagctactttctagagctcttacaagttcaagatgatatagtgtctatgaactctgtattagcaaggattattattattgatggtcacgggtttccacctctgctataactttaaagcttccaaatcttgatttttcattctgcctcctccatgtagttttaatgaaaatcatttcttggccagagcacactgctggctgagaactccatttggaatccttccaggaaactgaccccactagaatccaacccatctccccttcttggagtttctgttaattgccatctggctatttttagtttctttaagtgtgcactgggcacaagcagggaaagtccatcctgctgagggtttggggctgtgtgagctgtggggttttaatttgaaaatgttttgacacttcatttgtcagggcaccagttgctggaaacttgtgagagtgagcaggagctgagagcttattattttttaaaatcagtgttttcacagaggagagaatccccagttgcaacagctgcttagtgcctccaaatgtgagtttggcttaggcagaagggatttagggatttgaaagcttaaaagaaaacataaataacaacaaacatggaaagcaacctgttcagactgtcagctgatattcagatttgcagagcctgagctttggttcttctgatgtgagttttctttggtgtgggcttatcatcagtttggtcaaaggcctttgagtccatttctaatcctgttctgaaatgatccctcactttaacacaccgcacacactaatgaggcctgaccttcatcactgactggaataaaggctatagcctagatctgccgcatagggctgtctgtaagtgcttgcttccctccatttctactgaccctctacttcttgaccagcatagatgttaaccctgtggtggcagaatccttgttcagagcctgtgggtaggagtagaaagaaaaggaaattacttatgattcctgctaggggcttcacatatcctatctaatttcatctttgtgtgttagtcaaggttcttagttgccagcatcagaaactaattctattaatttaaggtggggtgagaggatttctttaaatgttacaggaacatcagaaaatgagtcttagaagctaagtatctggaataattttcaaaatcgtgttgcagaattgatctcaggaagacagcaatgcagccagacatagacactgcaacgtgcacagctttcactaaataccaatcttgagtgttgtcctaagaactttccctctgatgctctagggtctggaggttactgtgacctcaccatagtggactccatgtagtccctacatcttcaccgtctgagctcccatgcaaagcacgtcttcctggcagagcctgggtcatgcttgtgctttagctgacaccttcgcttccctagcaagaggctggtgctgccttagaatgtggggcattccccaaacataggaagggagttctgatgctgagaggcaccaaagaatggcaaatgcccactgcgctgtacaacaaacaaatgcaatacatattgttaggctaatagtatagacaaagagattggagctacagaaagttaactaacttgctttagcataaacaactgctatgtggcagagctacatacaaactcagttctgtctgtatgcaaagcctgtactgcagggtgattttaggggtgacagaaagtcatttgttttgtgttctaggttgataaactgacatttcgctatgtgatttttggaatgtgaggggagcaggctgtgatggtaaaaaacagtatctgcttacwtatatatatatatatataatttttttctatagcttgggattttaagtctgattcagttttccagggctaccataacaaattaccacaaagtcagtagctaagcgcaactgaaatttgttctctcattgttctggaggctagaagtctgaaatcaagatgtctgcagggccatgctccctcttaaggctttaggagaggatccttccttacctcttcctggcttctgctggttgctggcagtctttggtgctccttggcttatagatgcatcattccaagtgctgcctctgtggttacatggcattctcccagtacgtgtttctgtgtaaatttctctcctctcatagtgacaccagccatatgggatttagggcccaccctaattcattacaaccttatcttaacttgattacatctgtaaagaccctatttccacataaggtcacattcacaggttctggatagacatgaattttggggaggtagacactattcagtgcagtatagagactagtttcattaagttagatatcacaataactcatttctgagactaattctctgtaataaaggtaaagagaaagtgatagaaaatgagtctaggtttaactgatctctttggtcccttaagcccaaaggggaccctctgaacagatcttctgcctgtgagtgaagcaggagtatatctgtgccagcatcctgagcttgagtagatttgcttcctgaaaggttactagagaaagatgccagagtcagcaaaaggaaatgctttcatttggtatgaaagcaaagtgcagctctccaggagagccaagaagactgtgaataagcattggtcacagactgatttttagggtaattgtgaaaaaggaagctgagggctttagggtacaatgcaataggtggctttctaaccaagatatgtgcactcaaagcacatctctggtcctttcaagatggcgacatgtgaccttgatctttttgaggttaattttaaattgcggtaaaaacacttaaccacatggtggctggaaaaatttagtaagcaacttcttggagagtctcagcacagctctggaatgctgccacacaactggggaatcagaatcagaaatcatgaaatcatcggaccctcaaagatacagcttatccaggcttgtgagtcagggctatgctgctgtaacaatcaactcctaaatgtcagcagcttaatccaacagagctttatttctctaatctgtatcattctcactccaggacccaggctgatggaacagcctccatgaaaagcgctactagttcctgttgtagaggaaaggaggacctagcaaatcacacagctagttcttaaatcttccacctgaaaatggccagtgttacttataactacattacgttggccaaagcaagtcatatggtcactcctaatttcaacaaagcagggaaatgcaaatctacatctrcccataagaagaaacagaaatatttggtaaatggcactatatattacctttgcaaactcattaaggtagggacaggttgataaggtgatattctcagtgcaccagctgtgcgtgggagggggttagaaaaaagagggacttgatggattaatacttcacttataggatttcattgaaattaacttctgcctggtggattgcctagccactgaacacaaagcattttagaaagttcctagagttgaatttccaacactttcactcttcctctaagacagtgccatgaagtgccaatttggggcaactactgactttctaaaggcttatatagaaggctctgtatgacatagtaatatctaatatagatgactttgttttaatgtctgcttgcaggctaagaatgtaagaaaataaagaggataaaatcattaaaaagcagttcagttggatgaagcaaccaactaataagctctttaaaatattgtattttcatcccttggtatccatgggaggttggttctaggatacacacataccccccaaattaaaatttgtgggtgctcaagtttcttgtataaaatggcatgatatttgcatacaatctatgcacatcctcctgtatgctttaaatcatctctagattaatatctaatacagtgtaaatgctatatgaataatttttactgtatttttatttgtattattttaattgttgtatggttatttttatggggtgttttgtttttaatatttttgatgtattggttgaatccttggatgcagaactcacagatgctgagggctgagtgtgctagaccctggtctttttttggcactgaaccagaaaaattctgatgaatttacagcttctgcctaaatcctcttttcacttaatttcctgagtctgtagtattggcatgtccactttaacttcagagtggtggcttagctttggaattgagaagttccagaaacccagaaaaagacagaatcacagggaaacgtcaataaacgtgttgattttcctgtaactaccgccaatttcttagcctagattccctaaattgcagagcacgaggcaaagacttctgggctggcactttatcagggagtattaatctcaggaaaacaggagtaggagaaaggagagtgaggcagagaaggagggagagcaagtggaaggcagtacattactgagcaggccacagctttatgaaaaactgattgcttggtgtcataggacatcttcaaaggggcaacatgaagctacttcatcctcaaatagttcttccaaggggagaaagggaaaatgatttattcattagctgccatctcccattggtcaaagtattccctcactgggtattaactcccttacacttcaagggtacacatgcatgagcatcaagtaggtgctgcagtgctttctctgccttgacagaaacaagggaattccactataggaagcacatggcacaaacaaattgtgcactgttttttgtgctaatgaacgatatgaggacctagaagaaaccattgcaacaagttcctcaggcagtagtgaatatagcagcaacagcagcagcagcagcagcatcagcaataaaacccagctccaggattcaaagatcagtgcaagcaatttctaggacccctctgctacatagcaaggcaagcgttctcttctggcatgaggcaaaaccagaaggcattataaccagccactcaaaccaggaacctaggagtcaatctatacttttagtctcctttcaaatctaaatcccttagattcaatggtctcagcatttctgcaacctttccacttctcctgtcccacagcaagtccctagttctcattcttattgtgtctttcctggagtattgcaaaagttttgcaactacttttcctgcttgtaccagttaagatatctttgactcgaaataggaaaaatcctgactcaaattggctaaaacagtcaaaggtaatgcgacttcatggtgttttaatccatgaagtcacattacctttgactgttttaaccaattactttgagctttgagcatcacatccgaatttaaccacattcaggaaataggaggcatcttttctgtctctttaagagggaggaaatctttcccaagaagtctttctcagtagactcataaagaaagtcatatcacatccccaagcctaaacccatcactggcaagaggaatagaaccacttatgattgccctaaaccaatcaagatcccctccctggatctgcagatggttaaccacatacaggagggtaaataataaaactgaagttctgattggaaggaggaagggagaggggactgatgctggttaggaattactaggttctgttacctttgatgttgtggccctccaatccatgccattagtatgatgttgctgaaatgcaactatgacataatcctatgaaataatacttctatttaaaacttcctgatgattcttctttgctgaagaatcaagccaagtcttgcacaaaagactatttatgatcaagcatctgccagtttctccagattttgctcttgccatgttcatgtcttaaccatgccccacttctacctctaatactcacatcatgctcctgatgcaatttactgccttccttatgcaactggctctatcattcttagatgcctttgtccacacttcctggagctcctgcatttcccatcatttaaatggcacaatattgactcacttttcaatttccagtacccaggtcacctcaatgaaatctttccagaccctgcggtaaagtagcctctttgtccttctgctcacactgtgcccttatataattctgttattgccactgtagcacatgattgtacttctttattaatgcctattcctcctcccagacagtcctgctctattcatctttgcattctcagcacctggcagtgcttggcacattggtcaatgaatgaaggagtgtttaaggatctagagctgagtgatcatgcccaggtctaaagcagggttaattgtgaggagataagctaagcatgatcacatgttttgaatattccctaattagagaggaaaatagttacagaactggtagaagggtggttaaaaggttggtaataagtttttctgtcctctgccagaagaccaagcaaaatgtgctcataagcattaattctgcattatttaaatacaggcaaccctctgggtgcaagcaagtttcactgcacagcagatgtagagttctgtcttaggaggagctatcactgcagaattttcctgccataatgaaagtgctaagtatctgaacaagatttaagtccaagctgcaaaggccataagaggatgtcttctgtagtccttgagatgctttggacattttcttctctgataaaagctggagtaggagatgcgatgcactgcaaaagtctgtgcagcctcctctttctgttactgcccagaagttgctcagttaacctgtcagtccatagttcggatattggaagatctggatactggatgcagtctatgggggttggcaacctgtggcagccaacagtgatgatgaagcacatgatactgggcacgagcctgagccacatgtggttttgggctgtctagtgagctgactaaagatggaataaaatgagggcaggaaggagtgatggctgtggaagtaggacacagaacgtaggaatataaggcatacaacaataacaggtatagcaattcagagcagccactgatgtgctcaaaaaataaagaagaattagtaaatgataactgatgtcacttgaggaaccaattgtgggataatcaaaaccttcatatttgaagacaattataaaaagctggagtgaaaaataagactaaatgtggccagtattactctagtctgaatagaacaaataataatttagaattgaagttgagacaacgatagactggattaagaaaatgtggcacctatacaccatggaatactatgcagccataaaaaatgatgggttcatgtcctttgtagggacatggatgaaactggaaatcatcattctcagcaaactatcgcaaggacaaaaaaccaaacactgcatgttctcactcataggtgggaattgaacaacgagaacacatggacacaggaagggggacatcacactctggggactgttgtggggtggggggaggggggagggatagcattaggagatatacctaatgctaaatgacgagttaatgggtgcagtacaccaacatggcacatgtatatacatgtaacaaacctgcgcattgtgcacatgtaccctaaaacttaaagtataataataataaaataaaataaaaaaagaattgaagttgagagagtggctaatagtttaggactcaacttagataatttaaaaaatctcatctctgattctcagcctccttatctacaaaatggagaaaataataattgttatcacaagtttaaaaggtaatgcctacacagtactaaacaggcatagcatataataagtatacaagaagtggtagatacaataggtcctccatattcgtgtgctctgtttctgtgggttctacgtcatggatacagccaactgtggaacaaaaatacttggaaaaaagatgggtggttgtgtctgtactgaacatgtatggacacttttttcttgtcattattccctaaacaatatagtacaacaactatttacatagcacttacattgcactaggtatccctttataagtaatctagagactcaaggtattcaggaggatgtgcatatgtcatatgcaaataccacactattttatataagggacttgagcatccaaggatttgggtatccaaggggattcctggaacaaattccccatgtataccaacagatgactgtatttatttttgctcttttattcaagggtaattttgtttcatgctttcataaggatctatatattccttgttaattttaacctactaaatccaaatgaatagttttgaatctacttggagctatgtaagccctgtccaagtactttgcaggatttctttgcccaggaagccacaagaacatgtaattaaaataatccggaaagcaaaacgataactctttctctctaatatttttaaaacttttcttaccaataaattcccaggacatttggccacgattacatggaccagttgttgacttttcccagttagtcctgccagggatttcatactattttcgggtgccactatgtataagccaaaaaagagycatatctaccatcactgcctgtgtatccaacagggagctgaggatgaattccctctctagaaggtaattgtccacaagacgtaactggatggtaatatagggagaatatggcaaggtcaaaagaaagtcatcctttgaaagattcttaatttaactaggttggagaggacttatgctggtataaggtggcttctcagcaaggtaacagatttttaccatattttctggatcatgaatctgtcctctatttgtggtagtgagggatattttcatacctcagtttgttcaataaagatttagtgagtgtctctactgtgcacaagatcctgtactacattcagattcaatagtgagaaacagatggggtctctcctttaatgaagattactatccaggagagagagcagatattaatcaaataatcactcattacatgaaaaattataattctggtgaatttatgaagaaagagtatgaagagatgctgataagaaagtatacaacaggaggacctagcatggtaggacagcaaagaccaggggagatgtttgtgacttagccaagacaacatctccccacctccttgcacctacatgcrtggccaatggaatgtaagaggaagtgatttgggaggccgaggcgggcggatcacgaggtcaggagatcgagaccatcccggctaaaacggtgaaaccccgtctctactaaaaatacaaaaaattagccgggcgtagtggcgggcgcctgtagtcccagctacttgggagrctgaggcaggagaatggcgtgaacccgggaggcggagcttgcagtgagccgagatcccgccactgcactccagcctgggcgacagagcgagactccgtctcaaaaaaaaaaaaaaaaaaaaaaaagaggaagtgatgagtgtcacttctgggccaaggtggttaatggtccagcatactttccctacactgatgattaaaagatggaggtgtttgtgacattaaggatgagttggtttaacagccagggtccctgcaggagagagacagcacacatgacagggtgtattagggtcctctgagagggagagagctaattggaaatatatccatatctatatctatataatctacctatgtatctatgcatctatctatctatgtatctatctatctaaaagggagtttattaagtattaacttacatgatcacaaggtcccacaacaggctctctgcaagctgaggggcaaggagagccagtctgagtcccaaaactgaagaacttggagtctgatrtccaagggcaggaagcatccagcacaggagaaagacgtaggctggggggctaggccagtctctccttttcaagtttttctggctactttatatttgctggaagctgattagattgtgcctaccagatkaggggtgaatccaccttcaccagaccactgactcaaatgttaatatcttttggcaacacccacacaaacacacccaggatgaatactttgtattcttcaagcaagttcacactcagtattaaccatcacacagggtgttttatgagagttaaaaataacatgactatttacaaagatgtaggcagagttaggagaataaagaaggggtagtgaagcactctgttaccagcaagawtgtggacctgttattctatctggacctaaaggtatttactggaaatgtgacataatatcagagctgtaagacatgggagtccaacaggaactgtgacttcagtaaagtcacaatccatggagacacagaagaaagggagccaaaagaataaataatctgacctcactgtcctcaccccctctgatctcctattgtcatttctcttgacgtatcccaactagaatccagtggcaaggaagcccattgtaacagtctrtatagatcaggctcctgccaaagaccaggatgagaagagtggaggatagatctggagaagcaaatagaaaatatccagcacaatagtcactgagtaggtgaaagaaaatgaccgcagactgaaagcagatggtgcgtaatggagagcatagcaagcaaaaggaacagtatgtactaaggcctgtggcaggaatgagcctaaagtcttctaagaaggcctgtgttcaggcaggaagacctggcagaaggctacctcagctcgtcagaagggtgatcgtgttccartgatagtcaaggaagaagagtagagatcatgaagatcaagagtgaaaagtgtcagatgcatggggtgayttggaggccaagaaataagaaagaggcccgaatgcagaagacatggaaggttgagtgaaacatcataggctgtgaatcttgaataaggcaagggcatcctgagctcaacctctttgggtgctgccttgtgatgcaagagcattcccggagtccaaatgttagacaaaagtcataggccttttccaaagatatttcaaagtgatgttggaattaaaagactgctatcttgggccatcccattcagccatttaggcaacaagtatttattaatggtttttatatttcctactgtgctcactaggttctgagaggtgatgtgattcctgtctttggtaagctcacaggctaagcaggaaagacaaccatgtaaagaactacttgtcatatcctgtgataagtgctgttagagagtgacatgcaaaggtsccagagggcccagcctaccctgactggggaatcaggcatccctgagatatgagatttgagctaggtcttgaagggtgtttcccaggtagaaaaatgagaggagggaatgttatctaggggaaatgtattgatcaatggatgccaactactactaaaatgatccccaaatctcagctgtttatcataataaaatttatttcttgctcatgacatgtccagtgtgttctgagtggctcttcccaaagtggtgatccagagattcaggctgttttcatcttcagtgcagggaatgtatgctggaactttaaccaccttggtccagaagtgacactcatcattttgcctcacattccactggccacgcatgtagatgcaaaggggtggagagatgtagtcttgggtaggcagctgcttcctggcagctgcattctgagagagcgtgaacatttggtatggggtaatggctcccactgccacagagaattgctcatgagggagcacagaatgaagtaaagggacaygattcctggcccagggtgtgtgtggaagaagggagagaagtacaaaagaagaggccagaaaggtcagtcattactggatggctcaggactaaggacaacgtaccagagagaccttctccttcttctcctccagatgtgtggaactattagaagtgtgacatggccagatatgcatctcttcacagtccactcatttcttttttttttttttctgcacaaaaagagagcaagagtggtgcaaagagctaaacactggattttcatcccaattctgccaatgctacctacttgggctggctacttagtatctctgagcctcagcttatcaataaaatgggcacaaaactatatgtactctgtattcccgagaggcatgaggatctgatagataatgtcaggcaaacatcctttggaaactgtaaactgctctacatatacaaggatatttagttactctattttgcctctgactgaggggagatattttttcccagagcatgaaagtataacttaatgtctgccaagttcctgaaatatatccacttctgtgatgatctaccaatggtagaataagaaatgagctcaatattatctctataagaacaaataaatacaattagatgcagctccaatgcttcctaaggtgctatgtaagaaagcataatggaataatgttaatgacttttcttcttccacagtcttggaaaccacaggtggaaagggctgaggtggtgtatttccattagagcctaaatatttgctttgactattagttttttttttttcacacagaatttatccttggtcctccaaggctttgttttccaaagttgcatggcttatgtagagaaggggaaatgtccctctacctcctcactgtctcttcccattgcatgactgaaaatttacttgtcaagattttttaatatccacataagtgggcagcagatggacttatctggacagtgctagcaaaggattggattctttttcaaggcctaactctgttttgaaatagccaaatgattaaagttactttggcttgcatttttagaaaattttctcaacttatgatttgtcactacttctctagatatggcctgggtctgttgaagtatctttttaccaaatggaccaattttccaaaagcctaaccacataaggctccctcccatctctgtctctttttctttctccctgtttcctttcccccatctctctgctaatggtaagatgttcctttagtttttagtctgcagcatcacgagaactggaaaacactgctctaagatgtgcttcgtgccattttaataaattagataaagaacttcatttacacattccagggcacctgttcccagagcatccaggtgcaatttccattgtctcttaactttgcatccataccttgggctgaacttgaaatctagggtgttgtacttttaattgaagaaagttctagaaagtttcttctgaatgtagtacatttttcttttctttgggaccatggattgcattctccaacttaacagcctccrtttcttaaatggcagttgtgagcgttcttgtaacagaccatggccacatgaagatgatgtatttcctggggaggatgaggaaaagagaatactaaaatttctaaaagtrtagacagcctgatagccaattttggagtstggatgacattttaaattggtaatgctcctaattacccaaaccctaggaaactgtatggaatacagccacagctctagattaatataagtgagcactgtgaacccattactaacagcatgttatcttagaataatggcacagtatctgtgtcatcacagtgtgatattgcagttaaaatgcgmacacacacacacacacacacacaccccttaatatttcttgttttttggcaaatttttcctgctataatttttttaacttttctaaattttccaacagaacatattactttgtttccttgtcaaccattgtctaattggtattgccgtgttgaaatgtcagttttatagaagatgaatgtcagcaagcaatgtattataatacaaaacatgagcatgaaggcagacatgttcagagtcaactcttagcctccctatttattgccagctgaacttgaggtgattgttcgatgtctccgattttcagggtttattttttttcctattacatcggcataataatgttgtctattcatattgttattgtgaggaggtaaagccaaggaaaatgtcttgttcaaagctagtgccaaaagatgctgagactaaaaggcatcaatgcgacagaaatacagtaacttgaaatttcaatgatcaggctgagattcaggccttagctccagcagtgcttgcggaggggggttgaccacataccatccaccccttgcatgcagggttaagtgttggcctttttatgccagtaaatggtggttttcttgatctaagatccaggtctgaacacagagagtggaagacaaatttcgtcacttcactaccttcatctgctcctaccctccatagaaacctccccagctttatggagagggcctggtataaaagcgcacccttcatttttgaatttttcaagactatcttcagtgatttctaaacctaggtatatcattccaaaagttatttgccacagttttcatttgttcatgctgatagaattggtggagcaagcccatttgtgacactacttctcttggccctaagcatcctcaaagcaatccatgttacaaagaaactataataatagcaataatttgtgaaacaccaattatgtgccaagtgctttgcatactttcatattatttaatctctatatccaattctaagagtgtttgttattaaccccatttaacatgtgagaaaaacaagtctcacaaagattcataaccttgccaaggtaacgccactagaaacatcaaagctagtgttattataataagtctgacctcaacacccaaagctggctttgtgccagtaagccaagcccttgtttgtgttttcacactttttttttttttttttgtcttctttccttttaggtggttctagatgttggttgtggatcaggaatcctgtcattttttgctgtacaggctggagctaggacagtttatgcagttgaagccagttcagtacagtagcacagtatgctgaggtaagtggttgtattttttttttttttttttttttttgagacggagtctggctctgtcacccaggctggagtgcagtggcgtgatctaggctcactgcaagttccacctcctgggttcatgccattctcctgcctcagcctcccgagtagctgggactacaggggcccatcaccacgcccggctaattttttgtatttttttttttttttttagtagagacagcgtttcactgtgttagccaggatggtcgcgatctcctgacctcgtgatccacccgcctcagcctcccagagtgctgggattacaggcgtgagccacggtgcctggccagtggttgtatttttaaggcaattaccaagtgggtctttagtatacctcagggtacccagtgatggagtcttccaggtaggtcatttagaataatttattttatttaaccagtgatatggtttggctatgtctccaccccaatctcatcttgaattgtagttccctttattgccatgtgttgtaggagggacccggtgggagataactgaatcatgggagcagttttctccatactgtttcatggtagtgaataagtctcacaagagctgatgattttataacgggaaaccccttttgcttggctctcgttctctcttgtctgccaccatgtaagacatgccttttgccttccaccatgattgtgaggcctccccagctacatggaactgtgagtccattaaacctctttatctttataaattatgcagtcttaggtatgtctttatcagcagtgtgaaaatggactaataaaaccagtttctaatttttgctgtattggaatgttactgccaatcaagcctgatttccctgtagtgattgatatgaaaaaattaatttttttaattgtcaggatactgaaattgtagcaaaaccttctcccttcccatccactgggtggcagatggtgctggggcagaggaagggagacatgaatgttttctttaattatctgggtgaggagtaatgtttcactgcagctagatttatttttttctttttaagtgctgtaatgacaatagctacaccattcactttaaattttgcttttggtttaaggggctgttgctacatggttgtagtaagaggaagagacaggtgtctgtgtttcgaggagctttttaagatttcaggttctgactggaggagagggagaagatttgttttaaatgtagtgctctattatcattctgaaatgtgtacaaatattataaaataaatcaaagtcaagagtcaggtaataatggctttcagtaatatttggatgtaataataacccaatcaaactgcagaaattggttatgtgtgcacccgtgtgaacagggtaatgtgcttgtcattcatacctggaggaggcctgaattttaatgagggataggatgacagatagagagaaaagcttggctgctgcttcagatgagcatcatgaaaccctcctccaggcccggacaactggtacctctgagtgatggttggttttgacgtaagtgagcaaacaggaaccaagagacaagtagacaactctggcatgtttggagggaaagattgtcagagcctaatggatgggtaggttgttgtattctcttttctgcttccagcaagtcctgaagaaaatattttcagttatttgtttctttactagttcttaaatgtcatttttattaaatattgactacacggcaaacaatatttgtaaatatatatagtgtaaagaatagcaatacaatgaatgtgtgcctacttcctgttttaagaaatagaccattagcattttctttaaaggcccatgtaccttgtcctgatcgcattacttttttgccctgaacagaggtagtcactactgtgaatttttgtttattgttctcttattctttatacttttaccacatatatttctattcctaaaaacatatcacttatgaactttccatgaatgggctcataatgtatgcattctcctgcaatttgcttttttttcacccaacatcgtgttcctgagggccatatttgttgatgcatacggctgttgtttacacattttcagtgctgtagagtgtctcgtgatatgatatgcctcaagttgttagtcctgttggcagactttggatggcttccattataaaagtattattatgaatatttttgaacacagtctccactgcgtctttgctgaagtttctcaggcatacacaggagtggaattgttggatcctagggtgtgcataccttcgactttgctatataatgccaaattgttttccaaagtggctgtgccaatttttattccctcccgcagtatatgggtgccatcgttccatgtctttgttagcactttgatattgtcagactttgaaatttttgccaatctagtggttatgacaggatctttgtggttttgttttttccacttgcttatgactttgaacatatttgcaagtattttggccatttgtgctttctcttcagtaaaatgcctattcaggyttttgacaatttttcttttgaattgtttgtctaattctaatttatttgtaggaacgaattctattttctagatattaatcctatgtcagttatgtatgtagcaaatatcttctcccagtttgtaccttacattttcactgtcctaatggccctagtaagctttagatagagaggtctaaaaaagaatagagaagaggaggataaaaatatgtagagagaacttcatagataacaacgcctctgcttagatattagtagattttaaaatgaatttttaaggtgaggggttgtttaggactttgttttaggtgctgcttattcatttattcatatctttacccaattgcactctacatttctgttgttgggcaatacaggagaaacagtaataatcaaggtctcttcctatattcaaagagatttgatttttaataaggtattgatcctgttgtatcttatacaagagaccaaaaaataaaataaaagagtggcgtaaataatttgggagttttctttccttcatatagtttgtttttcatatattttaaagtggttggagatactttagttacttttaaaaccttaaacatctaatatccttggatatrgtactttaaggaaaaagaggaaggaattagctagagatattctcacctttctgagccataatcctgtctccagccatagcaggtgcaagtacactgtgactgtgcctgtgaatagccactgtactccagcgtcagcagcatagcaaatccctatctctaataagcaaataaataaataaaaatagctcaaagactactcaaattccctttacctagattcacctattgtttacatttcaccccgtttgctttatcttttgttctagtttgtcttcccaccacatgcaaacatacattaatattaatgtgtatacagatatgtatatgatcacacacrtttatgaacatatacacacatttatatgaacatgaatgtatatatgaaaaatacacacatgtatatgaacacatgagcacacgtgtatgtatatgaacacacatgtaagtatatgaacatatatacatgtatgtatatgaaaacatacatatatgtccagagatatagagacacacgctttttctatgggtcagttatatatatcatagccatagccctttatcattaagcatttcagtgtgtatttcctaaaaacgaggcttttctcttatataaccaaaagagaayttgatttaaagctgaaaaagaagctatatgatgacttgctcattgagtctttcagttttggtggtaaaaggtgtttggggtggtcccagcatgagcagggagactgtcaccatggtgctgaggtgaaaggagtctatacttaactgcctcttcccttcccttacctagtatttctaggaaggcttgattttttgggtaggggcagtggggggacggagtcttgctctttcacccaggttggagtgcagtggygcgatcttggctcactgcaaactctgcctcccaggttcaagcgattctcctgcctcagtctcctggaggcttgatttttaaaacattaaaaccaaagttctaatgaawtccaaagcatcatagtttatctttggttttagcktctgtagaggatgtgtgtgttacagtaatctttcttttctatgtacaactggggcaggttggggacaggggtggctttccaaatgctgtcagggactgcygggagcccttgaaatcctcgctcgcaagtctgttttgctcccgaggcttcccctgcatgtggtcctgagaacaggctggttaaaaatgtattcggcaccaaggatgattagaatcttctcaaagtgtggatttaacaacagactggtccctcctgaaatccatggcctctactctgcccatcactcctgcgtgggtgtcatgagatgctccccagggaccaagaccctttcaccttgtggaggacgatctgtaccagctcgtggtttttgcttctcacaccaacactcatctgtacagtttgtgggtggcaaaatgcgactgtgaacagcacggaaaagaatttyactctaagaataggctgatctagcagcacagcacacagtgcatggtgctcctttcgaccttttcattatttggtaattgaaccagcagacatttaattcttttctctggagtcttcattaaatttctcggaaaagataaaattgcaacaagaaagaaaaatgtacaaatttaactaccatctcctgtccctggattcttcttcacacaccagccttctaggctttaagtaaataaaatattttcaaattgcattgaattcaacttcagtttcacttagtagaacagcctgattttgtaagggttggtccttggtaggcaggctgatgccaacgacttcttatctatacggtatgcatgtacatgtttttgcaggagtggtcacaaggttggcaaggtgtggctacgtgctctcactgtgggtcccatgtgacatttctgggtcagtaaaamgatrycattcctgtttaaggaacagggcaggactaaaggtctcccgtgggtctccaagctgtgaaacttcccacctcaagctggaagctatctcttgctccttttttccttttcttatatacaaaacataaagcaaagtccccgagattatagagaccaaatggaaaagaagtaagcattcatcaaatctatacaagtataaaatcgagaaaagggaattccttaatttaaatttatacacagatagatgttacatctctctacctaaatgagaaactcctttaagggccaccaggataatagaaattaaagtgagtgattattactagatttttgcgctgcaatcaacttaaacttacaacaaagttctctgggactcagatttaacaatgttcagaatcattattgggccactttataattagacatcactagtacacagatcctagatatgcctcattagaatgatttttaagggtcagaccaagtgtttccagatcatggggtggtggaagtaaaggcatatggaaatggagctgttgtgacattccctctgtaaagcagctcatcatcttaagctgctctgtgcaatatggtaaccatcacacacgtgtggctatttaaatataaattaattaacaataaaatttaaattcctagctgggtgtagttgctcacgcctataatctcagcactctgggaggctaaggcgggtggatcactttaggtcaggcatttgagaccatcctggccaacatggcaaaaccttttctctactataaatacaaaaaatcaggcggattgcctgaggtcaggaggtcgagaccaatctggccaacgtggtaaaaccctgtctgcactaaaaatacaaaaaattagctggatgtggtggcatgtgcctgcaatcccagctacttgggaggctgaggcaggggaattgcttgaattagggaggtggaggttacagtgacccgagatcatgccactgtactccagcctgggtgcagagtgagactccacctcaaaaaaaaaaaaaaaatagccatgtatggtggcaagcacttgtagtcccagctactcgggagactgaggcatgagaatcacttgaacccaggaagtaggggttgcagtgagccgagatcacaccactgccctccagtctgggcaacaaagtgagactaaaataaaataaaaatgaaagtaaaaaattaaattccttagtcaccatagcatttctagtgctcagtagccacaagtagctattggttattgcattggacaggaaagatgtagaatacgtttccattggcacagaaagttctactgggcagcagtgatggagaccaggagtagccaaacttcacctttctggcatgtgatggccaggatgatggctgtgttcactgcgaggaattggtagctgtggccagattggtctggcttgactttaggtgaggcaggcatccaacaatccttgttgctgtggacactgtttgtcttctcatttatacgtaagatctgtcacagagcagcttctctaggaaacagactcaacgtggaggtttgtaagcaggaagcatattgggaagagctctcaggagcctcacttctggggaagtgaaggaagcaggatagattggcygaggggggagttaagctgcaatatagtcatactaaagtactcagccaatcgcacagggagttcttgagctggggtggcccttcagagttgaaccaccttgaggtgggggactttatgttccacatttttttaatgcacacacactgaggaagaagtgtgaccttgggtaaggtggctctcctgggcagcacttagaacatgactcaccgagagccatcatctgccaatgttcccagcagttggggaaatgggtgccttggtccagaagcaaggatttgtctggtatgccacagcatgtgcttcaagatccaggattctgactttgggctaccaaaaggaagctgatagaggataaagaaaaartgacagtaaatcaaaggaaaagagttagaatgagggagccagcaggatgataccaaaagcttaggaaaagccacaaggcgacaggttgtgagtcctttagttgtaagcaaaagctttctagaaattgaatacatcacctgatccaatgtagtctgtattattctaagccctgggaggacatagagcacacagcttaaaatccagttggttttcaaacaaataaaattcctgacacacagtgaatgccaagtgcccatgaatggcagagatgaaacatggcatgtctacacaatgaaccattcccgtgagctggggtggttagggaatccttcagaaaagatatgtgacttcaattagatcctgaaagatgagaagaaattaaatgttcctcttttcatttttcacatcttactgccagcaatgagatttttgaaaatgcttaggttcccatggggttccccatcttaaatgtgttgataatgtcttcataaatgctttgaaggccaattattggaaaggtacttctcattttcaatcttgaacactagaaaaagcatatactttgaagtttttctgtatgaatttatcctgatttcaactctttgagctagggtttttctccaatttcttaagtgtctccarttgctaacttctccttcctcctcactctcccacagacaccaaatgcctgagtcacaagattccatccagcctgtcaacactttttatttttgcactgacaatgaagttaaaaggtggcaataaggaatctgttaaggaaacaataataagcatttggcagagctgaagtttttgagttttgaaagcatttccacatctataaactcatagatcttcaggaagagtctgtgtggtgcttggagcaaacaataccatccccacattacrgttaagaaagaacctcagagaagatagccatgaaggtgggacrtgacttgtgaaaacaattccttgctgcttccttctagaatgttcaggtaagcaggaactggtgattcccttgaaagtgaagaagtgaatgtgtttgactagcacctacccctgtagattgttcattcaggaagcaagagaaaaaccatctttcacttagcaagcaacctattgtgaagcacttaaacatggagacagttctactacccaaagaggaatcctgctccatttgcaaattcagctagtaacacatttagaggaggagttaaagtaatccatgtggaatgtccccgtttgccacaaagcctcatccaagaaataaagagccttctcatagctagattggggattgatgaggaaagaagacgacatgggagagaatatccatgtgtcctcatctcacttgacattcacatccctgtagggtagatcctaaatacctttgcaaggattcaaattgagggtgggttctggaatcagacagtgtgaggttatatccctgcccctatgacctaatggctgtgtgaccttgacaaatgtattatgtttcctattgctgctgtaaaaaattaatgcaaacagtagcttaaaaaaatacagttgtattactttacaactctggaggtcagaagtcagaaatgggtctcatgtggckaaaatgaagatgttgcagaaatctgttctttctggacgctgtaggggagaatcagcttcttgccttttccagcctttagaggttgcccacattacttggattgtggctacatcactctgacttttgcttccattatcatatctccttctctgattmtgaccctcctgcctccctcttacaaggactcttgtgactgttttggacccttctagataatctaaggtaatctccccatttcaccatttttagtaacatctgcaaagtccctttgataggtaatataacaattcacagttttcaggcatcaggatgtgggcatctttgggaaaccattattttgcctactacacaagttacttgacctttcccaaccttgttttttttaacctataaaactgtagataacaatagtccctcataaagatattataaggwttgaataagaaaacccatataaaattagcacagtgcctgccattctctagctagtgctattattgtcatcacagttatcatcgacattattatggggcctcatttcatccatatctctgtataaattaaccaaacaaacatcatggaagggggatcactaggcaacagtggggaggacagggccaggcagggcacatttttttcaagagcatgttgtttcaattgcatgttgaaatgtcctttgtcactgctttttaaaacccagacattacagatgctgaggatgtacttgtttcccaactcttcttataggatctaaagacttggcagggcagtgtcttgagcagctctctggtatccgattctcaggagaaattcacagttgttcctaagttctttctccacttgcttcttcccttgctcaccccagtctactcacttctctttggttggtctcagtattggcaactgttcagaaggaacacagctctttagcatcagggagcaatacaatggctctcaaagaggtgcactacaatcccctgaggggcttttaaaacacagattgctggggcccatccctagagtgtctgactcattaagtatggggagtcacttgaaaatttgcaggtctgataatgatccttctgggatcacactttgagaaccactaggattatataacattgaaactgaaacaacccctaaaagtgatttaccacagtgctattgaaagatgcaccaagaagtcccttctgggactaagttagagaggtaagggagcttgaacttcaacagcaagcctacctccccaaaaacctctatcatgagaacaacaccccttctatctgttttacttattgggcttctggattaacttttgcttgcagaaggagatcaagaaaaactttagaagctgagacccgatttcctcaattaacagagggagcctagagaagttaagtggtttgtccaaacccacagttgsttttcctttttctatagtatcagtgcccccaatattcactaytgaaacttaatctccattgtgatggtattaagaggtggggaagaccttttaggcagtgatcaagtcatgaggggtctgcctttatgaatgtatttgcaccctagaaaagggctggggataactagtttagggtgttcccttttgccctttcatttctttgatgcatgaggacgctgttcatccccttttgcccctatccatcccttccaccatacgaggacacctagacagagctatctttgtaaaatgggccttcaccagacaccaaacctgcagcacctggatcttggactccccagactccagaactgggagcaataagtttctttatactcagtttcaggtattttgtataagcagcacaaacagactaagacacctctgccaagggaagttgttcttgtttccaacattgacatacctgtcatttcagtatttaaaccacaattcaagaaacttccttagctcactttgtagcttctgaaatctacttttcttaagccaaagtctttctcttagccacctaccttcttcttttagttctctccttacccatctgctcctagaagccactattgtgcattgctgtcatggggccctatttaaggacccatttcattctaggcattagaggagagaagcagcgtgtttagagaaaatacttgttgatckaaagcatttttctactgcagcagccacacattctagggggattgtgattaggccacatgttttcttggcaagaaaagaaggaacgttgggacggactataatttaagtacactaaataattgatatggcttcaatgactggaggaatactaaggtccttggtctcacaccaatttagataaaacaacacaacacggatacacatggagtggtttcaaggagcagagagtttattaggcaagaagaaggaaggaagaagaaaacagctcccctgtacagagacagagagaggggagactcgagtaaagagaaacctcatgtgcggtggaaaagtgattgcttatactgggatgctgtaggaggcggtgtctggtttgcacagggcccagggtattggttttgatgaggtgtgtcatttatgtagcctgtgaaaaacctggccctcctaccttacccttttaatgtgcaaatatgagtcgccatgatgttctgaacacacggtgttatttggaggtggccatgactccttggcacacctggtgacaagaaggaggcaggaatcgccatattgggtggaccatttctaatggccatgatttgcatatcaaatcttgccagcctggcccttcaagccattttctgttagaaaataaatggtttggggattgcttttattaaaaggaaaagcctttataagaactccttttgccctttctatctgcctaaaaattatttcttaataattcctgtattataatgaaactaaaaagcgttcagatggttgatcactaattattgctaacaatgtcttggaactcttttcaccctagcagggaactggcctcacatcccctcaacttttccttttccagctgggtacctcaagagttttatcctatatgtacaaggtgctgcaagagagagaaaaacaggatcagtgagtttgggtgtatgagacttttcaagactagatcaacatctgaaaagcaaaatcagtcaaatcaacaggttggcacctgcacaatgccaagtaatcacgttgactccatattttccacggaattgatgaaccctcttttgctctgggctgatggttttgccatcatgtagccacagattggtgtccaatcttgctcttttatctactgcagctgagaaaatgataactggttttgccacctgggtcactttttaatgatctgaaagaccacaaggagccagcatttcttttgtgcagttcctcattcaacaacctaatagctatctgaaaagcgctttcttgaaaagaaaaaagtctcttcctctcaggcagaagcaataataccrcatgattctctgattaaactatcacactgcgcatattacagggcatctgacctgcttgaaactgacttactgctgaggtttcttggtatttgcactgttgtttttctgccaacaagccgtcaaatgacagatgagtgtccctaaactttagtgtgaatggcaagtaaagtgcccaagaaactgctggggcccagctgcctcctgggcaatgctggaaggggaaatgtgtttttcttcaggggcaccctctgtgcaaatgaacttcaatcacaggtgaaaccaaagctgtcactacagggtrcaactctggagcaaaaacacgctgcatagtctcctcactaccccagcggacaggcagcctctgccagcacctaccacagttagaagtaaaaccaagaaaatcattctttctcctccctaaactccttaaaaatataatattttaaactctaaaaccttcatgctgtagtatctgaaaaaacaaattcgtaagtgctgtggtagctggcacttaaggcagtgacctggacattactgcgtatatctccaagggttttgttgtgtgtcatgaccagtgaacatttggggcgatcctgccaatatatatatagtgatttattttggaagctgtatgtgtattaccgtattcacactttatgtatgttagaaacattctccaaagttaaaatgttgagatgccactgtatacccacaaatggctaaaatttaaaagaatgacaataagcaagtagacaaggatgtggggccagtggaagcctcatatattgctggtagaaatagaaaatgacacactttcaaaaacaactgggcggtttctcacaaaattaaacacccactcccctatgacccagcaattctactcctttgtgtttccctaagagaaatgaacatttatgtccacacaaagatttgtacttgaaaacatggaaacaaccgaaatgcctattaacaaatgaaagaataaatcagttgtggtgaatctaaacaatggaatattgttaagcaacaaaagtgaactatctatgcacataacaatatagatgaatcttaaaaacatgatgccagttgaaagaagcgtatattgtatgggaatcatttgtattaaattctaaaacagggaaaactaatccacagggacagaaagcagatcagtggtggctgagggatggtggatgggtaaaggggggtgggatgaactgtgaagaggcacgtaggaagtttgagggggacaggtattttctatatcttgattgtggtggtggttacatggatatatatatagttattaaaacattgaactatacacttaaaattagtgtttcattatatgtaaatcatacctcataaacatgatttgaaaaaacaaaagcaaacttctggtcaacatgtacttctagtcatccatgttgtagcctgtgtcagtattagtgcaataatgtacaaaattaaaggatttaaagagggagaaaatataagaataaaatgacaatattttaaaaatctatagatttcactaatggcacacaaaaacctatagtgttatgtaatttaacatattgatcgactggtgatattatgatttaaagatctggttgcatgttaagtttattttgacacttggttataagggctgttgcagctgttaaaaaacaaacatcagatatacaaattcaaatggaagaaaagtaaaatagtttgagctaagtaaataataatattcacttttcaacccatccaccattatgcaaagcatgtgaaattcagttaatacatttctctttgccctgatgtcagtcagaagctcttacaaatgaatcaggatatgtggcatttttacatttttaagaaatagatttaaaattatttattcttttggaagattgttttaagttataaaattatattgccaagtttttaaaatttgcagatataaggtttttatatcatttttagcaacaaaaccgtataacagtgaaatattccaatgagccactttcaaaatgttctttccacagcatgaggtttcttttgaaaaatagttcctcttgcattcattactaaaaaatcatcatttcagaatggcaaaagaagtttattttttcaaaaatacttcctggatgggataattttgacagctacttgtcattacagaaactttcaactcttatctttaacaagaaaattccatgattgatttgtaagtggagcaactctcctaaatactttgctgttaaacagccagtaaaggcccattcctgaaaagattttcaaggacatctacacattattccaaagtactgtaaacagtctactatctcttaaaggccatttttttcagcattcttgttgtgataaagcacacacaccataaaatttaccatcttaaccatttttaagtgtacagttcggtgataattactacattcatgttgttatgcaaccatcaccaccatccatccacagaacttttttcatctcgcaaaatgaaacctctctgtccattaaacagtaagtcactattcctcttcctctcagcccctagtaacgactgtctctataattttgactactgtaggtacttcatatatgtggtatcatacagtatttttctttttgtgattaatttatttcacttagaataatgttctcaaagttcatccatgttgtagcatgtgtcagaatttccttgctttttaaggctaagcaataatccattttaggtatatgccacgttttgcctattcatgcatctgttggtgaacacttaggttgcatcttagtccattttatgctgctgaggtactttctgctcaacatatggagactaggtaatttataaaggacaaatttatttctcataggcctggagtctggtaagtccaagataaaggtgccagtcwgtytggttgtctggtgaaggctacatcctctggaggggagaaacacttgtgttctcacatggtggaaggcaggtggaaggacaaatgagctgaatactgtgtgaaatctcttttataaaggccttaatcccattcacaagggaaaggtcctcatggcctaatcaccttgtaaagggcccgcctgttaataccatcccaactgaattatagagggcacacattcaagtcatagcaggttttttcactgtttcacctatatgaataatgctgctatgaacatgggggtacaaatatatcttcaagattgtgctttcagttcttttgggcatatactcagatatggaattgctggatcatatggtaattctacatttaactttttgaggaactgccatattgccttcaacaacagctgtatcattcccaccaacagtgctcaagggttccarttttcccacatcttcaccaatacttgttattttcttttttatatatatccattttaattgtggttttgatttgaatttctctaatgactggtaatgttgagcatctttttatatgcttagttgccattcatatatcttcttgggagaaatgtctattcaagtcccttgcctttgctgaatatgttcattagttttaacagttttttgtagaatacttaagatttctacatagaaagtcatatttcctgtgaacagagatcattttgcttttttatttccaacttggatgtcttttgtttctttttattgccaaattacttgttaggacttctagtactatatagaatagaaatgatgaaaatgggcatccttgccctgttccttgtcttagaagaaaacctttccatctttcaccattaagtatgatgtttgctatgggatgttgatatatggcttccattatgctgaggcactttccttctattcctgttttcttgagtgtttttatcataaaagagtgttgaattttgtcaaatattgtttctgcgtcaattgagatgatcacgtgggttttctcccttttattcttttataataatatggtgaattattatacgttgatcagttttcttatgttgaaccacccttccattcaaggaataaatctcacttggttgtggtgtatagtacttttaatatgctggtgaattttgtttgctagtattttgtgktgttgtatcagaccaggatcaatgttcatgatactggtttatttttcttgttttattttcttgtggtttctttgtcaggctttggcattcagataatagtagcttcataaactgtgttatgaagtgtttcctcctcttcagtgttttggaaaactttgagaaagattgctgttagttcactagtgaagccatctggtccagggcacatttttgttcaacgattttttattgctaattcaatctcctaactagttacaggtctactcagattttctattccttcatgattctgtccttgtaggttttatgtttgtaggaatttgtctatttcatctaggttatccaatttgttgccatatgtttgctcatagtattctcttataatactttatatttctataaattcagtagtaatataccaatttcatttctgattataataacttgagacttctccttttctttttcttagtcagcgtgatggttattattgagtgtcaacttgattggattgaaggatgcaaagtattgttcctgggtgtgtctgtgagggtgttgccaaaagagattaacatttgagtcagtgcggtgggaaaggcagactcaccctcaatttaggtgggcactttagtcagctgccagcatggctagaataaagcaggcagaagaaattggaaagagcagacttgctgagtcttctggccttcatctttctcccatgctggatgcttcctgccctcgaacattggactccaagttcttcagcttttggactcttggacttacaccagtggtttgccagggttctcaggcctttcgccamtgaaggctgtactgtcagcatccatatttttgaggtttggggactcagactggcttccttgacagcctattgtgggacttcaccttgtgattatgtgagtcaatattctttaataaactccccatcatatatacatctatcctattagtcctgtccctaataggatagatgctattgctctccagactgggtgacagagtgagaccctgtcttaaaartaattctctcttcggctttgattttccacascttgattataatgtgtctcagtgtgggtttctttgagttcatcttatttggagatgaaccctgactaatacagtcagtctagataacaatttgtcaattttgtttatctttttaaagaatcaaattttttattttgttgattgtcctctattgttttcctattatctatttcatttatctctgctrtaatctttattgktttttattttatttttattttttgctagctttaaggctagtccttctttttctagttccttgtcattaaggtaggttgttgatttgagattttgattgtttttaatgtaagaatatatagctataaattttccatcagcattggtttcactgtatttcataagttttggtatgtcgtgttttcattttctttcaactctgattgttttctgcttttccttctgactttttaaaaatccattggttgtttaagatggtgttcttcaatttgctcaaatttgtgattttcttgttttcctttgattattgatttctaactttgtatcattgtggttggagaagaagctttgtataatatctctatttttaaatgtttgagacttaatttgtgacataacatctgatgtatactggagaatgtctcatctccactaaagaataatatgtattctgttggtgggtagagtgttctgtatatgtatgttagagctagttggattattgtgttgttcaaatgctctatttccagctttgtctccactccttttgattcattgatgtcactaaattacatccttgttatattaatttgcttgattatgacagtaactcacaatgtatatacatattaagccatcatgttgtatacattaaatacctgcaatttttatttgtcaatcatacctcaataaagctgaaggggatgattgcatccccttcccatttattgtaattgtaatgattacgattacattattgtgcgtccaaaaacataaattaggccaggcgtggtggctcatgcctattatcccagcactttgggaggccaatgttggcagattgcttgagctcaggaattcaagaccaggctgaccaatgtggtgaaaccccatctctactaaaaatacaaaaattagccaggcatggtggcaggcacctgtaatcccagcttcttgggaggctgaggcaggagaatcgcttgagcctgggaggtggaggctgcagtgagccaagatcatgccactgcactctaggctgggtgaaagagcaagactccatcttaaaaaacaacaacaacaaaacataaactagaaatttttttaagttaattatcctcttaaatcatgtagaaaatgaaaagtagagttacaactattgttaaaacaacgctggattttataaatctccgtgtatttacctacattgatatgtttttcttcatacgactttgtgcccctgtctaatatcttttcattttaacctgcaagaccccctttggatttctggtaggacatgtctagtggtaacaaattccttcagcttttgtttatctgagaatgtcttaatttctccctaatatttgaaggacagattttttgggtataaaattcttggttaacaatttttttttatttttaattttagcacattaaatatatccaccaatgccttctggcctgcaaagtttctgatgagaaatctacttgtaatcttattgatgatctattgtatgtaatgagtcacttctgtcttgctttcttttcttttttttttttttgttttttgtttgtttgtttgtttgtttgagacagagtcttgctctgtcacccaggctagagtgcaggggtgccatctcagctcactgcaacctccacctcccaggttcaagcgattctcctgcctcagcctcccaagtggctgggattacaggcatgcaccagcaggcttggctaatttttgtatttttagtagagatggggtttcaccgtgtaggccaggttggtttcaaactcctggcctcaagtgatacacccacattggcttcccaaagtgctgggattacaggtgtgagccaccatgcctgtaccctcttgctgctttcaagactttctctttgagactggatgcagtggcttacatctgtaataccagcactttgggaagctgaggtgaatggatcacctgagacctggtctctacaaaaaatacaataattaggcatatgtggtggcacatgcctgtagtcccagctacttgaaagtctgaggtgggaggattgactgagcctgggagttcaaggctgcagttagctgtgatcgtgccattgccctccagcctgggtgacagagtgataccctgtcttaaaaaaattctctctttgtctttgattttccacagtttgattataatgtgtctcagtgtgggtctctttgagttcatcttatttggagtttgttgagcttcttggatatttatattcatatctttcatcaaatttggaaagttttctatgacttttttttttcagataatctctccatccatttctgtttctctttctgaactccatcagtgcccacgttggtctgcttgagggtgctgtataggtcccttaggctttagttttgttcaatctttttccattttgttctttaaacttgataatttcagttgtcctatcttcaagtttgccgattctttctttggcttgcttcaatctgctttgaatccctctaacaaattttttatttcaattgttgtgctgttgagttctaaaaatttttttggtttcttcttggttcccccatcattttactgatatctcagttttgttcatacattttttttactttctcaatttcttctttagttttttgagcatctttaagacacttgctgtaaagtctttgtcttctatgtctgtttctagcttttcttggggacaatttctgtccccaagaaactgaacatttgaatttaatagtgtggtagtaggaaatcagattacgctctttccccagggtttgctgtttttaaaatttgtgttttttattattttaatctgtctccataccaagaatcagcctgaagtgtaaactttcactgggcatatgcagtaacttactaatttcccctatgtatgcagatgcttttgaatgccctagsctttaatgtctgactcccaaaaggggaaaatagaaaaatgatggaaatcagggtgtcaacctttgaaatctcctggaagttttggagagagaagcttatgaaaattggaaggaaggggccacagtgactgcctgcctctgtgtctgcacctccataatcagaagcaaaaatcaattatcagaacatagaaccctgatatttggaggacagagtttctattgctcacccttgctcccacaggctgcataaaagcttcttcagcaacacttgcacagctgcctgctactaggctggaggtagggaatggatagctgttgctgagctaaaagttccaactgaccaaaattaaccacaatttaccatctaagccttctcctggaaattgcaagccttcaatttacaccagaattttaatatagttacataaagcagattttgcctatgcaattattttctaggtggggacgttggattcatggtgcttcctacttcttcatctttcaaaaattctcttgaatataaaactaaccacatcacatagtcccctatggacttgtaaccttaaattcttatctctaataacatgatgctgtgaataaatatcacatgtagagctatctctacaactttctctttgtgtgagtttttcaaaatttccatccaagtcattgctctatcagtagttatggttatacagttttcccatgaaacactgagtttattaaagctcatgagatcttcttccagaactccttcatttagttgagtcacaaaaaagcagttgttcttatatttgttattgaaacacatttttcttaagaagatctatactaaatacaaatatatatatatcaaacctcccacataacatatatctgaatttttctaaaatcatcagtaatgctttctctgcatcatcaataatatttgctgacaaatgaatttatttctgttttttgccacattgattccatgtattattttagccatttttactacaaggagaacaagtatttctcattgatatttggcttgttgtctttttttcttatgtaaggaatatcaaaactggcttataaagtttggggaaattttatgaagaattgaactgagtaatacaaaactttcaacattgctttaaaatcttaagtttgtcttcatatctcagatgataagttgtttaaatgtcttgcaaattctgatgatttttaatggcacaatatgtacccttaagctaagatttgttgttaatgatatttagtgtaaatatatatttcaaataagtttttttataatatcgaatattttcaactgtattcttgtgacagatatccatgacctttggatcaaaatgggcctaagagccaataatgaaaagggtcaactctgccatttttttattgttgcttacttttgtattatgactatatagataatgtcttagatgtctttgagccagaaagtgggtgaataaagtgctatataggaggaaaataggtgcctagagcacctcaatttgctttgttcccccacctaggctgccagctttttattggcaatataatatagacatgaagagtataagcttgaaataagtgtctgggtatcatttactagctctgtggtcctacaaaactgcttaaactcttgctctttggtttcctcatctgtaaaatgaggacaatcatagtgcagccttatcatcaactccttttcctctttctccatattcaacacatcaaatctaacaaactccacctttaaaacatacccagaattcagccacttctcaagccctctaccattmcccttcaggctaagtcatctcctacctaaaatactacaggagcctcctaactagtctacttgcttcattcctggctcctcttattctgctttccacaaaacagccagataaattctttaaaatgtaagttaggacctgacacttttgttctggaactttctggtggtttcccattctaatctggataaaatccagagtccttgctgtagcctgcaaagccattcatggttgaccatccattccttctgtttactctcatgcttccctcactcactctgctccagcatttctggccttattgctcttctcaaacacagcaaggacacttctaccacatggaccttgctctaactcttcccttttctagaaaaattcttcccccatgtagccacaaggctagcatttactctattcagttcccttcaaatgttcacttagaaggtcttctctaatcactctrtgtaaagaagaatctccctttggatcattctcttttcctttatcctgctttatttttattaatggcacttttatatcaaacacatttcaaatcaatactctgcttatctgtctcctaccactagcccactggttctcaattttgggtgactttgcctcctggaagacatttggtaatgtctggaaacatttttgtctgtcacactgagggaaggagtagaggccagacatgcggttaagcaccctaaaatgctcagagaagttccctacagcaaaaaaaaaaaaaaaaaaaaattatctggtctaaaatatcaatattgagaaggccagctgtagggttcagcagcatgagagcaggaacctggtctatgttgtcccaggtatttacaacctggcacataggaggtccacaatacatttctgttaagtagctgaatcagatgagaatatggtaaagaatttagtacaaaatctggcaaatagtaactatttcttttaacactgaacaaatatttattgagttttatgatgtgccagacactgcactaacttcttaggacaaaacattaagcaaaacatcctaggcccctgttcacataaaggttgcctcttactggatgttaatattagttgttattaacagtgttatcactttaatttacatcagtcmtcctagctttacccaggatttgccatgagaccagggttttttgttttattttgctttgtgttttgataggattcttatttttcagagatgcactggaagacttggagagtaggtttgccagtagcagcttggtatggtgtaaataagaactggagaatttgaaatccaataagctaggtcgatgttggggtagcacttagtataggtgttatcagtcaggataggcaaggtctgctacatatcaaaggtcttcaacttcttaggcctaaagcccattttttgctcacatacatgtccatgcctatggcttattttactgactaaagcaagtcatgtggctcaggctgatgtgaatggggcaagaacgtatgaytttacctgggggaagggaagagaatatttttagatgatgggaaaaccctctggttttttcatcttcaaaaatctgtctgattttctaaaatccattggctagatatttggttgcaagtcacagaaaggtatattggcgtagaaaaaagaaaatgtactgggtcatgtaaccaggcagtctagagagggagtggttagcaactcaaatgagtttttctccccagccctgcatctctcycccgaccttgttattgaggaagaggctcgctgcccaacacacataggagccactactgcagcaccgactttcaagaaaaagaaaggttggggggttgtgttgcaagctgactagcaaggaaacaggaggcaacagtcaaatmtgtctccctaatctaagggtgggtcaagcttttatggcatttctaactagttctagataataccaatgtagccaatctgccaggctgatggtgttagcaatcagaaggcacgtgcccaggcaattttggctctgtatcatctgtaacaacttaagcaatggttaattggtttgagctggtcctgtggttacaaccttagctytgtctccttctctctctgttggattcattcttttactatagacagtccatctacatgtggagkagatgactgacaatctctgaataacatcctttcagatccatgactcagaaaacaagtcatcttctcctccacatctacaatgaaaaaaatctggggaaggattttgattagcctggctgcctaccctcccagtcattattctgggaggaatgggagtacagtgattgcctggacctgaatcacatgtccatttctgtggccagggtaagggaagttgtctgtaattagcagcctccccagcatcatatgatcagaataggggagaaagaatttaccagaatttaccagtggaagaacagatcctgtacaggtgaagttagctgcaacattgaacccatacctaccctactctaaatacaatgaagcatgtaaaagccttttttttttaagctttaaagcattgttcacatgctaattgctgttattattcttttcaggttgaataaaaagccacattatttactagggtaaattaatgttggtggcagccaactattgttctatacacatagttagttggaagtaaagctgtaataaataggcaagaggttaccagcaaatggagtaagtcaatgacaaaagctgtttagtattaaacctagaagtggtgcttgttacttaggaatgacactacatctgcaagactgtacctatacagctgtaatgtgaaaaattctgcggtatgtattttctgagtgctattatgtttctggctggtgctaggggatattcaagaagagtaatacacagcccttctcttggagcaatgttcaactccaaccagatcccaatagctccgaatatgcagattatgtcaaggaaggatcaggacaaattgactgaatttttcacttttcctcctgatgccttgacagcctgtttctcatgcttactgaatgatgtttaatttaattcatgtgctcgaggcagcacactctgtgttgcagctgtgcacagtttgtttgaaagggctttcacggcaaggccaaaggcaggaagcacactgccgtgatgccttgatgaatagaccccttgggaaagaagcgcctttataatgaagtcacaaaagaaatcttcataaatcctcagaagcccagcggcttgcatgtgtgagtgcaactaaaatacttccaaaacgaccctgccaaaggtaaataaggccaatagtaggcagaatttttataaatctgactgctgtgtctccaggcaccattcctatagtcatttctctgtacacagccacacatgcacgcacacggacatgcataaacacatatgtgcatgcacacacactgtatccatcactgttatgaaccctgctcccatttctaggtcccaatgcctcctgcttttccaatcaaaacagagaaaaagaaataattgtcactctcccttgatgattgatcaactgggttactcttgtgttaatgaatttgaccttcgcaatcagtgttgcaattttaggccttgaactctaactgtgatagatgacagcctctgagaaaaggagagaggtgggttgatgggaatcatacttaacaatatcatgacagcagtcctgaaggtgaaactgattcagtctttttagcaagagcggggtacagtgatatgggatccatctctctgtgagcccatatcacttagatatattccttctagatgcccagttccaggaaaatgtccccagccttacttagctgaagtcctcaggtgctaacatttagacttattagctggaggctttttcctgaaaccggcatcaaaagggcactgtctcttgatcttcactccaggaaccggagctgcctcagaggtagtgaggctgcactgatgaacagcttcctttcctgtcctttattactgtgggttagtttgctgggcctgccataaccaagtaccacagggtggtggcttagacaacagaaatttattttctctcagttctggaggctgggagtccaagcttaaggcatcagcagggttcgtttcttcagaggcctctctccttggcttgaagattgccttcttttctctgtgtcttcccataagctgtcctctgtagttgcctgtgtcctaatctcctcttcttataaggacaccagtcrtattgaattggggcccactctaatgactttattttaacttaatctctttaaagaccctgtctctaaattcagtcacattctgagccaccaggggttagaacttcagcatatgaatttggggaactgcaattcaacccatactgacctgccactctctccttaccctgactggtggcctgggtactggtggactggttcccttcacctgccttaactgcctcatgcagggcaggtttggctgacccaggctccgtggaacccaagagaagaattgaaaggtgtccccctgaaaaaagccaagggacaaagccaagaagccttccaaagcaggaggtaagaaacttggcaagctggagagggtcctcaggtgctaacacttagctggaaagaggctgccagagggaggaagacggagaaggttaaatccaaatgacaaaagagggtggtctcggtcagcgccacagctggcaggctccagtccctggctgctttctggatgtttgtggcagcaaaacactaagatcacatggacacaaaggaggaaacagcagacaccaaggcctgtgtgaggttgaaggctgggaggagggagaagagcaaaaactacctattggatactatgttcgcttcctgggtgatgaaataatctgtacaccaaactcccaccacacacagtttacctatgtaacaagcctgcacatgtaccctgaacctaaaataaacgtttttgtaaaaagagaacctgagagagcataggcattaacccagctttacacaatttattcaaaatctgggcattcccgtctttgccttgctgtctctagcttgtgattctgtaacgttacacaytttgctttctctgttcaaccttctttctccccatagttactgagtgagctcatcatccttccagattttactaacatgtcacttctggtgtaaaggtttcttgactccrtatattttagtagttcagagatccaactaaattttcatgagaatagagacatgtctttgcactttgagtccccacatttgtaaattatcaacaaatgtttattcagtgaatgttttcaattgggaagattaaaatctttgaactcagtttatgtgctccttcctgtgtctcccgtccttatatgtagggaagtgcttgttataatacataggtcgatgccttcagcagtgygagcagtttaatgattgcgaaggcagattctggtgcctcattgcttgaacttgaatactgatttcactgtttcttggcttggtgaccgtttcagtttgctagggctgccaaaagaaagtagtacagactgagtggcttcaagagacatttattgtctcacagttcaggaggtgagaagtccaagactaaggggtcagcaggttggttccctctgaggactgtgatggagaatccgttccaggcctccctcccagctactggaagattgctggaatctttggcattcctcagcttctgctgtatcacactggaccctgccttcgtcttcacatgatgcactcgctgtgtgtgcagctatctccaaatttccactttttgtaaagacaagaggtatattgtattaggggccmaccagaccccagtacaacttaactaattacatatacaacaaccgtatattcagataaggtcacattctacagtcctgggggttaggacttcaacatatgaattttgggggaacacaattcaacccagtaacggtgacctttgacacactgcctagtttcagttcccatattagtaaaatagaataataatatatcctaccttatgaggttgttgagcaattaagtgaattaatatatataaagcrcttaagacagtacaaggcacaagtaagccctacttggcattagctgttatttctggtgtgtatatgtctgtctattccactaacctatcacaggtagagactatgcttagtcctacgtacaacggtattgcatcacatatagtacaacacatagcagagcactttgtgcctgatacacaatctttgattaaatgtaaggcagagatagttcagagtgatactggggcaggaactgaaagtctgtctgcatgtatgagacagtatattcggtatattaggctttgtcatcccatttatatagttagatctcaaagccttcccctaggaggaatttgaaactgctcctctttcttggtctctccctgaggtttccttgctttcttaaaaatgtgtagggattttggtactgcatacacaaatgctgttttgtcttcaggtatagagagataattcagcttgagcatcttacctttagttattggcataactgaatgcggcagttatgtggtgctttctcaattgtgatattatcagtgcaaggcaggataaagaagggaagagcaatgtgatatttcttcctcagaggcctgggtgggccatctggcaatctttaaatctgggtgccagattgaataacatgctttgggtgactttttaaatgcattattcaggggagatgttgttttaacctctgcacttcacacagctttctagctgatggaaatcttttctcccctttgcttgaaaattacatggaacgtagcccagtagagactaacaaatcagcaggagaattcctcagctggtctgaatagtacctaatgatggaaaaggtggttgaatcaagctacctaaagcaagagcaaggaaacgatgtgcaattgttcattccccaaatatgtgagacacagtctggttcctgattcggcaactcctcttgttccaaaaataggggaggtccaagtagtggaatgagaaaatagctgcacggggcacagtgggtttggcttctagccttgatcggattgctcattggtttcttgaaatcaataagatgtatcacttctctaggtgtcagttttcctttttgtacaatgcgattgttgaactatgactgcaatctttgaggtcctgcctctgcttttacttcctctataacattgtgcaaacctatagattctcggtcttctggctccagggtaaatacttttactctagtttctgacagcccaccacttaattactctgttgaagctcagtaccaatacctgtgttttctatattttattgtctcaaactgaactctaggtttgaatgagactctgatcttgctttacaagtaaatgaaacaaaggacaggtggggtcaaccctatttcttaattctgagaaattgtcttaatgactcaggaaagaagcatttctacatgaaagatagaggactattcatcatcattatgcatgtgtgttttttgtgaggtcttggcatgaaacagaaactgatagaaggaaatataaaaagtgaaaagcatgcctggaccttccctttaacttaaggcatcctagccggaaggctaaggtcactgataactgactgaaacagaagaagggactgtcagaaatacatcagctgctcacttttcaagtacagatcttgtttaaatgctttgaggtggtmacaagtcagttaagggactaactggctagggatgaaatgatctttggcacacttacccaagacaatgtgttttgattatcttggaagaaagatgctttgtaagggtgcagtgatctgggtcaccctacccaaatcatcaccaaatatttctctgaagcaagaggggatgtggatgtggaggaaattctgaaacctccagtcttgctgaacaatccctgtaacacaagtggggtggcgtggagaaggaggacggacacataccaagatccagattctaaaagcccatgatttttgagacttgtagtaagtgtattttcattcagacctagtttcttattagagccttgctgccgtagtgtgtttattctattaatcctaacggtatttacttcataatggagttccacgtgagttaacgcttccttaggtgggttttctcttaccgtgaatatttccaaccattcatagcactacttgcttgacctttcagaaaaatgattttttcatgagcagctttcttatactaggtactctttttcttaagaagggcctagagaaaagaaaattcagaatgccttagttatgtttttgtggtatatgcattttatcagcccttactgtggaggagcaattccatttatttagctgtggcctcctcaacgcttcatagaactggttgcagattggacttctagatattcgtgtcactggtggccattaaagccagggatgggctaattagctgaattgtacatttgaggagaaatcacttaagaagatgaaacatgtgaggtttgataaaaaccaaagacagtttttatacttacataacatttgatggaaaataaaatccagataatcccaatttcttcatatttaaattgtcaaaatattgctttgtcagaattgtttcatagacatacagttttttttttttttccaacaaagctcctcattttgtttggtcctatcaccagtactttattatttgtataaaagtttgaaactagcagggtcaaacataaaatttagcagtcatttatattatcaaaactccaacttcaactagtcctttggtaaaaattttatattcacattagctataaaaaaaacccagttgagtcaagagctttgtaaagtgactcattgctataaagaaactgagtaaccttaatagaattgatttgaatttcagttttcctatctaaaaaatgaagataataataacgcatctcccatagtgtcatggggtagacatgagataattaagggaacacattttgtgaaaggtaaaagtctaatattatcattgatttttaaccaaaagcaaatctaccaactataatkatgtaactaaactctaatattattgattttatccaaagcaaagccactaaaatatcatataactgtaaaatcacataacctaactataactctagttatataattacatactgatttagctgcccagaggaggcaaatcagaaatttttttatgtattaatatttagcatttctctaaactccatagttatactggttactcacagtcctctaccccttgaaaattgctcttgggtggaaaaaaatctccagtggggaaatttacacatttgtgtcaaagggggctgtaggtagaagagactctccactctttaagacaaagttctctagcactgcacgttctcttgaagccctaaggtaacacagctacagatggcaaaagggtagaaattggggcatgcgtgggggctcacacctgtaatcccaaaaactttgggaggccaaggcaggaagattgcttgagtacaggagtttgagaccagtccaggcaacatggcaagaccccatctctacaaaaaatacacaaattagcctggtgtagcggtgtgtgcctgtaatcccagccacttgggaggctgaggcaggaagatggcttgagccccaggaggtcaaggctgcagtgagctgtgactgtgccactgcactccagcctgggtgatagcgtgagtccgtgtctccaaaaaaaaaaaaaaaaagtcggtctgagttctgagttctcagaccatatggttctgttatgactacctaccatgggtaagaggctcctttggttaaataagacacccagcatctgtccattggttcagctgtatctaacagaaaacccaaattaacactggcttaaatgcacaaggacttttttttttatctcttgcaaaagaaatctgtaggagggagcctaaggcaatgtggcagccccacaaaattcatagagccccagcttcctgttatgttttcctggtgtacggtatatggcttatctgaaggtcagtcacctcaaggttcaagatggctcttggaacttcagtcaacgaattcatgttctggaaaataggataaagaaagggaggacccaaaaatgtcttcccttagctttttttcctccttttaagtaaccttcctggaagcccttcccaacaatgtatgctatcttgaaggccagaactgactaaatagatagctgcagaggagactaggaatgtaatattttagttagtgcatttttgcccccagtaatataggcattttattaataagataaaaggcaagaataggtgttggatgggcaactagtagcagctgccacacaaggtataaattattttggactctgggtaaagtgtacaaaggagaacctatggtcaaggagaattgctgccagtggcttgaccaacagtctacgtccacactcccgtttctgctgggaaccgatcactaataacctggctcgcctaccataggaaaaaagaaggagtaatagctcatatctattgtgtgcttactatttgacaaaaaatgcgtaatcgttttgcatgcattatttcattaaagcctcaggtcaagccataaagtaggtactagcactattcctattttacatatatgggaactgaggctctgtggttaattaacttgaccaagattactaggaagtgtgaaagtagagacttgaactcaggttctttcgtcttagaagcaagtgctctaccactgcactgtgctatmcacacacacacacacacacacaaaagggaaaaggaagaaaaaaagagttataaagaggtaacagaataaattaaatccctgaactaaaatgaaaaattgtatattaaaatgctaaaagttaatttttaaaaggtaaaatgatgacttatacaaacataaaattaacatgtgtcaaatattttaattaactgagtgaaccaataggatgtcaaacatgttcaaaagagaattcaatgaaatgcagatatataggcaatgaggaatgctgggaagaattttcaaatagatacaagactggtctattcattgggcaataatcaattgcattccaccaggcacaatttctttccatttctaaggatgagaatgactttctattatctgttttacatacagagtgaaggaaccaaaagataaaaaataacctggaaaggtgtgctagaaaggacactcagtaactttttgtctagttcaaagtttttcataatttaaaagtttttctagtgaacctagattatcttctccccattgcctgatataccagtgtttagggggatgtaaagaatatctcagagattcctttttcctacctaccctccaatttattcactactagatgtccagcagagagagagggaaggtcaaagaatgatcttttctctttgaactgtcctagtgtgttggtaataactttccaaactaagatggaaaattggattccagtggctgtcatgtcatctttcgtgaagtaattagcaaatgtatgttggatgccttcaatgtgccagagactctgctagatggacaaagtaggcatggttcctgctgtcagatacttaccgtatacaggggaaaacttaccttccagtagagggcaaatatgctgtccaatataacctacaaatgtgcactccacccaaccctgtgaattgcttctatgcacattatgtattttttaggtcttacattataacttgttcaaaacatcctttccaagcctggacagcttgtctgcctccttgttcttccccaattgttgagcagtttgtagcatcatcagaggaaaaacactattgcattaaaattgccagtgtggttttttgctgacagccaaactatgggtttggcagcatttccctcttaaaagcttcacatgacttccctctgtcacctttagagtttctgcagtgataaagaggcatcaacttgctcagtacagggaagccttctggactcctcaaattctgcccttaaatcggctcaaagacaaacagggaaggatgtttctgtctttgcctctcttcccctcccttccactctctcatctgtcatcctctgtctgtgtgttgtcctcattgccctgcctactaattctcatttgcaaaggtttttttgttttgttttgttttgttttgtttttttacagtcagatctcaggctgcttcctccagggattcatttactctttcctggcagcagatttcggagggctctgccttctgcacactgataattaagaaccagtgggccaagaggcatcttgcgcagtgctgagcaattcccctgaattccaggcaggaggcaggtgtacactgagggagagaaaggaaagagagagacagcgaccacgaccacatctatttcttccttcgacctttctcagaaaggagccaagccataatgttactgttgccagttaatagtcatgagctcaactgatgtaaacactgatgatagtcactttccttcaagtctgccactgcctatagtatttccttgttttgaacactgacctctctaggactcagtttcctgatttataaaatgacaacgtcggaacagttagttaggaaagagcttcagcttaagcattctgtttaactaaaataaagctgttgagtttttttgacagtaaagttaatgttgctttttataaatgttcaagcagatgttcagaattgcctattaaggagtgggatttgaaaggagagaataaaaggattggttaggtattctgttgtttggggagcttctgacttttttcttttaartgaaagtaaacacccgtacatggggaagagaatcaaacaacataggaaggtctaaaatttaaaaataaatcgtcccccacctaccccactcctgcctgtccacattctccagcgytaaccattctgagcttatgtctttttagttcttccattgattactatgactttatgtcataatgtatgtatttctgttttctgaattaccaactttggatatattgttgactcccaaaagakaaacttccctcttctggtgtgactcccaattttgtttggttatattatttctaggttgtcaagatatggaatacatcactgtctttgatgctttgtctatagattgcttctgaaaatctaagcccctaaaaagtcatattaagtataatgattatataaatactcttcactatggaatgaagttgattccttggacccatagaaaaggaaatgggatcctttgtcactgaactcttgccactccaagaggaatgttctagggctgggtgcggtggctcatgcctgtaatcccagcattttgggaggctgaggcaggtgggtcatctgaggtcaggagttcgagactagcctggccaacaagatgaaaccccatctctactaaaaatataaaaattagctgggtgtggtgatgcacgcctgttacccaagtactcggaggctgaggcaggagaatcgcttgaaaccaggaggcagaggctgcagtaagccgatattgcgccactgcactccagcctgggtgacagagtgggactctctcaaaaaaaagaaaaaaaaygttctatatatcaaaaacagataaaacttttccctgtcagattgcgtcccttctttcccttcatagtctggttgccactgtttcttttatatttctcttttccttatatttttccttgtatgttgtcatttgtcttatatgattttaaaatctttgaggtttttcatgtgtgaaaatgttttatattcccttatgatttacaagtttttgactgggtatasaattcaagcctcaaaatcgttttccttcagaagttgcttcattatctgctaatatcctgagatgctgatgagatttctgggattagtgtgattttagttcacccaaagcttagtgtaacttttttttaaccatgtaagatttaaggacttttctctttatctctagggttgtccagtkttgccgtgatgtatttagatgtggactaaggaactttatcctctctgcttcatatttagtgggccctttccatctaaagacgagtatctttcttgatttctgggaattgtttaatattatttatttatctattatgtacatgtcaacttgactgtttcttttacggttttggttgctacattctcagattttctcaaatttaccttctctattagtgtcttagccttaagctttgacaattcaccaaataagagttttgttcacaggactgaaactttaggtggtgctgtttgatagttttcttctctcagagtctgaaactagactctaaagttaccccaagctctactctgttaacgtttctggcttcagtatcctaagatctcttctaaggcatttcatcaaaaaaacagtgccaagagctttagccaggggacaaaacccagtgatatcagcctcacatactccaaagacccaaggtgagggaactggaacatgccagctccaatgatagtcctgggggtttcttctgctcctggaatttgatgattcaaaatttccattttactcccaaactcctttacagggaatctttcttagctctgatatttaggagttcagaataatatgttctggttttttccatcaatccaattcagtctgctttctgtcttttagagttccctcaaaatttctcctcctatgctagctttttaaatatacatgcatattaaggttttcttctgatttataacatttcctacattgctgggcaatataagaaaagagaggaggtagatacatttgcttagacctctgcttttactaatattttttaaagaaaaataaatttgctattttcataaaataatatcttattataaagaaagtaagcaattcagaaatttaataaagaacaaaaaatgtaaaccaaccataataatcattattaatattggtgaacagcactgcagacatttctaatgcaaatatagagaagaacagatagagaaaagtacttgtaggaaatttaacagaaggaaaagaaactgagataaaagaagagaaattgctaaactttaaacaaatgcttcttcaccataaaagaaatcactttctaaaggattcctctaaagttatggaaaacattagggaatttgaattattttttctactttatgataaaaatgttattttctatgaaagagatgaagtcatgaacactctcatatatttcccttcctcctctcccttttgttagctatatatcatttttatattgtcaaagtgtaaggtaattcccattgaaatatgaccaaatataacaaaactccatgtaattgtttagtatttgttctataatttgataggttaatttataaccattggtttttaaattatagcttctttattactaatttctttagattcatctcttatttatgtagattttgttgccactttggttcagcattttttmaaggaggtctcatgtgtgctacatgtcctgagttctttcatgttgacaatgtccatttattatctttataggtgaataacaccttctctggatttaatcttttggccacacttttgttttttctaaatattgtaaacgttgttttattgccttcatagaagaggctaatgacagcctgattttctttcagtttttaggtgatttatttttctgcctgggtgctcaaggaattaattctttattctttaaacccaaaatctttagcagaatatattttcataatgcataggaacattactgtaggaaatgttcttatggcccttatgtattttgtctatcagcaaatcgcttttttattttaataaaactttcttttaatatatcaagttatttttctattctatttttctgtcattctgagacattaactttatgctacctcattttaatctacatgttgtctgttaatttcttgttacagaaatcagtttgcttttttaaaatctgcactccttatgattatctcaaacttttctactaacagcatagtttaaaattttcaagtattcatacatacacagaggaagtgagtctaaatataaggaacaaagagtaataactaaatgaactcccatatctctacaacccagcctaagaactagaataatattactatatattaaaattcctatatatgaatacctctcctagattccatgctcctctgtttattccccaaagttactaacatcttaagttttatctwtagcataagagttttaaaaaattataccctaattaatacagtttacttttgaatacgtttgaccatttttataaaataaatcacactatatattcttcagcaacctgtctttcttctccttaaaattctgcttgtgaaatttatttatattaatacatgtgcctttagttatttctttatcactgttaaatactattcatagacagggtgtgtggttcatgcctgtaatcccaacactttgggaggctgaggtgagaggattatttgaggccaggagttcaagactagcctgagcaacataacaagaccccatctctaattttcaaaaaataagttaaaaataatattcataggatggatacagtatcatttatgcattcatttccctattaatgacttctagtttgtttcaacattttattattatcartattatatatattatatattatmtagtacacatgttcaaattttttctagaatgtatgcttctggggggtggtatttccaaattataagtacatctttaacttgacaataatgccaagtgattttctaaaatagttacatatatttgaacgtaatatattctctacctggttgatggctattattcttttattatgtcactttgcttcttgatttgtttccttgagtcaaatcttccttttaatctgagttctattgctttatcatcttttcttgaaattcttgttttatttcatctatattctttgacttatgtattcctttgcactttctcatttgatttgatccttgaaataacactgaagaataggtactattatgattcccattttataggtaaagwaatggactccmaggaaattatgcatcttggccacaggccacagctagtaaatggagratctaaactagcaaccgaggccttcacctccaaaatgcttgcttcttttcatgctttgagacagactataattacgtgctatattgtgtagtacagcctctaagactaattcagcttctaaactgaacaggaataagtaaacaaccatctatagtacatgtaagttattgaaaacccttctaaatgagacaagaacagcagcatatcagrtggaattactgccctgatctctcttggaacttacccctgtacctaaaaggatgaattctgctgctaccacctgaagtgtgtgtgtgtatgtgtacgtgtatgtgtatgcatacgtgtatgtgcatgtgtgtgttttaagcagctgatacaagtgacagtactattgacatagactttagaaacccaatttaatcacaaggaaacaggattaaaacaagaatatgatgtgcgtttgcttgggcctcgatgatgtctgagaagagcctttatttggaatatccctccatcctgagctcttagaaaaaaaccaggtcacacagggtaaacgtgtgcagcaattaatgtggtggatggtagaactttgccctgtgttaggggacttttctagcacttggaggggcatagtgaagttcatttattcctggaaaggatctctctcttgagttacagttttagaagaatggcgtatgaaatgacaggctacccgaagataatctatactgagaatgttgtaaaccaaagatgaggggagacagcaagactgactcaaagaacagtcatgcatctagacttagctgcccttctgtattagatcaattgctggttgagtttatgtcttattttcaaatatctttgtcaaggaatttaatcaaacctaggataatcaaataattattttcattgtttcctaaagattgatctaaagagatgcatatatatctggtggggaaaaaatacctgcaaagtattcaaataagtttgggtgtttttaatttaaccaagccaagagttttctcttctgtagaatttctcaaagctattaatatgctgatgtactctgaatttgtaagagggatgtatattacaaagaaattctaagttatttgatcatgaagcccttgtattcatggactcctggaacatatttcaagaaattttgctttcttctaattataaaatattcaaactagagcatgcctcaaaacaactccagttttaaaccctaattttacaagaagggaaactaaattttagaggctttaagtgacttccccaaggtcacatagctctttggtgataaaggtagaactaaaatttgtatcttcagattcctgatcttgtgtgaaactgatyaaaaatagattaagtcacaasatgcaatgacctgaaggcaggcctatttgctcccttccaggcatgtgatgtgtccttctttgccagtgagaataatgagacctaaaattatttcctgtggacccaaaattgcacttctgacagctcmtgaaatcctctctctgaaaccttattacatctctgctctccctaaagattcaagagtctagggatgtcctctctaaattctgcatataaggcctacatcacagatattcacctgaatrtcttattatgttgtgccctccagcaacacttagagagcaactccccttccagcgtcctgttccaagttgacaagtctgtggcaagaggcaatttcttatcctgaggttatctggacagcctcagaccccataagcagaatttagagagggcttgaaatttagaaaagggaccacctttctggtaagcagtggggcagtgtatatcaaaaacccttaccagcttcatgccctttaactttgaaggaaatagcagaaagtgtattttcagatttaattgcactagtatttgtcaatgcactattttaatagaaatttgaaataacctgagtatccaataataggagataccaaacaaatcaatatacatctattaaatactatatagccaataaatgtatgttacagaaccactcatggaaagatgtctagaacagagcttcccaacaactttgctaggtattgaaattttgatgtcctttgccctcatggcaggtagtcagggtctagtgtggccagagtcccccactcaaatgtctcaaaatgcaagcaggctcttctttcacccaagtgtaccgtaaaattatttggttttaaaaatgtgtgccataatgtaaaaatgttcagaaaactgatctaaaacatattgctgggaaaaaattataaagtattattacattgagttttgagatatactccaatgtctgattgaaaacataccttgcctatatctggaatactagtaatttttatgtttttgtttatttgttaatttacatttctctttttaagtaaaaasgttttttttttcttgacagagtctcactctgtcacctaggctggagtgcagtggcaagatctcagctcactacaacctccctcccctgagttcaagggaycmtcccacctcagcctcctgagtagctgattacaggcgtactccaccacgtccgactaactttttttgtatatttagtagaatcgagtttcaccatgttagccaggctagtctcaaactcctgacctcaagtgatctgcccacctcagcttcccaaagtgctgggattacaggtgtaagccaccacacctggccaaaagtattatttaataagaataatataataataattttaatgcttacatagctcttaatatattttatttggtttgatcctcaaacctatgaagtagtcacrgccatcattgttttcattacataaatgtcattttttaagtccatatttgaagctagtaggaactggacaagttgatgctggcagaagaaggtagaaacaaaatatatctgaaaggtagaaataagaaaatataataactaattacctgtgggaactaagtacacctccaggacactggggattgtggtattaatgaccaaaacagaatcatggaaatgcagtattttacaaaggttttaagggcaaactcagggaatgattcatgttcaagaagcggctgagttttgctgtttacttgttatttaggaggtgcaaaactcactggtgaaaatgtccaagttattgttgaaactcagctgagaggacgaaacaaaagatgcaatctggatagtcattcacaatggagccacagtcagagctgtgcaggagaactgattctcctgggaagagtgtagagagaaaagcaggacaccaaaagctcgagcctttagtctttgtctctgcagaactcccagggacttgacttctatgtgtggaatgatgatagaatagcattccaagagtcgctggccatggatgaatactgacaatggatgacatgttcaaatagttttcttcgttattcctccatagatcmgagattacttgattttaaaaaacaaagtaagaaagacattttgtatgctcacaggggatttgttggtgagcagcaccctagaagataggattaatgtgaaaggtatcctagccatttgaagaagtgatcagaaattaagaaggtgccactgaattataacaagtgcatagtacattgcacttaggatgggyaaagggattaagctacaamartacaaaatggaaggactcwgacaggctgtaaatacaatgagcaaagatctacaagtctcagagaggaacaactctctgagttgtttatatatttatgctggcaaatataagatgtttactagaaaatatgttttcaggcagtagaaagacataaatataataattcaatcaccctgtcatatttggcwttcagaagaaatacattagaaacataataaatgtatttctcttcagggtgcctcttttaaaagagtttaaatttattaaataaaatatcaaggacatcaaaaaattaatacatgactgtaaaaatgtattcctaaagaaaggtcagtaatcatggtatttatttttgacatcaaaagaccaaggaaaaatttaataaggatcaagatcattggcctgcgtgcagtggctcacacctgtaatcccagcactttgggaggctgaggtggcaggatcactcgagctcaggaggttgagactgcagtgagccatgatcacaccactgcactccagtctaggctacaaactgagaccctatctcaaaaccaagaaaaataaaaaagatcattaatctgtagaagattattgtacagagttgtttggcatctctattgcaagtagaacaatgggaaataaactgaagccatgaatttaaaaaatccccccaaatatatatttatatgtatacactcacacacagaccacacatactggcatacatacacatatatgtgtatgtttgtgtaaagagtctagaagagaatgcagcaaaatattaatagttattatttctatgcaataggattgtaggtgttttatatctgtatcttttccaaaattatctacattaaacatgcaatttttgtgtagtaagacaaataagttctttttctttagaagtgtttctagaaacaaatgttacttctttctccttcctgtcacattctcagcccttaatcgataaaactcatttttcataagatcctgaataacaacagttctggcaccccattttatctttttcagatgctagtgaaaaacaatcacctttcagacaagatcattgttttgccaggaaaaactgaagacgtctcacttcctgaggctgtagatrtgatcatttccgaaccaatgggatacatgctgttcaatgaacggatgctagagagttatcttcattccaaaaaatggctaaaatcaaatggtaagttggcccattcttggtttaaaaaacagtctaacttctstgtaaaattttgccactctctgtcccctacatctggttctgtacagaaagaaggagagagcatttctgttatactcaattatttgtttttctcatctcattcttccataacaaattaactcatctccaatcgtaagaacacaggtatgctgcacagtattcaacatggtgtagagagccaggtctgagttctgtgttttttgtcctagttcaatcccttcattccttaattaacttgggctaacacttgaccttttggccttggtttcctcatctgtataatgacattattacacataatctccaatgtcctttcaagtgttggccttctgtaattgaggaactgtctggggtctgcttgttctttttggtatattttttccctactgtatttctctctctgtctatgatcactacacatagtcaagataatattaaatctaatatgctttttgtgctttccaagtgactgcatgtgctaagcaatttgaataaattattttataaaatccttataaagtctgaatgatgaaggttttcaatttatttgaggggttatccttgaagctaattttgcaaccttccccagggacatttgacaatgtctggagacattttggttgtcacaatggcagcaggggctgggatcctagcatctagtgaataggggcaaagatgctgtgaagcatccttcgatgcacaaggcagtcccttacatcaaagaattatctagcccaaaatgtcaatggtatacgattgagatctgggttagcgggggacgttgttatcatcccattttataaagagaaaactgagactcaatgaggaaaagtaacatggcgagaacaaacatctaacaattggcaggccaagaatttcagcctacatccatctgacactgaagcctacactcataacttgggcacacacactagctttccactcttcaccagagaaagttggcacattccaacagcaggtgttttcaawtaaagcatggcagataacttgccaattttaagttgcatctcatgagaatttcagctccttccccagttgtatttacttaaattaccaatgttgtagctccgtaccttgatattcaatgaaaacgaaatagtgaacaaccatgcaactcatacataccaacatgcatataagtgaagtttgaagtttataatttcctacatgcttcaaacttcagaaataggcactaaaagaaaactcatgtataaataaataaataagctcaggcaaagtatacctaacatcaagaacttcattagcaatcttgctgtaaaacagctcaggacgctcttggaagccttgtgtgtatgcgataaaattgaactgtgggagatgaaagtgaaggtacaaagtggcttggatttcctcctcaatgcctccaggaagaatttgtatgtttttttcctggacattttcagatggttaggtgcttctgtatgatgagatttgtaatgtagttaattcacgtgcatcacctgagcccctcttaaactgagtatttagataatatctaggtatcttttctccccggrtatttgaaatgaatatgacattttatactgggctatatatctttaggcaagtagaaatgaatactgattttattggctttctaggctatgtattcctcagggaagggtgattgatttttttctaattatttatatattccatcaaaataagacatagtttaaaacatcaattaataataaaaaggcttataatgaaaaatagtagccttctgccacgcctccttctatcatcagactgctccccaaaggcaactgctttcaactctatctgttgtttcttctattatttacctacatattcctgtctaagatgattacattgctattctcgtcactctctgcttgagaatttagctttcctgaatagcagctccttccttcctgatgcacctaccccacccccattctctcartatatttagataggtcctcagttcctttatcccaacccttggtgccagatatgtttcagaattcagaagaaggactttggaaagttaatatcacctaccatgcattacttaattctccccagtgggatctgaggcaacactctgtaatgaaagacattatattgctgcaacaaaacataagaatattgatacaaagtggaataaataaagactacaaataaactgtcctgtcagttcaggtcaggttttgccatgaaatgatgctgctgcaaacttataaaaacctgttgcttttcagatctcagaatttagcataaagaaatataggcctagatcattatttggttaaattaagaatcagcgtttccagtgttatgatgtaatgtaactattgttgaantctgagtcagttggtatagtagatgctctatgcttatgtatgttttctcatatagtcttttgtttttcctggagttaattgtcttggtttctttcattagcttagcttttatatatttgtggctaaatgtttctacgctccagtagatctgacagatgccaatcaatatgtgttcctctgttgctcccctctattcagtagtcctctggccttccctagcaacatgaactgagtgttctccagccccatctcatgactgtcatacattgactttctatcatcatccttttgtcttcctctttgttggtttacgacatcatttcggcaaaggatattctctaccagcttctgcagaaaaggagcttgagaagttactttttatcgagcccttgtattattatttggtcaagaatataacttaaaaacaatttttactcaatatttttaaagcttggtgttttggtttttgtgttttgtttctgtctgcaaatcttgctattgagaattccaatgccattctgacwcctgctcctttagagtaacaaagttttcccctctagatgcttttagtatcttctctttatttctagtgttctaatgagaatcttttttcagttcttgtgctggaaattcagtgaacatgtttaatcaggagtctgattttcttctgctctcagaattttcaaaatattttacatttgattttctcccctccattttatctgacattcttagaattcctattaggttgaggctcataacatcatcctctaaatcttcccaagtttacacaagcagagatacatattacttctctgaggttatttaatatccttctatcatctcgaaattgaaaaaccactaagcaatcattattgttttgataccaatgcctgagatttagatggggacatattaatgaggttatgatcatgctttgcccctgaccacttctgaaaataccccaagtaaaataatctgttttaacagatatggaaagccacatagtttcaggatggggcactgactatcagatgagattccactccctggattttgctccgctatttgttagctctgtgatcgtgaccaagtaatgtaaatttctctgttttcttgtttataaaatgcacataataatagaacccactttatcttagtatgagaattacataaattaatgcatgggaagcccttggaaaagtacatgacagggttatcataactgagaaattttagctattattgttgtttttatgacaacatctctggtgtcttaagtcagccttatttctgaaatatagttaatagttcctctttctttcatgtgcaatttaataaatggctataaaaagattttccctaaaattgcaagagtaacaatgctgatcatcaggtctgcctactcagaaaggcccgacttcaggcatgccaatctaggtgctcatttgcccactgaagaatctacctttcctgtggtgattgtggatgccaagaaataagcacaaatgtgtatttcccagcataaagattggtgagcatccataaaaacataaatcccaacagcacctaagaagacaggtggtcgatctgattctacatggacaaagtctgagaatgagaataataatgtgatggaaggatgggattgtgattatttttaaagctaaattattgttacaataaataagagattaaataaataaataaacatatccagaattcataggacatacagaaaggaaaaaaaaagccagtagctgagaaggcaactgccaggttaaacggcttgcctaagtctctacaagcttttatcattgtattgctttctgacttgctttgatattcttttctatagcccctctactcttctgcctaattttttatacttgcattgagacaaaattatattttatgctgtcatgtcataactgaagcaaaagaatggaattgctctcaggtggcaggtgagtatagccttcaatcagaaagcaatagaaactgacttctgggtctgttgtgttttgctcattaggaatgatgttcccgacattcagcgacatccacttggcccctttttctgatgaacagctctacgtggaacacttctccagagccaatttttggtaatgttcttttctcctcccttcctttcccttcaaagtaaaccagagtttttaaaactattgctaattggggtcatatgcctcttgtttggtggggagaggggaggcggcggcagtgaggcacctatcccgtacactgtagwatgtttagcagtatccctggtctctacctactagatatcatcttccccccagagttatgacaaccacaaacgctctccagacattgccaaatgtccccttgcaggtcaaaatcacccccagttgagaccactactcataaatcagagacaggtgaatcaaggagccgttcatgcaacatcaaacatccggaaagctatcctgctgctaaaacaatatcctcccctgcctgctgttkctctcttcccatttttcaccatccacttctttgactcagggcaatggcttctgttaggacttgaccttgtcagagaacatatcaatcagtacacctgataaatgagttgatcaaaccctttttgagttttaattggcggttggcttttacacccacctcacccgtctgagattgaatttctttatgtgtagaatgggaactgatacaaaagctcctgccggttttaaaccaccattgtttctgggattcctttctgagaactggtttttacaagaagaaggaaggaacgagaatgggagggagaaagagagcagatctcatccttgttggaatgttacatgtgtgggagcacaggcatggcctgcaggggggtcaggatcctcaaatttaaggtttgactttggtctgaggtatacagggccttataatacaaagaggtccaaagttgatttctgggtttttctctttgtaatcctagagaagggacagcaaataggaggtactttggtttcctgggctactaaactctttgaggagtggggtcaaatggctgatttttctttccattttttttttggcaaagtagactttcctagcacagattcagggcattttgtggttttgttgaatctacaattctgagattctaagccacaggctttcccgtgggggtgaatggcttcttggtgtatatatgtgtcagttggggcagggggacggtgggggagcttttaccttaataatcattgttctgtgagattatgctgaccctaaatgattacatttgaattatgacctcctgaggaaatgcagagatgaaagggttacgaattttaagtagcagaatagaccagaccaacaaactagwggtttgttgtccaggcagtccttgygtgaccttccaaccataccatctgctgccatcttactaacttgaggatattaatgatcacagtggtttggctcagatttccaccacgtaccaacatgctgctatttattgcatctaaaaatgaaaaacagaaacaaaaacgaaaacataatcttctctagatgtcgctttcccagtcagccatggccaattctctaagcccctttcagcaaaattcctcaaaagagttgtctatactcagtgtccaaytccccccttctgtttctcactggagccatttctccaaaaccactcttttcgaggtcaccagtgccctgacctccacattgctaattccagtgatcaactgtcacttctcaacttatttaacttaccggcatcatttgaaacactctttttgccccatgatcttttgatttttctcctcccttgctggaactttctcaaccagctatcccttcgctgttacttgtctccataagaccctgatgttggagtgccccaagacgcagtgtttggatcttttctctgtgcaggctcacttggtgagctcacccattctcataactacaaataccatccatagactaatggttcccaagtgtccctctccagtgcagacgtatcctccaaactttgtattttcctagccaattgcctcctggatgtttccccccttgcagaaatttactgtgtgcaaaattcaacttctgatctcccaatgtctacccaaaacctactgtactcacagtttttctgtctcagttgataacaactttatcctctccatcattcaagccaagaattttgaaggcctctctttctttatctcctgaatccaaaccgtcaagtaattatattggttctattttcaaaaygtatccagaatcacaccaatttttattatattctctgtttcctcgttttctcaacaccatcrtctctcatctagattactgcaatagcttcttacctgtctcttctcaacagagccaaagcctcgcaggagcttcttcatagtctggctcctaggtactctctagtctcatttcctactaccatgttcatttggctcctgctgcacaggcctgtgtgctgatcctcagacacatcaggcatgctcctaagttagggccttcgcatttgcagttttttttgttttttttttttactttgaatactttttcctcaatgttcacatggtcaattcttttaactccatgaagtctttgtcaaatgccaccttctcaatgaratctaccctgaccatcctattttaaattgtacccataccatgcccaacccttctttttcaattctgtgtttttcctcgaacacttacagcatcctaaaagatatataaccccttcctattattatctatggtctgtatccctcttgataaaatgtaagcactgcaaggtcagcagtgctgtcagtttccactgatgtatcccaagcacccagaacagtgcctgccacagggtaggctctcagtaaatgtttctgaatgaataaaaacttcagtatgcccaaacatgcatgaaaataattattaagattgtaggtgatatatttccggtttttctctcctttctttacaaaaacagaatcataagtaccattttatagcttggttttgttttgttttgtttttttactttcacaatactttgttgacatgttctcatatcatttacatacttttggctgaagagtattttgttactcataatttattaactcaagtttcaatgttgaatattaaattatttgaattgctattttagtcctatagattctataacaaaccacagcaaggtttcaatattctgtaagaatatagaatcctatagaattctatatcctaaattctataagacacaacactaaagtgaacctcctttcatataaattttggtgtacattctgattatttccgtatgataaattgctaaaagcagaattactggaccaaaaaatgtgaagaagcaacttataaaaaattattcttatatattgccaaattgccctctagaaaagttttaccaattaacacttccaccagtggtatttgggaatgtctgctaactcttgcccatacgggatatgctttttaaaatgccaatttgatttgcaaaaaaaatggtggccagtttatttttaatctgtatttctttgatagctggtgcatttgaacgattatttttagtcaacaaacagaaaaatattttaaaaaatatatagttatcaaaattcacagcctttgctttccttctaattcctctccctttgtgaggtttctgcattagatgactggcatttgagtatcttgctgctttgatccaggaaacaggtggtgaatgcttgcgtgatttctgtcagaagaagcaaagaagtggatatgtacgctgggagcggggtgaggagtggtgcgaaaaataagtctgggtgagatctctcagctgagagattaaggagcaaccaactggctaaaccagatcatcagatgcagtcagttttcagtcctcacctgattttcctattatttgcacttgacacagttgactctctttgctccgcttctcaagcctgaacctggtttttctcctacctttctggctcctacttctcagtctcctttgctgattcttcctcatggcccaaatctttaacattggagtgactccaggtttctttcttacatgtcttcccctttctgtcaacactcactgtcttacttgatctcattctgtctcttggctataaataccatctttctgtctacaactcacatagttagaactccagcccagacctctgcccagaaccacagacttggatgtccaactggctgttgacaactccacttggatgtctattgggcatctcaaaattaacatgcttaaatgcaagctactgatcctcaccatctccccactgcccacctttgcaaaacaaaacacccctgtgtctactacagtcttggcaatagccttctaacttaaatcctctttttaaacaacaaccacgctcttgatgaaacataattcagattatattatttcactgtgtaaagtcttctagtggcttccctgtttctgcatagtgaaagccaaagttctcataatggttgggaagaccacacatgatctagttcctaccttgctacccctctgactctgtctcctactacttcctctctcactctgtctcccctctggcctcaatggctggcctccttgctttccctggaacaaatcaggcatgctcctgcctccctgacattcgctctgcccaagacacagacaatccggtgacttttctcacctcctgcaggtctttgctcacatgccaccgtcccagagaaaccttctattaattacaaactgcagtctctttcctcctgcaagcctgtaccacacttctcaattcatttttctttataccacgtatcaccatataccatattatatgtttttacttatttattgtctatctcccccatgagactacaagttccctaagtgtggctgctycatttacttctgtagccccatcatccaacctggttaacagtagttgctgcagacatttttgatgattagaagacaaatgcattgatttgtaaaaattctgtctatattaaggacattaagactgycgtattttcttcagaatttccagcttgctttgtgattttatttgtgatagttttgaccacaaaacaacttaaactttttatgtagctggatctaccagtaattgtattttcttgtttctttattttcctttgtaattttttagctccctgtccccctccccatgaattgggtattaacttccttttttaaagtttttacttttccatgtaacattttttaaaatttgcatttaactctgaaattcatcttagtacacagtctgcaataactatataactttatcctttccaaataaccaattatgaggctctctcttagtagaccaaattattacattctgatgctagtagcagtcacctataaaaatattaattatcttttatatgatgattccttgggccccattaatcaaggtgatgagaattatctcctgagagtaaggcccatcataaagaatcatcattcccaaatgtaattcttcttaatatgttgggtacctctggcattactgaaaataattggctcaggggttttacmccaaagcctgtagatacaattttaaatggattctcatatgaagaaaaatatatacataggatcaattaagaggtgtgccaaatattgtcaagaagcttgagactaaactagactgtttttttacatttattacagttatagaacataaaagcataaacaaaataggtagtagttaaaagccagatgattcagactctagatccagatggaactatgtttaaatcttggttctgtcaattaccaactgcaaagccttagccaagttaatttaatctccctgagattaatttcaatccataaattgaagaagataattttacctacctggagatgatgaaatttcagggatgggtcctctgcttgtacttttctaccataaaagccctttcttcatgggccaggttacccatggtgtagggttcttccagatgctgaatatrtctttcccaattacatattcagggaccaggaaaataatcatagggtttgcatgaaacaagtggatacactgtgagatggacttggtccaaaactccacttattacctatcctccacagccttcactaaccagagacattctagattttttttgtatcaatatcagctcaaacttctcatctaacatttctcaaaaaatcgaggtatccttccttcaccacggttgctttgtcatagaaaccctggtctctctggagaaggagtggggaatgttttctgtgtgtgcttgtggtggcagtgagggtccttcctcaagaggactgggactctacttaagtctggaccacttggatctggaatctgggtgagggacttaatatttccattgtgacagctgacatcattcttctgctcatgagctagccattttttgttatacaaattgagcactatcctagctgactttccatctattttacctctctagtaacactaggatctattaacaccaaaggttcttataggtcaaggtgtccgattgctactctaccctagctttttacacagtaattatgccattattgcctaggccagataattactgctttcctgctctgacattctgaaatgtcmtccaaaatgtgttcattcagagcacaatttaatggctacatcacctaccaccatctttcatctaccaaggacaactactctaaggctctcaaagatgccactgttacctaatcagttttttccctattaccttgtaaaaggaaagtttcctgtgctcygagaaaatagtcaggttgaatgttcttaggtattccatagtcaatccatctagaatttccatgtccctgagccttctgactccttcctcaatgcagcagaagttctgaaatctccacctcattgactgcaggccatcatgatgaccaagctttaaagtgacatccagtggattattaggactggcttctggtgtcttgttagaacactgaaactatgagtgcgccatttcaatgagttgcactctctcctcacttacatcctgccctctttatggacttaaaatctaatctaatacaatatttcctagttcttagcagaaaatattatctggcttctgcagttttttaggtatgtaaattatctccttctggaatgggaattgtgtttactgctctggctgtgcttgagttattggcctgacagctatgaggaactattagcctgaaggcaatgagtgatcatgaggcagatcttgaagagaataaaatcatctttcaaggcacaggctcttggagaagttgttgcatagtctttaagcaaggctgttttcctctggcaaagsgggaaagaattctgcctctgctggcttgaaagattcaggggaattggaaagatttcaggcttctctgctttgccmaccctattatcccaaccccaggtctcagggccataccctttccctgtcggggccacaattttaatacataagacctgtcaagagtgcatatccaatctcctctgcagctcttccactattaccgttttactctcttatttggagtagggggatgggacagtttcagttccaaagatgtggcttctacttgtcaaattctatacatgattttcagcacagcaggccttggagcaccaaagagataggaatttctttatatctgctagaaagcccctctggatttcacagtgtgtcttgagttgggagttggctgctctgagattaaaactttctttttgcaaagcttgcaatgctgtcaacagaggcttgcctgctcctcaattcatggaattatcattgctccaaaatttcaagcacacagttgccataaagcccaatgtttcaccttctacctttactgcatcctaattaaccatcagcaagaccattagaaattgtgatgaaaggctcggtgcaatggctcacgcctgtaatcccagcactttgggaggccaaggtgggtggctctcaggagtttgagaccaggctggccaacgtggtgaaaccctgtctctactracaaaaattagctgggtgtggtggcagscacctctagtaccagctacttgggaggctgaggcagagagaatcacttgaacctgggagacggaggttgaagtgagccgagatggcaccactgcactccagcctgggcaacagtgtatataggtgaagcttatatactacaactttattaagaagtgtatttctagtgaaacaagaattgggagaaagaagaatgaggcagggaatgaggggagtgctggtgcaaatgtgcattataattatgagatctttggggtgttgcttcgccagccagaaacctctgtggccagtggcacctttgactgagtttagcttggttctgcctactcagcctggcaggctgcattcggctcacactaccagcctggatcccaggatgccaagggcaagccaggtgcggagtggcaaggggtgtgtgagcaagcatggggtctggtctctgcgcatagccaggcatgccaactgctgctgccggacaggcagctccaggtgccagcactggcaccggctccctgcaaggccacagctggaccaggtgcactacagtcagcttccacggctggcactggggaacacagtagtgcccagaagcttagagccttccaggaactgcagggccccaaagagagagtcacagacctggctcaaggagctcccaggtctgggatccccgaagggctgcagccctcctcttctttttgcctgcaaaatggagagcaaagggtgtgtttcagccatgtttgtatcacggctcttttagccctggatggcgagtcctgagttcttgtcctgcatacaggaagaatgaggtattcagacaagtggagggtgagcaaaacgaagaggagctttattgagcaaaagaacagctcagaggagacccacagtgggtagctcctctctgtagccagggtgtccggaagagggttaagctcttagcagagagggtagctcctctctgcagctgttcatccagttgtctctccgtcctccctttgagtctggctgaatcccaggtttttacgggactcaaaggggaggaagtgcgtgctgattggtccacaggtggctatgggcccacccaggggaaggcaccacaagttcccctcaggtcagggtgactggcggcccagccctcaggtttcaggccctccctggcttgaaggtgaggcttcaccagggacccgtccccttctgcccaggagcctgtctgcctccagccactgtccatgccttcatgccaaggggcgcctgcaggccagtgctgggctgtcctcagccrcccctaagcctccctttcatgtttgtcagagcccaaagtctagaggaggtcgaggtggcagggggctggtgtgttaacactgccgcaatcgtgtgcacacctatccagactgcaacaccgcctggactcggccccaacttagctccaagatcraagtggacaccaacagcagggagaggccaggcagcagcagcaggaacttcccagcctgctgggggcaagsggatcctcctgggcccccaagagcgcagagatgcctgggtctgcagccaccctgcagcggctgcagctgcaccctagaagctcttgctccaaattggaaggggcggggytctcgcctgtctccaggtcccaccagctccgtggagcttgcagccctggtggcgcctccttgcagcctgaggcgggggcttcatgtcctcactgggcccgggcctacgactggggcaggggtgacgttgtcacgagttctccctgcggccyggggctccccctcgtcctgcttactaaccgctgcccccttgaacagtgtgtctggttcacccactgggctgaaactctccaatgaccaggacgcgccccctgcctcagtaccgcctcgccggctgacggccatgcctggggttggggggcgtctccaggagcagatggcaggcacggggcctcaccatcaggattgtctggcttagcggtcaccttaatgtggggcaggtcctggggatacggcctcaggcggccccatacggagcctcttcctgaggcrcaggaacttggcgccatcggcgggttgggcgcagtggtcatgccactgggcaggtcctcgaagtgggtgccgctcccacttcttgccctgggcccctgaagcggggccccagttccatgtctcgggcccggcccccatgctccgcgtgcaagcgcggcaccgccctgggcccagttctgtcttggggaccctctctgcccattttctgtgcctcacctccctactctccctccagggggtggctgggcccagccctattcccggggctcccaggggtgagttctcagggcagcaggttccgggggcgctcctaggtgcaggctccaggggctgcmcacctcagagtctgtacctgaggacccgcracctactcctgtaccccactgcagccggcgtcatggcagcggctgcttcgcacaggctgccgctgccatcgttaccatgctgaccatcaggtagtattaaacgggattsctggctctctcaggaccatcttcaaaagatcaaatgaactacatccaggacagtttatacrgcagayaaacgaatttatacactggcttttatctcctcatttatcaaatacccatcctgccaacattaactagcccttctgggtcttatggcgtctcatacccaaagttaacagggatgccccagggcaggaggagagaggcacactgtgcaggcctggggtgagacattgtggcaccgtgcccatgygaggtcagaggagcccatcctttggcatagctggtgcagaacacgtggctgaggattccagagacaggtaagaaagatctgggatggcacttaaaaggtgatrtaccacctaaggcaccaaacgatattttccagttcccttgtcagagtattatgcatggatagtatgcatctatcatgcttgaccagagcagagccaattgagtgatatcagggatcccagcggtgaatggcctgtagtcaattgttttttacagaaatcggaggtctgtgcttgcaaaggatgagggaagataaatgtaggtagaatattgccataggcaatgagagctccctttttgctcctttctactctgagtccactaaataccttgttgcccatggtactactgagaaacattatttktaaagaaatccattctactgagtggacaagctgctgaattctactgtgaagktaatgaacgatttgttcctagcctaattatgcactaacctaaatttcccactaaagtttcttttgcataattagagttttaggccttctggtcattcccaaaagtatatttgaccctgatggtcactagttcatagaaatactatgtagatcaaataaaaatatttcaaattagcatacgagataaccaaatttttttcagaagccaagtaaacagcgcaaagcatcacagagaaagaacttatgtaggaatattaccataaccaaaaaatcctgtcagtattttcatgtgcccctgtccttatcccattcatatttcagtgatttcttagtctctaatcctctttcaattacctagtactcattcttgatatatcctctgtatctctgtttatatctgcagctcttgaactcatctggcttatgctcttaggataagccttgatttctgtatttatcttgtttcataacgtttgtcaaactcatggctcttttataatattctgcctctatcaagctcatgcctcttctacatatcctgacttgtgttgtcagggatatgcagtattcccatcccctggcccaattatgtgttacaaaatttagttcagtcctggtagaattaggacttcactgaaccaggcaaagctattctctcagaattatgtgtatatagtacagtacctaaagacccattaatttttttcaattaagacgtttttgttttaagtggccaaaagtcccacaaaaagtcgcttaagaaaaaagaatatttctgactaatgtatctgaaaagtctaaggacagattcagcttctcagacacaaatggatttcaaggcacttatattggattctggtctctttctatcactcagcttggctccattcttaggtagcttttccctcatggcagcaatgtgttttctagagaatccagatttatagactcatagctccatccccacttctcctttgccacagtttaaacaaaagtcataggcttgactctcacygggtcacgtgcttaaccctaagtctgtcaccaaggctagggtgataagacgctgttattggctgagactgagccgcatgtcgaaagcatagtcaagaccacctaaaccacaagaactgtgagtaagaaagagatgcctcacagaagaaaatctggtgctgttactgtaaaggcagccattcaccaggtagaacagacatgagatagccatcatagtcgccttgactgattcactcttccctccgatatggctttcacaggtccaattcttaggccaaccactataatatctagtcttagcttgacacacgtgggaatgctccacagatttctttacagaatcacagactttcccttactttttgccaaagaaccatggtctgaagtgcacctgtttcccctctcatttatacttaaaaaagcaaaaaaaaaactattacaaatacgaaaaatatctaaccatagcgtaaggaaaatacaagccacgctactttgctggtgtttaaaccagtaaaatcagasacataacgagcatgcatctttgcacagataccactttccacagtggttgatatgcctgcattctgctggggtggaaaattgtatcaaatcaaaattacagtgagggatcagctcacacctttcaggatggctattattgaaaaaaataagacaagtgttggtgagtatgtggagaaattggaaccctcgtacattgttaacaggaatgaaaaattatacagctgctgtgaaaaagtatatgtaggttattcaaaaatttaaaaataaaactaccatatgattcagcaatcccactttggggtatttatctaaaagaattgaaatcaggatctttaatagatgttagtactcctatattcattgtagcgctattcacaattgccaagatatggaaacaatctaagtgtccatcaacagatgaatggatttaaaaaatgtggtatatacatacagtagaatatattttgccttaaaaagaaggcagatgcagccgtgaaaaagaatgaggtcatgtgttttgtgggaatatggatggagctagagggtattatccttagtaaactaatgcaggaacaggaaaccaaatactgcatgttctcacttataagtgggagctaaatgatgagaactgatgaacacaaagaaggaaacgaccgacactggggtctacttgagggtggagggctgtggggagaggagcagaaaagataactattggctactgcacttaattcacaagtgatcaaataatctggacaacaaacacgacttgagtctacctatgtaacgaacattcatatgtacctccaaacctaaaatgaaaattaaaaaatacaatcatacaggaagcattgtcaaatattaaaaacagaaggcagaacgtgacaacatgtctgcaatgtgtgataatatagatgaaccttgaggacgttatgctaaatgaaataagccagtcgcagaaagacaactactgcttgatcccatgtgtatgaggtatttaaaatagtcaagtttatagactcaaagagtggaatggtgattaccagcagctgggggaaacatggagcattactattcaatgagcataaagttttagtcaagcaagataaataagtagagctctgctgtacaacattgtatctatagtcaaaaataatgtaccctaactcaaagatttggtaagagagtagattttataagtgtttttgctacaattaacacataaaataaccacatagaatttaattttaaaagaaatttgtcaaaaacaagcaagcctcaagtcctgctgtatataaggaacatataagaaatcaaagattcaatttattcctagacacacacccttctcctgctagcaactaccaacagtactgttatgccacattctcaacaycctttgtggctatagcgacatttttgaatccttgcttttgtttcctcgttcctggagttacatatgtctcccatcaggttagtgtccccttggctgttaattctggtagagcacagcacattaagacacaaaagttgcttaactgtcaaacagcacaacctggattccgcacccccaacaccatcccacttctctctstctctctctcatttatctttctaccttccttcttctcttttttcaaaggaagaaaacttcttaatggggatgagtagcattttttttgtcagaataggataaagacaaaagattcttcttaaagtgtccgatttatatgaactgtattttcaggcctttccagatgttgcatgcattatacttgtagtgttggtaaatgtgaaggatttcccacgtgaagaatggtaggaaacgggaatatgagctcaggagaaaaaacacccagactctttctcttatgtgctcataaagacaccctaaattaacttagaaaatagaagccacagctgatgaaaacaatggaaactatccctagctccccattcaacagattagttgcctgatcaatctccccaaccccctgacacacacaatgtatctcaggagacccagagagatgccagattttatctgctttaattattttatgatgcattgcagaaggatatttaaaatttctaagaattagaaatatgaaatatggtccagccagaaattttttaaaaacccaggcggtgggctctttgcccacagctttccatctgccccagaaatggtgcccatctgcaccacactgtttgtggctgctgggttttaattggtactgaacatgcaaagcaaatggcacagacgcaccatcctctttgagagctgaggtggttttcagtggatagagagaagttttcaactcagtcatgccacgtggaggactatctttgcccttggggttttctttatggccaagaatcttttgggccaagaatctacttggccaagaatctagaacaactaacttagtacccaaccctggttgcactttagaatcacctgtttagctgtggaaataaacaggcactggggttatccctagatcaaatgcatcacaattcagaggcatcagccctttttaaaaattttccaataaattctaaaaaccatagttttctcagctagtgaaaaattttctttcggtttctccctccttttccccctccctctcctcccttcattctttccttcatttctccttttctccctccctccttcaaatgtaagtttggtgcaaaagtaatggcaaaaactgcaactccttttgcattaacctaataataggctgttgtgacatgattatttccccaaaacactcccattctcattctaactgtttaaaaaaaaaagccatttaaatctacagtgttctatttccaaacattttctaggattatagaggcttgttttcaatatatgtattaataaaatgatgtgaagcactatttggctttaccagtgagatatcttggctctggcccttggtagaagcagaagattaggaattgagtgatgaagctgaagaaacatggacaaatgacttttcccatttcctcttcgttgttgttgatgcctgcacccacatatagggccctttagagtaccaagccctccagttccctcactgattaatttattcattaaataaataaatgtagacagatctttttcaccctaacaatattcctggccccatgctaagtgttaagtatacactgatgaataagaaaattcttctgcttttaagtgaatgaagcatagatacttaatcgtaacacaaggttttgcattcttaaatggacatatttgagcacagtctttttttattattattatactttaagttctgaggtacatgtgcagaacatgcaggtttgttacataggtatacatgtgccatggtgatttgctgcacccatcaacccccatcatctacattagatatttctcctaatgctatccctccccctacctcccactccctgacaggctcctgtgtgtgatgttctcctccctgtgtccatgtgttctcattgtccagctcgcacttatgagaacatgcggtgttttgttttctgttcttgtgttagtttgctgagaatgatggtttccagcttcatccatgtccctgcaaaggacatgaattcatccttttttatggatgcatagtattccatggtgtatatgtgtcacattttctttatctagtctatcattgatgggcatttgggtcagttccaagtctttgctrttgtgaacagtgccacaataaacatgcatgtgcacgtgtctttagagtagaatggtttataatcttttgggtatatacccrgtaatgggattgctgggtcaaatggtatttstagttctagatccttgaggaatcacaatactgtcttccacaatgtttgaaccaatttacactcccaccaatagtgtaaaagcatttctstttctccacatcctctccatcatctgttgtttcctgactttttaatgatcaccattctaactggcatgagatagtatctcattgtgttattgatttgcatttctctagtgaccagtgatgatgagctttttttcatatgtttgttggctgcataaatgtcttctttkgagaagtgtctgttcagatccttcacccactttttgatggggttgttttttttttcttgtaaatttatttaagttctttgtagattctgaatattagccctttgtcagatggatagattgcaaaaattttcttccattctgtaggtagcctgttcactctgatgatagtttcatttgctgtgcagaagctctttagtttaattagatcccatttgtcaattttgacttttgttgcaattgcttttggtgttttagtcatgaagtctttgcccatgcttatgtcctgaatggtattgcctaggttttcttctaggattgttatggttttaggtcttatgtttaagtctttaatccatcttgagttaattttcacgtaaggtgtaaggaagggatccagtttcagctttatgcatatggctagccagttttctcaacatttattaaatagggaatcctttccccattgcttgtttttgtcaggtttgtcaaagatcagatagttgtagacgtgtgatgttatttctgaggcctctgttctgttccattggtctatatgtctgttttggtgccagtaccatgctgttttggttactgtagccttgtagtatagtttgaagtcaggtaacatgatgtccccagctttgttctttttgcttatgattgtcttggctatgygggctcctttttggttccatatgaaatttaaagtagtttttttccagttctgtgaagaaagtcaatggtagtttgatggggatagcactgagtctataaattacttttggcaccatggccattttcacgatattgacttttcctatccgtgagcatggaatgtttttccatttgtttgtgtcctctcttatctccttgagcagaggtttgttgttctccttgaagaggtccttcacatcccttataagttgtattcctaggtattttattctctttgtagcaattatgaatgggagtttgacaaaattcaacagcccttcatgctaaaaactcttaataaactttgtattggtggaacgtatctcaaaatattaagagagatttatgacaaacccacagccaatgccataccgaatgggccattccctttgaaaactggcacaagacaagaatgccctttctcaccactcctattcaacatagtattggaagttctggccagggcaatcaggcaagagaaagaaataaagagtattcaattaggaaaagaggacgtcaaattgtctctttttgcagatgacatgattgtatatttagaaaaccccatcgtttcagcccaaagtctccttaagctgataagcaacttcagcaaagtctcaggaacaaaatcaatgtgcaaaaatcacaagcattcctgtacatgaataacagacaaagagtgagccgagtcttaaagactaaataggaattaacagggcaaaaaacgaaaagaggcattccgggtagaggggaaaacaaccaaaagctcagaggtgagaaatggtacaatccctgtaagaatgtgtgagtgttcaatgcggctcaagtttggattgcatgttgaggactggctgctgactgataacaccaggctgctctcctcactgctgcctgtgtgcgcatttgaggctttgacttttgatttagagcctcactttgaatgatcctttcaacaaaatctaactgcaccccaattttttatgtttattccatgtttctgtgttttgtttttcttcttttttccctataggctggtgggtattgggtttgggtgggtgaggactgatgaattgagttcccatttgattcacagactatatagcacatatacaacacacccttattagggaatcttaatgagggatacaggctttcaacctctagtgataaggttgccaagcctttctggagtatgggcctgggaatctgaattcttaacagtttcccccaagtaaacccttagcacagtcagattggacagcacttccctagtgcccagtgctgatgtgagaaggttacattcagggcatactagctaacacttatctagtagtaacaaaatgccaggaatcattcaaattgctttttaaaaattaactcacttaaccctcataagaaccctgtaaggcaagcttataactatgtccattttagagataaggaaactggggcacagagttcaaatgacttgtctgaatcacacggctagtcagtggcagaactagaatgatttcatagcctagattgcttttctaaattttcaaggccattagccaagctgatacgaaatacctgctatgctccaggcacagtctatattgcagtggatacataaaggtattaggttggtgcaaaagcaattgcggtttttgctattacttttaatggcaaaaaccacaatcacttttgcaacagcctaataaaacagagccagtgtgtgctggtaaacacgttatatctggctctccgggtggggggaggggtggagacatgatttgtaatgtttgtcagtttctatggttcagatgtcactgaccatagaattgggaagaaatgtgcacagtgcgctctgaaaagctgttatgagctggctccagatcaccacctgatacatcctctgctcacttgtgacttgctgcctggtgtcaggtatcacaacaaatgccatcatgaaggcaccagccagtggctagggaagaacagagaaggaaaatctattttctcaaacagcaggagggtcaagcggctttggagatctaaagtcgtgctcttggttgggawagtgggaggaccaaggaaactgcatttcagcacttggacagcacagmacagcacagagttggggggccatctgtcaggggagatcaagggtaggagctcaaaggccttcctgccagcaaatatcattcttgataatctccttgcaagtttatttatttatttacttatttagagacaaggtctcactctgtcacccrtgctggagtgcagtggcatgatcttggctcactacaacctctgcytcccaggttcaagcaattctcctgcctcagcctcccaagtagctgggactatargtgcctgccaccacgsatggctaatttttgtaattttagtagagatgaggtttcagcatgttgcctaggctgttctcgaactcctgagctcaagtgwtcctcccgccacaacctcccaaagtgctgggattacaggggtgagcccaatttatttcaactcaacttcatttccccttctttctctccccaccccaggtcaaatacaggtctgcaaattttctagagagaatttcctgccacaccctatagaccagctgcccttcacatgtgcaaacattctccctagggctaacgcagagcacccatgaggcagcctcgaagcacataacagctatggggggcctggggactcagatgacagacaagatgcatggtgattttttgtgctattttaggtaccagcaatgtttctatggggtcaatctgtccagtctccagggtgctacagtggatgaatacttcaggcagccaatagtagtaagtgtgctctctttgcaggctttctcccatgtttatatattgattcattcattcactcgctcattcactggtatgcactgtgctgccagcttctgtgctaagccatcacagaataggagaaagagttccctagagcactatgttttcaagtcttccagctctaatctcctccatcaattaagaaaatcatcagacaatgatactattgaaagcaagggaatttttaaactacctttcagtaagtaacttctagttccccactgccctgacccaccccatacacaactcagcccttacatttgttcagtaattcacatcctcccattcattctcatggcccaaaacataatagaagagcaagcattatataacagcttagaacaggagctttgccgttaatcagatttaaatttcagccatggccccattttgctgtataaccttggaaaactttaagtttgcatcatctgaaattctttcagttgtaagtgggagaaaaatcaaattggcttaagctaaaattgaatgactgtctttcaaaaattacaaagcctggagacagagtttgcttctggcacctgttgcaggggctccaaaaatgtcaccaggacatgatttttctatccttgtcacttatctccacttcctctgatttaactcttttcctagacaggctttcccttcatggtagcaagatggctacagaaactccagcctctgattcttacgactgtaaattccacaggaaagcctgccttttcctaataacttaagcaaagagctccagatttagtttaggtagttcagtgaggttatcbtaccttggattatgtgctcatctacggatcaatcactgtcttcaggggaaaagtagtgctctgacttgccaatctggggtcatatgccacacctgttactgagggtagactaagttcacatggaactttttggacagaatgtggagaagagatgaatccgcactgctaaacaaattytggatagtcagaaaacacacacacacacacacacacacacacacacaccccaaatgcctgctccagagattttttatagagtaaatgatatatcctagtaaagcccttagcacttagtaaagcacgaaaagcactcagtgcttaacatagtaggtactcataaacgtttttattgttaacagtattctcattaagctcatgctttctaaatcccaactactgatgacttaaaattacaggagaaaagctaaacttcaaatttccttgagctcagtttatcttggcagaaaggtaacatctttgatttttccccctaaggacacatttgatgttaggattttgatggctggaacagtcaaatacacagyaaactttatggatgcagaagaggaagatctacacaggtttgtgcaaatcagtgttgctcttgatgtttaaaatcttccctctacatctcccacccacaaaacttcattgcagacttttgctactcacacaggggagagattttagatattrgtcacatatgggaatgatgtgtcaatattagcttcatttattgctaaataaagataatgatgtctccttcctaggatattatccccattttatagatgacacatacgaggcaaagtggaatgatatgttgcctaaagtcacagaattaaaaagtatattagaactaggatttaaacctttcagaaggctccaaagtctgtgcttttagccactctgctttgtgcctctaaagtaacagcatatatgtgaatgcacttaggccagtgaatgtatgaaggacaagcaaagagctacaacttgttaagtactttctacttactaggtactgtgctaagtgttttagaggcaccagctgatttctaaagagggcactcaataaatgttcatctgtgtcctcttcccctccattttaaaagactctgaaatgaggattcctaccttgacttggctccatttatttagatagtggtatgaatccatttggggtgatttttcactcatattttgtctttttctcccttagaagattaatagtcatatttgttttctggacaagaaagttaagacttagccagatggttgtttgcctggagctactgaagaagcaagggtgagaattcagaaggtgcatctggctaatgaaaaaatcatccatcttgatatcatgatgcacaaagggtatcctggatgttaggataggctagaacatgctgcagaaacaaaaagaaacctcagcggcttctaataacttaggtgtcttgttttctacacaatgtatccatcatgcaccagctttatctctaccatgcattacacacactagtaattgggccagtgcagcagcttctatctgaaatgatgctggtcactgaggagaaagaatgagtatgtcaaagtatgcaaggacaatgaaagcttctgcctggaaacggcacaagtcacttcgttcacatttgatcagttgaagcaaatcatgtggcagtacctgagctcaagtggatggaaaactgcaatccttccatatgctcagagcaagagaaatggcatttgcaaacgactttaataactatcaaagatccagacaaaatcgactttgrttagctttatttattgctctgaactacctcctgaatcctagggaatattttgaaaattatgtctatgtgggttttccaccgatgtcrttcattcatttgtgcatcaattcagcaaatgtttattgagatcctactatgtgccaggtactgtggtggtgctagcacatgtgtggaaagtaatttttaaagtctctattcttcaggagctcatagtttatctagggagatgcaaaacatgaaaagaaataataacagtcaagaccaataaattcactgtgccaagtacaatggaaaactctagaaatattttattttcagcagagtgaaggaagttaagtctttggggacaccatgaatacagataacatacaaccttctttgaaaacttctaaagcacttcagaaaatccaactccttggaatgatacagccccagcaatgagccaataatatcacctcttaattatgaatcactctaaagttggcaaagaactctatatacatgtttgcaaagaactcttatatacatgtttttccatttaacatacagaagaaycttatgaggaaagtaggagagagattttgtcacccttcaacaaatgcagataccaagtttcagggaatttaagtgccttccaaggttccacagctaaaataggtccagcatctagattgcattgtgtatttcccaatattctttctattcctacttattctgcatttggcataaaccatagccacttctgcatgactcttgttatagcctactggaagttaaattgcctcccgcaaaaagaaattaactatgaggatggccttctgagctcgatgtttcctttgtgctccagtccatttttagaggcctgaacaacctttccctttgagcagctttgtaggggaactgtccctgcccatgctttggcttattgaaggatggctgccctctgtgtcctgagtcatgctcctcttctctagtcaaacccagctccagatgttacattcaccctatgcagttccaggtcattgcagcagagtagcgtggttcttgaaggattttgtcaagaagtaagcttctcaaatgtgcagcatcacccaagcattaatcacacactgagagaacttggctgccaaggcaaaagtgcccaagagagaaagaaaatattcctactgacctcacaaatgtatctagtacatctgccaacaacaacaatagtttcgagtctttcatcttttttatttccttacagagtagaaattccctttgtgtttcagatggcagtctgggctcatccatggcctggcgttctggtttgatgtggcatttgttggatctctgtatgtataccccccaccaacattttctcagtctgctctaccccatgctatctactatttgtaatcacaattttaaagtgtttaataattgattttaatgacactaattcttgtttctccaattttcaaggaaataaacacagatgttaatgttaattttagattttaggaaaaagtgaaaatgagatgcttttctgtstgtcatatcaactctaactaaactacgcaaagcctcttaagccaaatgaattgagctttggaggagtgagagagggtttgtgctttttgaaccttcttggtctttaatagaatcgatggggtggtaccccaagcctttgcttttgtttctgacacacctggttatactatctcttgtatctgggtgatgcctggaattatacttttcctgattttggtttatactctggagtcctgtgacgatcaggcaggtgtgtattactaatgctagttgcaacattaggaaaattcgctatctgtgcaccttcctactgcacaggtttgaaagttgcagggaaaagaggggaaagactacctacacgttggctgtcactgtgtggtgttcctcrtgtgggctgcaccactccatggccaccaaatctctgttctcttcctgactgccctactctcttcccaggctttctagtatgttccaactagcaaagagatctggtctgggtcacatgcccaagtggaggaaaatgtttaccgtgtaactctcctccattccttgtgagaatgcccaggcttatcattgtacctgcttagaaagaaatgcccatggggctgtaatacagcttgggggtctgggggaagactcaagagaggggacccctggaaaccttgtcagagctgacaatctgagaaaaataaaatgaggcacaaatcatcttgactccgtatgaacatatttgttcaaagaatacatacatttgctcctctctgtaataacccatgtaaatgaatttggtcctgcaagggtgagagagacaagcttgaagtggcctacctcaagggggaagtgtctttgaagttaaatgctttatctttttaaaaaatatatatatagaaaatttgtgggccagcttgggcaacgtagcaagaccctatctcacaaaaaattttttaaaaattagctgggtgtggtggtgaatgcctgtagtcccagctacgcgggaggctgaggtgggagaatcacttgatcccctgggcaacagaaaaacaggcttcaaaacagggtttctaccctgtttcaaaaaaaaagaagaaggggaaggaagatttgcattttattctatattatatctcagtatattttgatataaaggtcatttatattcttaggcagctaaattacataaaatttttccccaaatcttctagtcaaaattaaccctttaggaattttccccatgcttaatgtgccccttgctcctctccagccagcaaccactgcacaaccactgaacacgtgaccttggtgtagaagcacagcaagactttctcactttttcatatgaactgaggaaactcaatttaacactcaggcagacacacacaggatgtctgggctggaagcatggtagaggtcatctgctctagtagtttttcttgcttccagaagccccttcaagacccctgaacaggttggcaggagtcagtaagagaccagactctagacatctccctttgctacactagtcaagcaaatcagcttctgatttaaccttgttacttattgggcctctaatgagctttgattcagaaatacaggttgccatggtggccaagtctatgagtttgaagcatgactctccagttgtcctgtgtgatgtcgggcaagttgtttaacctctctgggcatacttcataggacgattgtatagatttactaaaattatatacataaactcttaattcagtactcaacatgtggtacttgctccataattttattttatttttttgagatggagtcttgctctgtcgcccaggctggagtgcagtggtgtaatcttagtcactgcaacttctgcctcctgggttcaagctattctcctgcttcagcctcccaagtagcggggactacaggggcctgccaccatgcccatctaatttttgtatttttagtagagatggggtttcaccgtattggccaggctggtctcgatctcctgaccttgtgattcgcccaccttggcttcccaaagtgctgggattatacagccgtgagccaccgcgcccaacctgctccataaattgagctatccttctcatcaaagggctctatgagtcaaaagaacaaaaaccactatcaaccttagtttccaatccaacccattaatgtgggtctggcatgtgattggcttttatctcttttcttgccctatagggtaactgtttggctgtcaacagccccagctgagcctctgactcattggtaccaggtgcagtgcctcctgcagactmctctctttgccaagraagggaagacactgtcagggaaagtgctgtttgtagccaataaatggtaagcaggaaagtacagatgtgctttcacctctgtttccwgggcattgaggtctgggagcaggaggaagctggcaggcccctaagactccagcacctacaaatggacagcaggctttccagaggcctgcctgagcactgtgtgtggtaacgaagaggagcttcagataacttaagggcagtgttctccagctgaccatggaggaaggaaggaaggaaatccagcagctcacaggagcacttgccaaggcttgaatgatcaggtgtttaaaccttgtgtcagcttcctggactgacttacatcggtctggccacatacccccaaatttagtacaataaaattgatctgtatacaggggacaaaagcattccagaggcagtatatagtatcaggaaggactctgtggtattggatttcatgagttatctgcaagatatacctcgatttatctctcattttttcagtatcctatttcaccttgttggaactctgctgtgtgaattagaggatagaagagtagagaaggggttctacgaccttcagggtatcaagggtactcagaggtcatcttattcagctttctttcctcactacctcacactcttccttctattttatcttttgcagatgtaatagtcaaatttttatttcaaaactattaagcagaaaaaggcctgtgcttgaatactcctgtgacaaagagctcaccacctcacaaattgaccctttcatttttaaagtctttatttctttaattacaaaaacctaacatactcccatataattcaaaactacaaaagtgtatagagtccttttccactctcacacctcaccccacacctctgatgtgacagtttgatttgtatactttcaggtgatttttccatgatgtgccaacaaataacatcatggtggggcttgtttgtacaagttatactacaagtccgcaacttaatttttacttagtaataagtcctgaatctgcacagatagatcttttttgttctttttaatacacgcagaatagtccagagcatgaatatactataatgttttttttttaaaaaaatctctgattgactgattcaggttgctttcaattattttggcattgcaaaaaattctgcagtgaacatctcggaacacatagtgtgcacggtgacatgagtgttttcaaatgagatgcctagaaatggaaatgctgaatcacagagtatgtgcatgttacgctctggtagatactacttttctcaatggttgcaccaatttccccttgcgccagcaataaataaacatgttcatttctctacatcttttcctaaacttcatgttatccatctctatgatttgtgtcagtctgatagacccaaaaatatttttttacagtagaatcttgttgtttggtttgtatttaatttttggtaaggttaagtcgctcttcatatggtccttggctattaatgtctcccattttcaacatctccaattattaaaaaattatccttgctgttgattctatatcttactttctataaattctacttattgatcttggttgtgtttctgaactagaacaaggtaggttggctctaacctctaaatggcaattgttcaaatatttggagagttttaccaaatgtccttctaggctacctgtctttaagctaacatcctcaactccttcctcctataaaagtgattttgaaatagtttgaaattctaagttctcccctctgaaataccctggttatcaatgtccccttttaaaatgtttcttcagaactaattacaggacaacagcatatgtattctgataaatgttgggatcagagcaatagtaactatttctgttttgaatcatagtaatatatttttaagtttgggatccattttacttgagtgtatagtcaattaaacacaagaagtatatttttgcatgattgacttttaaatcacatttctcccttttcctagcatgcagcaggtctttttcaacttcggtacaggtttttgtatttattccactcattcaattatctactgtttttggatctttaccagagccagtgcattatttcttttaattttttttagcatattagtgattcctaccattttatcttttgtagatttaataggcaaatttttatttaaaaaatattaagtagaaaaaggccaaggatggaatcttccttcaaagtttgctatccagctttcttcacaccttttggctttggtcatggaagtagctcaaaatccactccctgtgttcattcccagcccacatttctccatctaggccagaacgaaatatgatatgacctttttggaatatgatatctaaataagcttaatttctgactttactctcatagcccagtccaataactctgccaatagaaaggaaatgaaactaattggacatagcttttattttagtgaaactgagctagatctctaattaccatgactttctatctccttaacctcatttgtgcccctccccttcccccatcatgtagcctctgttattatttcttgcatatcctctcagagtttcattttagacataaaattacaaaacactgtaaaggcaagaatctactttcttatttatttccccctcactgcttttatacctaaatagtaacattctgtatctgttttctatgtcctttttcacttaacaatacatctcaaagacatttccatatctgcacatcaagatccttctggttctcttccgtctgcatcatgatcttccttcatggaagttattgcttcctccatagaggtgaagccttcattgtgttttaaaaattgtgacaaaatatttgctcaccttttttacatgtgccacggcatcattttactgatacatgtttttcatgtgtttgtaaattttactactttttttctacttttgttcttgatcacctctctctcacttgttttgatgttcttgtcgttcatcaaattataggactttcctgggcagctgtttacaggaggaagtttctgtggcagaagaagatgtgacagttttcatgctctcggtttttctcaactcaaaccttttctccttctaggttgccacagaatcacactgcttcctgcaagaatggcccctcttgtattgttgaggtagttccaccatgctccagttccaggagcatttctgcccaaagttctgctcaccacaattcctgcacaagatgttacaaacaaggaatacaccttttgcatttcagaaaaatgcttctcatcttcaggtgctaagatgtgctacccctgggctcttttgtccctctttgcacttcttttgtaccttttcccacatgactaataaccagtcttgactgcttttacaacccttacacatatgtcaaaggctgcagattatctcgttctcctagtgttacagaaaatgaggtttgccatctgcagaatatttcgattctccttgtttttggatagcttccagaaggaaaagtggaaaatgctgacttatgccatgttcatcctgaaagttactactttctttctaaatccttataaaccatctgtttaatgaccagttctaaaaaaaaaaaaaagaaaaagaaaaaaaagaaaagtgcaaaggagcaatagccatcatctgcctggaattttggactttgccttttctgctttttgcaaaccaggataacattctttttctttcctatatttatatttttacagtttcttagtatataattttgtgagtgaatttaaatcatcttattcttctgttactttttttctgacacaccttgtgtttcatccttatgggtaatattttttctacccttctttccttcattttccctagtaggtaagaaggaggaaaaccatctacttcacacacctgcccacagctcctacagccctgtagtacctctgttagagcacccatttattgctgtaatttgctatatgtgagctgcctgagaagagagagtgagtcttactctatggtgtatccctctttacctaatgtatttcagagacccagaaatattgtggaattacggagtgaaggtgtcatgagctgatatccgcctctcattaagaacttagtctagcacaattgaatgaagcagctaaaatatggccatgtaatgttttgcaaaggaagaaaggaagggaggaagtttttaatcttattaggttagcacccttatgtagtgaagagaccagggtttggagtctgctatgtcctggttctgttcagtctcttctatatactggttggtgctggagtgatcttgggcaagttaatgaatctagcatcccagtttcctcacctcatccatcacctataaagtaatatttgtaatcatcatctcaccacacttttacaaatattaaaagagagaagatagtatttgtgattaacacacagtaagcccacagtatcttaattccaattcctcttcccttattctcatccttattcttaatgtatctcttcagatattttgggtttgaaatccttgttttccttggtattttctaaaagcctctgcacttcgtgaatgtcagtgttttcattctttttcagtaaggtgctgtccctttgtacttctttggatagaatctccccctcccttagtgtcaaatattcttttaaactctgaactcctagaagagctccctatgcaacctcacaggtgtgacaataactgcccttttcttccccatcaggcccatttttgattgtactgttaacattttattttttgacagtctcccatctttctggagctgtcattcaatttattgccctggcaataaaatagaaccgagtgttttcattaactttacgaaatttatatcctgaaagttcatagaagtggtctttaaagtttttgatcatctgcacctatgaataaaaacactttacgtatgtcttccccaagtataccaatatttatcttttaattatgtgcatgtactacagtaataataatagaaagtccagaactaagtagtttctctctagctacacacacacacacacacacacacacacacacacacacacacacacacacagagatatatacagacatgctatatatacctatccacatatatatacacacacatgcatagacagatctatgtgaacatatgcatatatagaaactcatatattatatattttgtaagacatacaaaaatagaaatcaaaaggatgcattgaaaaataaatataggctgattgttggatctagctcagccacttgtaccaaaatattttgaaacattatttaaaatttttggatccctgtgaaggcctgctatacccagatttgccaagggatttggtttggagagagtttgatgagctttgtagtttataaacctagaagaaatgctgatcaaagaattaaagcataggaaacatcattgcaatcattgctatttctaatggtcactgttaaactgctttaccgtggacatcacataaaataaaacctctccatagttatatatgtgttcatcttcatcagaagtaattatggaagaaactgttgtgcattactcagcacagtgaagtaatagaatgtgccagtgcagctttaggtgactttttttgctctacaatgttactcatgttcttctagctctgacccgtgtgcccatcacatggctggtatttactcactaatgttgcaccatattattttaaatgtgattagagtcttgttgaatctaaccataatgataatatattatttcagctgttatattctatttttttctctgtgtacttatagatgtgaatgtttaacaaaatgatgcttaagtattgcttcatatattccttcttttatttgaygtaagcaagtgtctatcctatatcataattcttgaaaatgtagttttcaatggcattatatgaatatatagcactatttaataatttcccattgttgaatattcatatttttataatgtattattac

SEQ ID NO: 93579 - DNA, 25051 bp, Homo sapiens
aagacccatacccctatccctatccccaacatctctgtgaggcaagtcattctctctctctctctctctctctctgcctgggctttgtgaggggctctggagaagcagcgggtgtggggagtggatagagaagcagctacataacacacccagaccagactttaaaatcactgccaaagaattcagcaacagccaattatatagcccctggccttcatttgtgcagggaaggggcgggctgaggccaagccgcaaagtggaacctgaagcactgagtgtgtgactcacccctctgtcttctaaggacaaatccctttaggccacattcacccagaaccagctccccactaaaccctgtcccccacccccaagccccactctccaacctggaggtctctgacttacagaacaatatcctgagatcactccttgagctagtgaccgcctcagctcacccggcaatggcccagatcaacacagaggcccctacaactcaggtctcaggtctctacaatcttaatcgcagtctggctcccaggaacccctaccaagtttagggacaggagggaccctgtgagtctaatcccatgccttgttaattcccctaggagccagggtctggctggctggccttacagtgacctcactgcccagggaccacaccagtctataccaaagccaaatgtaaaactgtcaccatgccaggccctcaaaggatttaagcttcaagggcagaccatttgtcctaaaacaactggattgctgctccactggacaagaaaaactggaatttccaggtagatgtgggttcaagcagaattccagtctctgcttcttcatagtaagagcagagaacaaagagtaagaaacaaggtacaggaggcactgggtaaacagatagcagggaaatcagcaggtatgactactgaataaacctctttcacaaacacacacccatagcccagctgagtgcaaaggggatgagcctgccggccctgttccttaagtctggatggtccctagggtggaatctgtggaaagcttggactgccttgctattaactgccccataattcccaacccataaattagcttagtcccagcctggaaatccctaccctgctgctacccaaagaccataatacccagtgatatctcattataatcattataaagcagcaagttaaagattactcagcagaactaatgcatagcttcagaaattagaggaaaattttcacacaaccaaataaaaccagggctggagaattttgatatgaacttggagtttctgaaagaagaaaggaagaaatgaaggagggaggggagtgatagggaaggggataaatacacactttggttcccctagatgacctcagcactgttcaattatgcctcccctgcctaaattaagagttcctgaagaggaggcactttgttttcttctttgtagctctagtgcccagcataatacaggaacactgctggaactgaaggaatgaagttatcagatgccttagccgtcacggatatccatacaagatcaccatacaagacccttcagatggaccaaaagacacaccttgcagggatcttctgaaacgctagggcatatcaggtcacccctgaacctgtgcactagccaactattgaatagtaacctccaggaagagcactagacaatcccatcgtggaatgctacagttctaagaagctgcagtttaagtccaatcccacatttggctcttactccccattccccaaggagtttccatttggttcatcagaggctccactgcaggtggaggcggtgccttgtgtttgctcaaagtctggaatgaattacagcagccagggatcactcttattgccataggctgtgtctaagaaagcgaccaagtttcaccatgaaagcaaaccaaatagtcatggagggtatttctcaatctcagactgttagacaaagaatgtctgtgtatacgtcaatacattattttccacgaaaaaaacaacaggacaaaactggcttacaagactagttatctgagcctaaagcttcaacccccaggatgaagctccaccccaagccggaaggtgatgaggttccaaggctcatccccaaaagggcgagagagagtcctttcccaagcctcaaagtacactctgtcctgggcagcctgcttgtgtccacatgtgtgcatatgagggagggggaaacgtgctggtagagaaacacctgagagctgagagcccagcaaagaccagcaagtgctaggacacaaaccctggcagacgctcagcgacagcccccataaaaaccagggaaaccggctcatgagcaagtgctcctcgggtgccctggctacctgtagctgctgtttgctggtccaagtgcccatctctagatcagagtcttccctttgaacaaatgaagaggatctcctcaaagcataggtgggcaagagcggcctctgaggcttaagcagtctaacactcactcccctacccccctgaggggactgtaccaaccatcccagrccccagctgagcccccaggccagcctgcctctctcaccagttcagcttcaggtactgcccacctccccccatcaccctactcatcttcagactggcagtgccacagctggtcaagtcccattgagctgctgcccaatctgagcagagataaacatgacgggggaagaagcccaaggccactgttcctcccatctcagcaggcaaacacccaggtggccagaaaagagggcctcgctgcagggttataagtggatgccgcatggccccgctgaggacctgagacagggttaggaaagaaggatagcatagcacctgcaggcctaaactacctgggaggattccctggagaaagctgtagaatcctcaggaaaggccccccttcccactgcatcactcactcctgcaagcctcacattagcccagagcagggtgcccggtgtgggggcggggggtactatggctccaaacctgcagcctgccccaggtcacactaacccaagtctatctgaagactattccaaggccctgacaactccaacagcaacccatcagcagtccaatccggtgccttatgtcctccagggaagggtttgcccataacccacacctgtcagctgagaggaatctcagcatctggcccagacccctggacaccagaaagtaaagccaagtcggggaaaggaactgcaagtagtgaaaaggccacaactctaaaccccacggatgctttctcccaccaacctcaaaaccacccgcaagggctttggctgacacctgcccatgaacagatgggctcgactccccccacccacacactcccaaggagactttcagctttctcaaggcctcatagccaggaacctccattctgagaactgtacctaaccacccaaacctacagaccctattaaaatgaagaaaagacctctcggcccccatttctggggctgcctcagcagcagcctaaacgtcatggtctcttgcatgtcacatgaaagcagccaaaatagagaaggcactctctcctcgtcctccaaaatgttctttctcaggaagtcctttcaagtagccaattatagtccatttagaaacaccagtaactggtgacaagccgatcactagcaacaccattacaaaacaaaactaagcagaggtatggtcacgaccttgtctcttacgcttctgagagaagatgtgatactcaaataccaatgtaatcaactttgcggtacttttgtttaacttgctaattattttttctttctgtgcaatatccaggcaacaactaaaaacaaaagcaaaaaacctggcctttttctggcctggagactcagtctctctcccccttcactctgctgtgcagagccatttctgtgggagtctgaaaaaatgaaactttttaaagatcctaagcaaatattattactatattattattatacggtgtattgagtgcccgtatttttttttttttttttttttagacagtcttgcttcgtcgcccaggctggagtgtactggcacaatcttgactcactgcaacctctgcctcccaggttcaagcaattctcctgcctcggcctcctgagtagctgcgatgccaccacccctggctaacttttttgtatttttgtagagatgggatggtgtttcaccatattggccaggctggtctcaaactcctaacctcaagtgatccactcccctcagcctcccaaagtgctaggattacaggcgtgagccaccatgcccagcctgagtgcctgtatttaatgtacacgatctcatttagtcttaaaaaaacccctgtaaggtaatcatcgacaaccacattttacacaaggaagagattttgagaaactcgatagcatgtctcaagtcagacacttagcagcaaggcagagtccatttcattttatgggactagtctgcttcccagaataatcatcaaatgcaaaggaatttaattatctgcttaaaaaaacaagcccccattattaccacagttcacgtctgaccaattccaagatgttcttcccaaacttgatatgaacacattgacgcaattactggcgaaattgagcaagagtatgtagtagccagggctctgtgggaaagtgacagaaaactcctattggcaggatgtcatcctgcctgccagggcccctcacttacaacaattatctaaaacctagcattagaaatgagaaaccacctgtgtggtaaccctggaagcaacctgtggttgccttgggcctgtgggcctgtaggttacaggtcaaagagaagtccagactaggctcagccagctgctatgaggaatgcaaactcacctactcaagctctctgcctatgctgaaacaggctagaggtcagagttcagatcatctgggcaagataattgagactcaggctgctaccggaagtaccagaaatgggcaacgtggtgttgactggttatattttagccctctagcacccagagtacacaagctctctgcccctgggagagatccctgctcacctaggttttgggtacccataccaggaggaggctagggggaagggctctcggtcacgatccacacagaggaagaaatgaacacacagtgacaatttactgagggcttaccctcattaattaagcccttatttaccattgttcacaatatcttccaaaacaaccccttgaaagggtgaccatttattatcccagaagagaaatatgaggttcagagagaagtcacttggcccaaacgatcaggagaaaaacccactcaggagagtggctctatggcaagacacgtgaaccgagaggtcagtctccttccccaccgggagcctcacgtcagtccccaaaagggagtggattactcgaggtccctaccagagttctcagtgcaaggctgctcgaagccctaagcagacccaaactccaaaacttcctgagcctcgggccacagcagggaagtctccaaggccttctctggttctggggctagaggggcctcgggacttccctgtgcggtcccggccccacgcctccaacaggactccccagggacccacctcgcaaaccttctctcccatccagtcccaagcctctgtctgggatttaaaactctgatccagaagagggaggctggctgtcgtagaagagccagcctgagggaatgtctgggggaccctgtcggggaaatccgggggggtcccaatcctccgactggcgccgacccgagtccttaccaagcagcggggactcctcagggcaggcgggcagcgacagtgcggtggtgtggggcactgggaccgaggtcaagttgctagcggggccagggccagaatccacgactgggctggagtcgccacccgggcgcggctgggaggaggcgcctagaggaggcggcggccgggcccctccggtccggagctccccggaggactgcccgatggcggcggcactgttcgasccgccctgcagcggtgtggagactccgaccagttggggcaggcggctcaggtcgcggccagccaggtagtaaacgagggtgacgccaaggtgcagagcgcagacggccacgagcaggcggcaggcccrctgtagggacgcgcctggcatcgcggcgctgccgctcaggagcggctcccgaagcctcatcttcccgccgccgctttaagaagggtgtgggctacaggaggggaggcgacccgcccgcgggccgcccgccaggcgctgccccacagcggcgactaggggagggcccggagcgggggcgggcgagcggctgagagctgagactcctccagccagccagacctgggagcggcgagaagccgcccgaggcgccggcggagaggggaggggcggggccccggcgaaggcgggggcggggccgggcgcggggttttctggacgagggcgggaaggcggggcagcccgtggcgggatgggcgcgctgggcggggcctcgggagggtgggcagcgggcggggcgccgtcgtggggtccccggagtatgactgcagctccgacgcttggccgcgcaccgccctcttcctcccgagcctttgcggcggagcttcggtcgcgttgagccgcgcctcctcttcctcctccacgctgccctcgacaggccgcgccacttcctggggtgcgaagggactcgggtgcgagcctgggcctgcagcgcggcggcggagagaacggagaggacagctggcgggtggttatctggagtggtttggggccgcggcggcgttctggccagtgggccttggtgggctaggaagagaggcagaaaaaggttacccaggaaacgggcttcgacgccgggcgaggagtggcacgttcgaaaccccctccctaactcagcccggctggaccccgctgcttaacggggggtcctgcggcaaagaaagtggacgggttgccacttctgtgcctccccatcaggtagcctgggctataaggggctctcagaccagcttggttccagatgtgtgtgtggcgggagtcctgtatactttgaagaggagagcagcaagaagcctctaactcccaggccagcgtgcaggagatcagccggcgttacagtctacactgggctacccactgtcccatgaagtagcagttctccccatgtcgtagagtggggccccggcagattaagaaactttcytaagagcccacagctggcaagaggcagaattctggctccgaaacccatgttttctacaggtttaccctttgttgatttgcaagtaagggctgaaggctgtgtgggtgagagacttaggcamtgaagccacttgacctcgatttgacccagaggcctcaggccctgagtgagcagagacacctcaccccagagaaagactcatggaggtgctgtcagtaatgtggatagggaagttgagggctctggcagccaaccagcagggaataacagtagctaccttattttgagagtttgctgtgtgccagtactatctgccatgaagtaggtggtgttacggtgtccatttcacagatgagaaaataaggcttatgagttgacactttggttgtgatcatacagaatcaactttcctcacttgacttcctggacaccaggtccttctgatcttcctcacttcactggccatttctgtctcctctctggacttcttccccagttgctgaaggccccagccatagtccatgatgttcttttgtgtctacacttactgcctcggaatgatttataatatccaaatgctgatcactgatttgtctccagcccagatctcttccctgacctccagattcaactgcttattttactggcatctcaaacacaatacatcttgccctcagcaacctactccttacacaccactcccgttcttacctccctcagagagtgatactattgtttattcagttccccagaatctaaaaggtgtccttgatgtgcttctcttgctctcaatgccatttgcaagccctcagccagctttgtcagtgctaccttcaaaacatcaatattcaccaccagccaactctgatgtaaccatcctcgatcaagccaccatcatcttgccctgggttatatggcagctactaattggtcaccctgcttccacctcctccattcctcctccctagtctgttttccacagagcatccaggaaatctttgtaagcataaatcagatcatgccattttgttcagaaccaaatccacagaaaccctgttcaatctggttcctatttccctccccacccacatctgtcactctaccatgctggacctgccttagccacactagcctgatagctattccttgaacttgccatatttcttcctgcctcagggcctttgtacttgctgttcatttagcctgaaacacttgtccccaatatttcattcaattcaggtctcttaaatgtcaccttatgacagagaccttttcagactaccttatgcagaatggcctcctgcccaaatctgcttaaactgcttgaatttttttttttttttttttgagacaaagtcttgcttttgtcccccaggttggagtgcaatggtgcaatctcacctcactgcaacctctgcctcccgggttcaagcgattctcctgcctcagcctcttgagtagctgggattacaggtgcctgccatcacgccgggctaattttttgtgtttttagtagagacggatttcaccatgttggccaggctggtttcaaactcctgacctcaggtgatccgcccgcctcggcctcccaaagtgctgggattacaggcgtgagccaccgcgcccggccttaacctgcttgatttttttcagagtggatatcaactacccaacattatgcatttattttctgttgtcttgcctccctcattagaaaatcagcttcatgagaacaggaaatttctctcttgttcactactgtatcttcagcccctagattttttttttttttttttttgagacggagtctcactctgtcacccaggctggagtgcagtggcgtgatcttggctcactgcaagctctgcctcctgggttcacgccattctcctgcctcagcctcccaagtagctgggactacaggtgcctgccaccatgcccggctaatttgtttgtatttttagtagagatggggtttcaccgtgttatccagaatggtctcaatcttttgacctcgtgatctgcctgcctcggcctcccaaagtgctgggattacagttgtgagccaccgtgcccggccgatatttgttaaaatactttttaaatactgtgatcatcttaatgatgtgggaaggagagaagggaaaaattattgctaacttagtttagaacgtaaagtggagttctccaaggagttggtaaaggtgaagctgaccccagcatcctgtgtctaggggtaaagtcggcctggccaatgagtgagggtgggtcagattagtcctgcaactgaaaattaagtggagggggaaatggggatgtgtcttccattggtatagatgatagccaggagacaggactgcgggggttattaagaatcacagacctgtcccaggacacacgtggccagaaatcgaggaaaaggaacaacacttgctgattgcctatccctcaggaacttgcagagtccactgaggcctgagcactagtctcagctgcccctgatccacaggcacctagaagcagtcaattacaaataatacagatggcccagaaacctttgggacaacattgtccagcagtccagacattaactggtgctagtgagacagacccaggcaacctttctccccactgtctccagctcttttccactctctacttcgtcaggtgaaaaattaatcccatccggcgagacaaatgcaggaggaagttgcagtgctgattggccaaaagctggcatgggggcttggccgttggcccatccatgtgctcatctgcccagaatcaccagctccctgcttctccctgcagctggccttcctctgccctcctatggcgccctcttctgcacctgccaggttacatttctgtttttaccctcatggatcagaagggcatcaaatagtgcccggcacatggtagacagttatttcagtcatctattgcagcgtaacacctaccccaaaacttactgttttgaagcaacaatttctcgcagttttgcagttggctgggcagctttgcctcacatggtgtcagctgaggcactggcacagttggaagttccaaaatggcttcactcatgtgaatggcagttggggctgtctgggggctggaaactcagaatgggttgggtcatggggccttcattctccacttggatctctccacaaaggactctccatgtggctgcttgggtttcctcacaaactagaggaagcattccaaaaaggagcatttcaaaaatacagaagawggagatccctgaaagcccagccttagcatcacttctaaagcattcttttgcttaaaacaagtttatagggcaggccagattcaaggggaataaaactggctcggcctcttgtttttacttttttttttagacaggatcttcctttatcaaccagcctgtagtgcagtggtgtgatcataggtcactataacgtcaaactcctgggctcaagtgattctcctgcctcagcctcccgagtagctgggactaccgggatgcgcctccacgtccagctaattttaaaatttttagtagagatgagatgttgcgatattgctcaggctagtctcgaactcctgagctcacgcagtcttcctgctttggcctcccaaagtgctgagattaccagcatgagccatttcacctggctgactccacctcttgatgggaggagggacaaagaattgtcaggcacctttattccacagtagtttgcccaatggccacagattatttagattcttctcacaggtaaaatacattagtgtcttcttaaaatcccccaaaagttcaactaattaagacttcaggtccaaagtattgtctaaatcagatccaggtgttaccgaccaaagcgcaaaagcactcactgcccaatgttctagaaaccaatactgtgacacctggtttttgagaaaagaaaagctttgtactgcaggtaggccaacaaggagatagaagagtccagctgaaatctccctgtggtgactttaggtctccctgggctggctcaagtctccctgggctggctttaaggtagtgtttttatcagaaaaattttggggggtggattctgagattagtaagtaactggtggaaggaaaggggaggtctggaaagtcctcagtcatgcacaattatttcttcatgcctcttcactggtcacatgtgcaattcagggggatttagaatgaaacgtggtggaaatttgggttgtgacaccagaaagctctttctgtgaacagcccagttgccctgtttgttccaactgatttcagccagttcttttatctcaagcagagggagttttggcatttcagcacattgtttcttttcttatctgccatcctgcaaactcaggaatttctgttagtcattgttttctttaactctttgggacacagtttcacaggtatattcctcaggttcagggaygggagatacggatagctgggtgcagtggctcacgcctttaatcccagtgctttggaaggttgaggtgggaggaccacttgagcccaagagtctgagaccagcctgggtaacatctctaaaaaataaagataaaagagggacctgtggattataaagacaaattacctcattccttttttttttctcccttttcctgagaaattcagttaaaaagtcactaggtagggttgagcaacataagagtccaaacagcatagacagggtgtcaaagcccaaccatgatagggaggggtaagggtgggggtggggaggatagcagcccagcaaagagggtcaaagcccaggagagcaaaaagggcctcaggacctgagcatggtaggaagtctcctgtgaagtagggcaaccgagtacagggtgttgaagccaagatgtgatgaagagagtgttgaacacagcaacactgattaaaaagtaaccatatggtcgggcatggtggctcacgcctgtaaacccagcactttgggagtccaaggcgggcagatcacctgaggtcagcagttagagaccagcctggccaacgtgttgaaaccccatctctaccaaaaatacaaaaagtagctgggcttagtggcacatgcctgtaatccacagctactcgggaggctgaggcaggagaatcacttgaacctgggaggcagaggttgcagtgagccgtgatcgggccattgcactccagcctggtctacagaacgagactccgtctcaaaaaaaaaagcaaaaaaaaaaaaagcaactatatatagatgagagttacccaagtttctgacagtcagaggagttacaaatatagacagggagaaaactaaaatgaatcctttgatacattatttaaatttgagaaattggtgtgaattcattattttcaatatagtgatagatgaaataagaatggtgtgtgtgtgtgtgtgtgtgtgtgtgtgtgtgtgtgtgtattgtctgggagcagaaatttcccaaggccatgagcacatctagcagccaagtcttggtttctaaacaccattctccaataaaaggacctaggtattcttggagaaaaggctgattgctgattccagggactggctaggaatattacaagatgaacctggaaactcttgtgtcagaaagtgaggaagaactcaaagaatgataagattatgtcaaaaagacacagaaatcagtttgaaggggctcccattggccaaatatggaaaaatttgagaatgaaaataaatattgatagaaactattaccagttgaacaaaataaactatgagtccataatgatataaataaatggaatttgatgagtagcaatatatttacctaatttcaaatactgccttaagaaatgctaataattttaatgggaaacattagagaaatccaaattgtgagacattctagaaaataaccatcctgaaatcttccagaatgtcaaggtcatgatagtcaaagactgagaaaatgttctcatcacaattgaaggaaaataaagagaaataactaaccatccttttcttggggttgcactactgtccaaagagcatgtagtgagggcagtactgctaacgtctacacaacacacccacctcaactagagctttgctttagcttggtgtaatttttggaaaaatgaaaaactgaaggaaaaaaacaatgcaacatgtgattctaaagtggatcctcctattataaagaatattctctgggcatggtggctcacatctgtaatcctagcactttgggaggctgaggcaggcagatcacctgaggttaggggttcaagaccagcctggccaacatggcgaaaccccatctctactgaaaatacaaaaattagctgggcatggtggcacatgcctgtaatcccagctactcaggaggctgaggcaggagaatcgcttaaacctgggaggtggaggttgyggtgagcggagatcgtgccactgccctccagcctgggtgacagagtgagactccgtctcaaaattatatgtatatcttattgggggccagaagcagtggctcatgcctgtaaatcccaacactttgggaggccaagacaggcagatcacttgaggccaggagttcaagaccagcctggacaatatggtgaaaccccgtctctagtaaaaatacaaaaattagctgggcatggtggtgtgcacctgtaatcccagctacttgggaagctgaggcaggagaatcgcttgaacctgggaggtagaggttgcagtgagccaagatcacgccactgcactctatagcctgggcgacagagcaagactctgtcttaaaaaaaaaaaaaaaaaaaaaaaaaaaaaaaaatatatatatatatatatatatatatatatatatatatatatatatataaaattggaggcctagtgtggtggctcatgcctataatcccagcactttgggaggccaaggcaggaaggctgcttgaggccagaagtttgatactagcctgggtaacatagcaagacccctgtctctatgaaaaattttaaaaattatctggacatggtggtgcatacctgtagtcctagctacttggaaggctgaggcaggggatcatttgagcccaggagtttgaagttatagtaagctatgatcaagccactgtactccagcctgaatgacagtaagaccctgtcactaaaaaaattaaaaattaaaaaaaagaatattattgggatgaccagtgaaacttggatggggactaagcataaaatgataataatgtagccatgttaacttcctgttttgatgattatattgtggttacactggaaatatacacaaaagggttttggagtaatagggcatcatatcggaaatttactctcaaataccatgatgtgccacgtaacaacagttcagtcaacaatggacagcatataggatgatgggtccataagattataataaagctgccctgtacatgtatactattttttatattttacagtgtattattactgtaccttttctatgtttagatatatttagttatacacttatcattgtgttataattgcctacagtattcagtacagtaacatgttgtgcaggtttgtagcctaggagcaataggccataccatataacctwgatgtatagtgggctgtaccatctggatttagactcactctttgatgtttgcacaataacaaaattgactatcgacacatttctcagaaagaatccccatgattaagcaacgtatgactgtagtctaaacaaattatttgtactaaactcgcaacttttacttaagtgacttttcccccacacgtctaacatataatggaaatacaaggacaagaaaaccacaatagacactcccatttagaataggagattaataagaggcacataacagccattagcaaatgtgagaactaaccatgcacttgtcaccagctccccctgctccaggggcagggaatgtgattctctgtggctcttatctctacccttggatggagctcttggctccatcctttgagtcattcctccttttccaaaagaaataggctttgttcacagtccggtaacttgttcaagatgcttcactgggtacccggtgtgctcttttcatgttgaactatctttgtctgttttagctcaagccactactgcttacactggtacaattcttgtaggggaaaaaactgtggactttccgttaattttatttttactcaaaccatacccccaaatctcaagataagcccttccctcctttaggctgtgaattacagtgctgtgaaccaaaactttaagactcttagaagcactttagtctacatgagaggtttaggaggcgctgttttaaggctttctgagatctcaacagtcttacaaccatagaaaagaacaaaattatgtcctttgcagcaacatagatgcagctggaggccattatcctaagcaaattaatgcaggaacagaaaaccaagtaccacatgttctcaccgataagtgggagctaracattgagtacactcggcacaaaggtgggaacagtagacactggggactccagcagaggtggagggacaagagttgaaaaactgccyatcakgtactacctgctgggtgataggatcattagaagcccaaacctcagcatcatgcaatatactcatataacaaacctgtacacgtacccccaaatctaacatttttttttaaattgctacccatatattactatatgccaataatatactaatagagtacaaaaaataactaatataacatttgagaaacggcaacaaaaaagtcttacagccacatccgtgaccttaaggccccattttacggggaaggtcttagaattaatattccctctaggttttaatttactttgagcatttcttttttctggcygtatayaatgccctgggccctctatagtttctcaaaattttgcttgaaacaaaatagtttcttcttcctgtactttttcacaggcagcyaaagggagtaagttggcattttgaacattttgcctagaaatctccataccaaggcggcaagttcaattattttctcttatccatgttactacatgttactactatgtcacttaggtcctgaataatttcccaacaacttcctcgctgtgttgtcatcctccttcctacccttcaggactccgcaagcttccttattccaaagtcaatgttatatgttttagatttttgttatggaagctccccacttctgggtgttaatttgttttaattatctattgcaggggttgggaaactagtttccatggccaaacctagcccaccgtctgttttggtaagtgaaaatgtattagaactcggccatgttcttttgtttgtgtattttctatggttgttttcatactatgatggcaaagttaagtagtagcaacagagatcatctggcctgcaagacctaaaatattgactatctgatcttttacagaaagtttgccaatgcctgatttattgctatgcaaaacaaacaaacaaaaaaaactacccaaaatgaatctcttaaaacaacaatttattatttcttacagttatgtgcattaaccattaacccagtggttttctgcttcacagagtgttgagtggggtggtagaatgtctggaggtacaaatgaccttactcacatggctggaagttggtgctagttgccaactgggagctcagctggaactgttagccaggtgtctcacttctcctcctccaggtgggcccccacagagttgcttgggcctcttcatagcattgcagctgggttctcagaaggagcattctgaatgcataggaggaaacagaagacttttttttttttttttttttttgagacagggtcttgctctgttacccaggctggagtgtactggtgtgtgatcttggctcactgcaacctccacctcttgggctcaggtgatcctcccaactcagcctcccgagtagttggaactacaggtgtgcgccaccattcccagctaatttttgtatttttagtagatatggggttttgccatgttgcccaggctggtctcaaactcctggggtcaagctttctacccacctcagcctcccaaagtgctgggattacaggcgtgagccattgtgcctggcccagaagatctcttcaggccaaggctcagaagttatacagtgatacatagctacattctattggtccacataagtcacaggactaacctagattcaaggggagaggaaatagacttcacaaattgataagagatgtaggaaagaatttgtggccatcttcaatctgtcacaacacaaataaactgcgtgtcaggatgctattaccatctatattttgttctgagtgctcaactatacttgttctcatgacccgaagtgggtctgcttcctcctctcacccctttatcccaacctgtacacaggtgccatggcactgggtccaggccctgctcagtgactttggtcatccatttccagcaacatctatacccaagacrggatatgtctacagtctgttgggataggttatttgcctcaagtgctgctttctcagatcctagaaaggccaacagaagcctggcaactgccttcaattgctgtatcttaaaattgttggaatatcccataactaattgctaattagttattgccataataatgctgcttagcaaataacgaccaaattgaagtgccatacaataataaagcatgtatttctctctcaggtgtccatggattggcggggacagctctgcttaaggatgtagtagctctgcaggttggctaggttagtctatggcatgtgtctctatttcttctgtgatgcccaccaagggcatgtttttcacatggcacaagatgggtgaacaaaaagccccaatatctcataaagcctgtggttggaatggtcacttccacccacattctatgarccaaaacaagttgattggccaacccaacattatcatattctgcctctagtgggagaaacttcaaagtcacatgacaaagggactggatatagggagtggtgaagaattgggaataatgcaaccctccatgaatttttctttttctggagctagaatggtggctgggaattgtactccagaacagctcacaatttgtaataaatctggtctcttttcctccagtttcctgttcttcccaacctgcgctatggacttcaycagatttcagcatcagagagaatatggaaggacatcgaccctaacttcatccagtgaggatttccacacaccatacactctctgagagttctyttggctttgtgtgcacacctccagtgacagggagctcgctatgtcatgaggcagcctgctcccttgtggctatcactgaaccaactattaagccttcttatacaaacagtccctgacttactgttagacttacaactttttgattttacagtggtgcaaaagcaatatgcattccatagaaactgtatttcaaattttgaattttgatcttttccaggctagcaacatatgaagaccaaccttctatttttaaaataggctttgtgttagatgcttttgcccaactataggttaatgtaaatgttctgagaatatttgaggaaggctaggctaaactgtgatctttgggagcttagatatgttaagtgcattttcaacttacaatattttcaacttacgatgagtttattgggatgaagcccgttgtaagtaaaggagcatctgcattaagctaaaatccatgtctataacttcctcagtaatatcaagtttgttccttggagccagagaataaactgaatccttttccacgtgatggtctttctgttgtttaaagagatcagccatgtaccttctcccaacctgaagacaactcctcaccaggctacctatcaattctacctctttttttaagagatggggtctcactatgttgcccagcctggtcttgaactctgggctcaagtgatcctcccacctcagccttccgagtagccaggattacaggcacacaccaccatgcccagctccatttccattgttcttcatgcttccttattgagttccttccctgtcccgattattcgtctttgattgggctttgactacctgggcatttagtagggtccataactgaatgcagcattccagccggggtctaagcaacagaatagagcaggaccatcatctccgcaatttccaatatcatactttcatcaatgtcttccgaaacaacattcacttttttatgttcatgttaaactaaaagacagggctgaaggcagcatcctggaacagtggaaacattcctataagttgacttgaatcctttaaataaagtccatgtaccaaccagagtttttgactattaaaacagtcaattataacactgctctgccgtggccaccattgcccatgattatttaacaccactgctacaggaccgttcatgctgctgctgcctccatgaataatttcgacaccattcctgcctcttagcgtcactcctaagaattcagagtctgcagtgggaatgaccgagccaattcacatgcttgagccctagctgctaggtaggggaggaacgaatcttcccctttctgcctccatggtgggagctagggcattgagccctccagtactatatacactggaaaattttccaaaataagatgggggattgcctgttgagtgacaagtataatggcaaaggttcattccagtcatttaaaaaagttcaatttccctttaattgtactatcatccaacccatattttcctttttagtcacaggaataacatgccatagattgttaaaggccgacccagtttgccaacagactatcaaatgcagcactgtgatctggcagtttagggacctgttaaaaaaagaaatgtgatagtctttgctctggcttgttctgagaaatctccacttcctttacatctttaaaagtctatccttggccaggcacaatggctcacgcctgtaatctcagcacttcaagaggctgaggcaggagcattgcttgagcccaggagttcaagattagcctgggcaacatagtgagaccttgtctctattaaaaataaaaaaaattagccaggcgtggtggtggtatgtgtctgtagtcacaactactcatgaggctgaggtgagaggattgcctaagcccaggaggttgaggtggcagtgagatgtgattgcaccactgcattccagcctgggcaacagagcaagaccctgtcttacacacacacacacacacacacacacacacacacacacacaaactattcttagataagagtgtagtttgcagaatcaacgtcttcctgtaatggacaggtattgattttttgtgcctcctcttcaacattactccttctgttagagactcccactcttccctatgtggttgggacaggctaactacggggtcgctatggcctgggtgacttatatctggccaatcagagcactatacccctctggccacagttgatttgttcaaggatcaacatgtggcccaagaaggactaatgagcaatgtcccttcttctcccaggacttctgctgcaaatgttgagtaaaaggcttttcctttcctctggaatggccagtctggagtagcaagggtgctgtattagtttccaaggactcctctaacaaattatccagacttggtggcttcaaacaacagaaattgattctcttacagttctggaggctaaaagtccaaaatatcaaggtgtcagcagggacaggcttcttcttctttttcttttctttcttttttttttttttagatagggtttcactctgtcacccttcctagtagctgggaccacaggcatatgccaccatgcccagctaatttaaaaaaatttttttttgtggagacaaggtctcactctgttgcccaggctggatacgctccttctgaaaactctaagaaagaattctttcttgcctcttctagcttctggtggctcgcagccatccttggcattccttggcttgtagcagcatcattctattctctgccctcatcttcacatggccttctctctgcctatgattttctcctgttgatgtgtcctctcctcttataaggaaaccagtcattggacttgggctcaccctaatccagtatgaccccatcttggcttaactaattgcatctgcaaagactatttccaaataagctcaattctgaggtttcggatagaaatgaattttggaggtacgctgtccatctcattacagccattatatggaaagagcctatctgagaaataagccaaaaaggaagctagagggttacgccctggtatgctgtatcagactccccctggactgaccagttatgtaacctggtgaattactcctcccttttttccccccataagctgatttgaagtaacagaaggaaactgattaccactcctccttttgcaaaattaaaaaatcatttacacaggactaatgttccaaacttctccccgctatattcatcctccaaaagtctctgacaaggattgagcaatttcatttggaaattctcttagtgccttggatttacttcatttggctaggaaactaacttattttgacaagcgagatgatctcttacaatgtcttcagccattccttataatttttattgtggaaaattttaaaaatatacaaaaatagagaaaatagtgtaagtctccaagttcccatcaccccacttaaaaaaaaaatcaacatttagccatgtttatttcatctatacccccaacttccctccacctcctgcaggattaaaggaaaattcagataacatgtacagtagtacccgcttatccatcgctttccgatgtctcagttactggaggttaaccgtggcctaaaaatattaaatggaaaatttcagaaataaaaaattcataagttttaaattgcacactgctctgagtagtgtgacgaaatcttgccctgtcccttgccatcccacccaggacatgaatcatccttttttccagcttatccatactgtgtatattgcctgctcattagatagctacccattagtagctgttttggttatcaaataaaaaaaacataggatgatacccaaaggactataaatcatgctgctataaagacacatgcacacgtatgtttattgcggcactattcacaatagcaaagacttggaaccaacccaaatgtccaacaatgatagactggattaagaaaatgtggcacatatacaccatggaatactatgcagccataaaaaatgatgagttcatgtcctttgtagggacatggatgaaattggaaatcatcattctcagtaaactatcgcaagaacaaaaaacgaaacaccgcatattctcactcataggtgggaattgaacaatgagatcacatggatacaggaaggggaacatcacactctggactgttgtggggtggggggaggggggagggatagcattgggagatatacccaatgctagatgacaagttagtgggtgcagcgcaccagcgtggcacatgtatacatatgtaactaacctgcacaatgtgcacatgtaccctaaaacttaaagtataataataaaagaaaaaagaaaatgtggcacatatacaccatggaatactatgcagccataaaaaaggatgagttcatgtcctttgcagggacatggatgaagctggacaccatcattctcagcaaactaacacaggaacagaaaaccaaacaccgcatgttctcacttgttaagtgggagttgaacaatgagaacacatggacacagggaggggaacatcacacgctggggcctgctgggggttgggggtgctaagggagggatagcatttagagaaatacctaatgtaggtgatgggttggtgagtgcagcaaaccaccacggcacatgtatacctatgtaacaaacctgcacatcctgcacatgtatcccagaacttaaagtataataataataaaaaaggaaatataaaaaagaaaaagaattgtcatcaatcttgaaaaataaaacaaaataaaataaagtcactcttgtacacacacacacacacacacacacacacacacacacacaaaaacataggatgtatgtagggttcaatacaatcagcagtttccagcatccactgggggtctgagaacatatacccaaggataagggtggactactgtaattaatttaccctcttcaaccactatcctgagcttaaaattcgctcataactgcatttgataagctctgtcgcctgcaagacaaagcaagttactttacacataggaagtggacaattgaggtttgtaaatacagtccctgccctcagaattttcagtctaataggagagaaaagacaagaacctcctccaggtgctcaccaaactttaatgtggatcacctggggagctgttaaaatgcagactctgttcaagtagttaggaactgcattctggagttccaacaagctctcgggcaataccaatgctgctgatccacagatcacactttgagctgcaacgctctaaaccatcatgcaaaggagataatgatagggtgctgtataaggtagagataatgggccacactgtttaagacctggcttgttaaatagcttcccacaattatccaaattaattttttaaatattccagaatgagactaacatcaagccaaccaccagggagccacaaaagaaatattataaactctgggaagagaaggcacagttacctaccagttcaggaaacatatatgatagagagcaaacatgtctagccagctcagggtgactcctttctccacaaacttgcccctctttaggaagggtcctgggtagccatgttgatactgcttgaccccagcctccagccacagctgtctgggccaggggtgagcatgtgacccaagttgggctaatcagatgatttctcctgagaatttagatttgctattccggaaagctagtcggcccctgggtgtggctggaattgagatgatgtaaacattccaccttctgccaatgcacagagaagcaaagaaagctgagagaatgaaacagaccacagacagagaagtggacatagaaatgaaagagaaatacccatattcctgargcttctttgcccccattctggtctttcctgaagcctattagcatttctgcccatggtttctgtgccttagaactcaatccccttatattaaaaatcgtccaagtgttgtaccagtgagtttcagatctgcaaaagcaaagagactggctgggcgcattgactcacacctgtaatcccagcactttgggaaactgagatgggcaggtcactcgaggtcaggagttcgagaccagactggctaacatggtgaaacccggtctctattaaaaatacagaaattggcctggggcagtggcgggcgcctgtagtcccagctattcaggaagctgaggcacgaagatcacttgaacctgggaggtggaggttgcagtgagccgagatcgggccactgcactgtccagcctggcgacagagtgagactctgtctcaaacaaaaaaacaaaagaaagagactgatgaataaacacagttctacaacaagcaggacaaagtcagagagggagagaaggttaagagcctagaaatgcaggtcagtgtgagtcccccaggtgggtaggtaggagagaggccattcctgataggagtgaagtttcaggaaccagaaaagaaatttccttcctgcaggcagagtggaagccacctggttcatgctc

SEQ ID NO: 93580 - DNA, 51603 bp, Homo sapiens
  misc_feature (1)...(51603): n = A,T,C or G
agagcgaaattccatctcaaaaaaaaaaaaaaaaaaaaagacccatcagtgtgctgtattcaggagacccatctcatgcaaagaaaaacataggctcaaaataaagggatagaggaatatttaccaagcaaatggaaagcaaacaagcaggatttgcaatcctagtctctgtttaaacagactttaaaccaacaaagatcaaaagagacaaagaagggcattacacataatggtaatgggatcaatgaaacaagaagagctaactatcctaaatacatatgcacccaatacaggagcacgcagattcataaagcaagttcttagaggcctacaaaaacacttagactcccacacagtaatattgggagactttagcaccccactgtcaatattagatcaatgagacagaaaattaataaggatatccaggacttgaacccagctctggaccaagcagacctaatagacatctacagaactctccactccaaatcaacagaatacacgttcttctcagcaccacgtcgcacttattctaaaactgaccacataattggaagtaaaacactcctcagcaaatgcaaaggaatggaactcataacaaacagtctttcagaccaaagcgcaatcaaatgagaactcaggattaagaaactgactcaaaaccacacaatgacatggaaactgaacaacctgctcctgaatgactactgggtaaataacgaaatgaaggcagaaataaagatggtctttgaaaccaatgagaacaaagacacaatgtaccagaatctctgggacacatttaaagcagtgtgtagagggaaatgtataacactaaatggtcacaagagaaagcaggaaagatctaaaatcgacaccctaacatcacaattaaaagaactagggaaagccaggcacggtgactgacacctgtaatcccagcactttgggaggccaaagtgggtagattgcctgaggtcaggagttcaagaccagcctggccaacatggtgaaaccccgtctctactaaaaatacaaaaattagctaggcgtggtggcacacacctgtaatcccagctactcaggagtctgagaaaggagaattgcttgagcctgggaggcagaggttgcagtgacccgagattgtgccactgcactccagcctggccaacagagcaagactctgtctcaaaaaaaaaaaaaaaaaaaaaagaagaagaactagagaagcaagagcaaacaaattcagaagctagcagaagacaacaaataactaaggtcagagcagaactgaaggagatagacacgaaaaatccttcaaaaaatatgaatccacgagctggttttttgaaaagatcaacaaaatagactgctagccagactaataaagaagaaaagagaggccgggcgaggtggctcacgcctgtaatcccagcactttgggaggctgaggtgggcggatcatgaggtcaggagatcgagaccatcctggctaacacagtgaaaccccatctctactaaaaatacaaaaaattagccaggcatggtggcaggcgcctgtagtcccagctactctggaggctgaggcaggaaaatggtgtgaacccaagaggtggagcttgcagtgagccgagatcatgccactgcactccagcctaggcaatagagcaagactccgtctcaaaaaaaaaaaaaaaaaatttacaagaaaaaaacaatgccataaaaaagtgggcaaaggatatgaacagacacttctcaaaagaagacatttatgcagccaacagacatatgagaaaagctcatcatcactggtcatcaaagaaatgtaaataaaaaccatgatgggataccatctcatgccagttagaatggtgatcattaaaaagtcaggaaaccacagatgctggagaggatgtggagaaacaggaagactcttacactgttggtgggagtgtaaattagttcaaccactgtggaagacagtgtggtgattcctcaaggatctagaactagaaataccatttgacccagcaaccccattactgggtatatacctaaaggattataaatcattctactataaagacacaggcacacatgtttattgcagcactgttcacaacagcaaagacttggaatcaacccaaatgcccatcaatgatagactggataaagaaaatgtggcacatatacaacatggaatactatgcagccataaaaaaggatgagttcatgttctatgtggcacatatacaacatggaatactatgcagccataaaaaaggatgagttcatgttctatgtggcacatatacaacatggaatactatgcagccataaaaaaggatgagttcgtgttctttgcagggacatggacaaagctggaaaccatcattctcagcaaactaactcaggaacagaaaaccaaacaccacatgttctcactcgtaagtgggagttaaacaatgagaacacatggacacaggggtggggggcatcacacaccggggcctctcagggttgggagctgggggagggatagcattagaagaaatacctaatgtagatgactgggtgatggctgcagcaaaccaccatggcacgtgtatacctatgtaacaaacctgcacgttctgcacatgtaccccagaacttaatgtataactatatatatatgttaaaaaataaaataaaattccagttaaaagcccagctcctctgttcttcagcaatccccaaggccaatcaaaaggcagtgtaggctgggcgcggtggctcatgcctgtaatcccagcactttgggagcctgaggtggatggatcacttgatgtaaagagcttgagaacagcctggacaacctggtgaaaccccgtctctaccaaaaacaaacaaacaaaaaattagccgagcatggttgtgggctcctgtaatcccagctactctgctactctggaggctggggcacgagaatcacttgaacctgggaggtggaggttgcagtgagctaagatcgcgctactgcactccagcctgggcgacagagtgagactctgtctcaagaaaacaaaaaggttggggggcagtgtaggagctgattaaaatcagcttggttgaggggcacgagtgagggaaatccatccagactccaaaccacaggatccctgctctgcagcaggacttcctcctgccttgaactcaccaggaactgcacctgtcctcctgaggggtcatggctaacacctccaggggaaaatgagctcacagagggaaaaggaaacaccaggcatttgggaaagataactgctagaaatgaaacatattgagcagccagtacttgaactggcattatggggacagatgcaaaaatctaaacaagtttaaaaatatcgtcccagaagaaaaaatattcaacaaagcaagaaacagcagttgtaaagaacaatcagataaaacactaaaaactatagctgaaagaaagaaactcaaaagatacaaaatgtgcacagctgaataattattgtacagtctatgataagtgttggtggagaatgtggggatagtgaactccctgttgctctttgggagggaaagtaaatggggtataaccattgaggaaattcatgcggcagtagtaagtagaattttatagagagagacacatatgcacacataaacacacccgcatacacacacacacacatgcatacatatgttgcaacttaatgaacccactgctgggtaaaagtcatgttcgaggctgctcacctyggtggtgagtgtagcagtgatttgaatgtaagtacagcatcacagttttttttttttttttttttttgagacagagtctcgctctgtcacccaggctggagtgcagtggtgcaatctcggctcactgcaacctccacctcccgggttcaagccatcctcctgcctcagcctcccaagtagctgggattacaggcaaccgccagcacgcccagctaatttttgtatttttaatagagacggggtttcaccatattggttaggctggtcttgaactcctgaactcgggtgatccacccacctcggcctcccaaagtgatggagttacaggcatgagccaccacatctagccagcatcacagtttttgaaactctgcactaccacttactagcttcttgatcttttttggctttattttttctgcaaaatggggataatgatgtaacttaccacgtcgggttattgtaaagattaaattagtcaatacctataaagtgcttagaacagtgcctgacatagtaagcgctccataaattatagctttaaaacaatcttttttaatgaacagaaacccaaccctagggtaattccccagagaagttcctgcaaaggtccataaggggaaaggtatgagacacacataggactgtcagtgataaccgggagttgtagacacccaaggtttatgtaaaataaggtagacacgtgctatgcaaaatcatacagaggtcagaagccattataataaagtagatacatacacagcaatattaaatcttctatcttaaaaatacagtacaaagtgaataaaccaagaaacaaaaagtcataaaataatgtaaattattaaaagttaaaaacatacacagaactatagatacctgaaaaatttaggatatgtatatgtacatatccttctgaaatatgttatatataaaataaaatatagtcattatctagaggggagaaggaatgggagtggggttgagatataaataaaataaagcaagagagaccttgcatagcctattgataaaatgccatattctgaaaagtatcatcaactcaactcctagccccttaggggaactgagagagagagaaagagagagcacaagagagaatacaagaggctggttgcaggtagcacaactaaatcaggaatgcaaagggtagaggcatggctgtatggcaggaaatgtaacagctaatacagtcaatcaatcaatcaatattagtaagtgggcaaagacaatgtgaaaggagagcttgcagtacagcatttctgttcgtttaaatgcaataatgttcctcatattacagaactgaaggaaattaaaggacaaaggtcagaggctttccctcccattctgcaaagtaacacacaccaaacccttttcaaggatgtggagcagaaatgacacctcactacccctgaatgcagtttcagagaagctatctctactctgaactggcctgaacgtgactttgctagagtttgacttctaattcatggatggaataacttacaataaatgtgaaataatttttttaactagggttgatatgagatttaaaattgctgtatatatctagtttattacttctgacttctgtatggctgtccacagccttctgctggtttttctgaagctgggccagggggcagatgtcacctattatatacctcattgtaaattaaatgttcctggttaaatcacagatcttgctagaagcacgccctgggctttgtcaaaaatacaaggagctgctagaatatatttctgagtgatcaagttataactcccctaaattaaatttacagtagagcttattcacttttattccaagcagtaaccatggcactcgcgttaaatcattacaagtgcagcagatatattgattactgccaggcctgtcattaccaatctcagtttacgcacgctgcagcgaactgtaaagtttaattagtatccccgtctggtgttgtaaaacacaagtctggacatatgggaaagaaagatgagttaatgtgaatcatcttgaaaacatgaaaccagcagacagagcaaagcagatagctgaacttgttctgaatcaaagttatttgccttgacatctgtgctgcattatgcaattgggttgggagaaaatattcacttaatcttctcaagaagacaactattattctgcgacgattgaggaggaggagcaaatagcagccattgggtcatgcgacaaagtgactcggaaacacgtggattgctgcattggccatctctagacacagtcacgaacagaagctctgagggacagggccctgtagaaaccaaccrgctgtcctccatgccaccaactctaaaaaggggtgaggttgacacctcaggtgtatcactggcactctttgggaccctatgctcttaagtctatcaccaaaacaccaggggttccgtctaggtcctgctgttccctgcacagaaagccaatcactgagatgaccattcttgccaaggaagaaggcgataatcaggtgctacagctgaggaaatgagagatcaatctctctgaccactaaaattaggagtttatatagcagggaagaaatgtaacaacgtacataatttcctggcctcctccagcccagcatccttccctccacctggcctcagcagctccttccataggtttcttccgtagcagggaagaaatgtaacaatgtatgagaaaacaggaactcagtaaagaagcaatcatgatgaatgagaggcctggagtcttactgcatgcaaagatctggtgagtttcagttctctgatactttttcagaggcctgggggtcctttcctgaggaaagacctcagataaatattaagtttcaggctttaagaccaagagggtcaatttctatgttaaataagtaaataaatgtgtagaactactgggtcagtttcaagtccttcataaattaatccaaactttaaaaaatgtaatcatatttcctgttcttaccacctttaggattcacaagaattatgtcctcttcttggggaacggaattcgcttagctttcacagtgaccagccagcacaaggggaggggaactggatggcaccgaagaatgtcccaccaaagttccatgcagaatgctcagcctgacatctccagccccaggcaccctctctgcctccctccctccctctgcaggagccgtaacttcaaggtgaaggggatgtcctcaccacgtcctgatccccactgtggacccactcagtcaactcctctcacctgatccattctccccggatgcccgctgcttctcagcctttcagcagagccctgaaagcaaccctctaatcactgagccctctgtcagtgttctctaagcctgcctggccctttgcttattggcttttcctcatcgtgaccacctgtgcaggatcttcacttccccagcacctgcagccccggaccaggaaggcccagcccttctgggctctgcctttcgccttttccaaacttcccatctcccacagccctgcttgctcctccactggagccccagctaccagtcttccttgatgctaaccaggcctgggtagaacttgcagagcccagtccaaaataaacaagtgactgacaagaacggggaagtcratctccccttcccagggcctgcctcccaaacccacacrgayagagaaccaaagggactgcaacctctgcacccatgcacttggcacttagatgaggggatgagcaagaaccctcaccaggttcctgcaagcacaccaggaagagccagcatggggagggggtggccatcacctaccctcacccggagatgccacacccagcacacctggctccactgtttccactcctgcactcagtcccccatggggcagagagcgaaggcaaaacacagaaacacagacatcacgcctctaccacatatcctgtcgcagactcaggctgaggacagccaggatcccagggcaggtggccagggggagctgggtcagactcaggcacaggaggcagctaggaacagtccttgagaggccctgggaggcagacagtgcaggaacagagactccaagccccaggcatgctccactgcccattggaccttccttgcaaaacacatgctctaagataaaattaggatttcagggggcaagcatgaaaactctgggctcagtggcccacacagaccaacctgaagatgatgccaactcacccacctcataatttcctggcctcctccagttcagcatccttccctccacctggcctctgcagcttcttccgtaggttttgctctggaccctgtcaacctgaggggagagccacagctcaaggcagaatcctgagtttagaggctccacccagccaggcgaggtggaggtatagagttccacttactgtggtggctgaggcctgaggcaggagtgaaacgggagagttctctgaacctctcgcgggacttgcaacaagggtgtggcctgtttgcttggccaccatgtactcaaaccccttacaagagggggaaacatgcagacagacaggtgcaggagctgggatgagtgcttttgggctccagccgcatagtagtgaaacaggaaaagttcccttgtccccctcacagggcgtgtgacaggggagtggcttgcttcttcagtgccccactgctcaaacctctaggggagcatacagacgggcaggttgtggggctgcaacctcatggcagtgtgtaggggtgagtgtttatagctcctaaagccccagtgggcatgtgttacagggcgcttttttaatttagccatctgcaggtggcttgtgttagctcaattagactctcttccttatcacaaggacagagggatttctgtatcccggagtttcttaccttggtgtactggaagaactggatcgcatgtgggcttggagaatgagttcaaggttttattgagtacaagtagctctcagcagatgggggagccagaagggagatggctttttcctggagtcaggcagctcagggacctgggctctcctctgactgccccagccaaactctgtgtcattctgctggtcaatggcctgcggcatgctggcatctgttggtgtgctcttccgccagagtgctcccctcgatgtcctctcaacgtccagccacctgtgtctttttccaccaatgtgttcctcacaatgtccagccacttgtgtatctgactgctagggtttcaggggtttttataggcacaggatgggggtgtggcaggccagagtggtcttggaaaatgcaacatttgggcacaaagacagatgtgcctgtcctcacctaggtctgtgggggtagagtcctagccaggcaccatgccctcctctacccagcccttccattccccacttccatatcatttaaaaggaccatgctctttccttcccagcacttcagtatcagtagcctctagggaagtgttagaatgaatacccttttagcagttgccatccccagacagctaagcgttaaccagtttagtggagagtcagacagctttttacaccctgtcctcttagtacccgggtccttgtctggcatccaggaagaatcgggtcatgtgaacttgaaggatggtgaatgcagggattttattgactgatggaggtggctctcagtgggatggatggggagctggaaaggggatgtagtgagaagatgatcttcccctggagtttggccatccccagctgaactcctcttgacgttcagacgctccttctcttctctttcttcgccttactgctctgccacccagcagctattctgctcatggagcctggggtttagcrtttatatgggtacaggattgggtgggtacggcaggccaaaagtcaacatttgggtgtgaaaacaggaatgcctgttcccatttagggtcacaggtttccaggcttgagggtggggcttttgccagggaactgccctcttctacccagtatttccctgcctcctgtccatctcaggagaaccacttgagcccaggagttctgggctatagtgctctatgatgaggtgtctgcactaagtttggcatcaatgtggtgacctccccagagtggggactgccaggttgcctaaggaggggtgaactgacccaggttggaaacagagcagattaaaaattcctgggctaatcagtagtggaatttcacctgttaacagccacggccctccagcctggacaatacagcaagataccatctctaaaagmaatataaaatttgtttttaaaaagaagcagcacctgttagagagaggaacttctggtttaataaatcatgactaaagtgactacatctttttttctctctctctttttttttttttttttttttttgagacagagtcttactctgtcacccaggctgaagtgcagtggtgcaatcttgactcactgcaacttccacctcccaggttcaagcgattctcatgcctcagtcttccactagctgggatcacaggcatgtgccaccgtgcctggctagtttttgtatttttaggagaaacggggtttctccatgttggccaggctggtcttaaactcctggcttcaagtgatctgcccacctcggcctcccaagtgactacatcttaaagtgcatagctgggcactcacaaggcacctataaggttaatgcttatggtctgaaaatagctacatcccaagctgaccaccaattataattacagaatatttatggccatacagaacacctcctaccaagcctgcaggatgtccagatgccctaagagtgaagcccactttacttaaagataaccttaatgaacaggcttagattaaaagattaatggtctttaatagcaccaataacccctacctttagtgagaacatctgcacattccaagtttaattatagctccttacagttttttttaagagatgaggtctcgctctgttgcccaggctggagtgctgtggcragatctcagctcactacagcctccatctcccaggttcaagcagttctcccacctcagcctcccgagtagctgggattacagggtcctgccaccatgcctggctaatttttgcatttttagtagggacagggtttcaccatgttggccaggctggtctcgaactcctgacctcaggtgatccacccggctcggcctcccaaagtgctgggattacaggcgtgagccaccgtgcccggctacagatttttatgagtagaggcactaacaaaggatcgagcattcctcctcctgctttctgagggcaccccactctgtagtttctaataaacttggagtagtttctaataaacttgcttctttcactgtgctctgtgactcacctctaattctttcctgtgagagattcaagaaccctctcttggggtctggatggggaccctcttttctggcaatgtgcccacatgggagagaaggacccaaagatgcttccccatgagcccctcctacatattctttctcttccccctactgccccaaacctcctcttcaacatcacccagaggtcctggcccctgtggagcccaccaatctagcaggaatccccccatctgtcctggagctgaggataagcacttsaggaacaagttcattggcttagggaactctctccctctcttgtccttcagccacaggctctgccgggccccagtcctgggccgacaaggagcctcagcattcaacgctggctccagaccccacctggctcaagaccccacccttcagatactccgtgggagggctccttgcaaggggtgccagcactctgacctctgatcaacaaaacaaacaaaccctgactggttaaaatgaatgtaaaccaagaactagcaagaaacaggttttcatataaacactttagatattttaacaaaaatgaaatcaacatcttggagaaactaaaatacaacaaatcagcttctggtctcctggtttctcccaagttttccaacatggcagtgactgccatttattttgtcaccaaagaatcacagaaaaggaagaaactagactttttaagtcctacgtgttttcagtgtaaactgtttttaatcactaaatgcatgtacctcctcccgcaagactccctggctctccctaactccagtgaaactgtggggagaaccctgggctttgtacccaggacggggagggcagagaagaatcctactctccttggggctgctgtgaagcggttgcatctgaaaaaatatcttcctcaagctaaaaggcttctccacagcaaaggaaacaaccaacaaagtgaaaacccacacgatgggagaaaatatttgcaaactgtccatctgacaagggattaataaccagaacatataaggagcttaaacaactcaatagcaaaaaataaaaataatctgatttaaaaagtgggcaaaagatttgaacagacatttctcaaaaacagacatacacatggctaacaggtataagaaaaaatgctcaatatcactaatcatcagagaartgcaaatcaaaaccacaatgagatatcattgcaccccagttaaaatggcttgtatcaaaaaggcaggcaatgggtacaaaaaatagaattaatgaataagtcttagaattaatgacggcacaacagggagactacatcaataataatttaattatacatttcaaaataactgaaagagtataattgaattgttggtaacacaaagaataaatgcttgaggggacggataccccattttccatgatatgattattacagattgcatgtctatatcaaaacagctaatgtatcccatatatacctactaygtacccacaagaattaaaaataaaaataagtaaataaaggcaggcgataacagatctggcgaagatgtggagaaaggggaatcctcatacgctgttggtgggaatgtaaattagaacagtatggaggttctgcaaaaaaactaaaaatagaactaccatttggtctagcaatttcactgctgggtatatactcaaaagaaaggaaatcagtatattaaagagatatctccctcccatgtttactgcagcactattcaaaatatagaatcaacgtaagtacccatcaacagatgaataaaggaaatgtgttatatttacacaatggaatattattcagctataaaaagagtgaaatcctgtcacttgcagcagcatggatggaaccagaggccattatgttaagtgaaataagccaagcacagaaagacaaatatcgcatgttctcattcatatgtggaaactaaaaacgtggatctcgtgatgataccgagtagactgctattagccagagtccagaaatgggatgggggatgaaaataaggaaatgagataggagatacatatgtatttattaccacttaactgtacacttaaaaatgataaagatggtaagttttaaaaaattaaaatgtagaggcatggtggctcacgcctgcaatcccagcactttgggaagccgaggcaggcggatcatgaggtcaggagattgagaccctcctggccaacatggtgaaaccccatctcttctgaaaatacaaaaattagctgggcgtggtggcgcgtgcctgtaatcccagctactcagtaggccgaggcaggagaatctcttgaacccagaggcggaggttgtagtgagccgagatcacgccactgcactccagcctgggcaacagagtgaggctccatttcaaaaataaaataaaataaaattttgaaaaaaaagtgagagtcatamtaggatgaaacagaccttcaggaagaatactggagtccaaaaaacgaattcactgtgcagctaagaaaaaaaatgttgatttctgtagctccactttacgaaacactagcagcagcagcagtagcagtaggaggagagtagtggctgtagtagtagttgtagtcgtgtagccgcagcgccagcagtagtagtaactaggttttgtgagtgttttgcatgtgccggattccatctgtgttatatgctttacaatttaacatggataaaccacagccagtagaaaatttcacttcacaatttttccttcctttttagctggtgagaaatctgcctatgttttcttcctggcatgaggggctaaaatcatttccaatccagcaagcagaacagcccctgccaaagagagagagaaaaattcttcaacatcatatatctgcaggcggaaggaggggacagaaccattactgtgttaaaagactgagaagtcactcagtgaagacacatgtttgcatatctgaacgcagtgtttcccaaatttatttgaccatggagcgaggttttttttttttttttctttaaggcagagttttactcttgttgcccaggctggacacgatctcggctcactgcaacctccgcctccctggttcaagtgattctcctgcctcagcctcccgagtagctgggattacagtcacccatgaccatgcctggctaaatttttttgtatttttagtagagatggggtttcaccatgttggccaggctggtcttgaactcctgacctcaagtgatccgcccgcctcggcctcccaaagtgctaggattaaaggcgtgagccaccgggcctggccggagcaagtattttggggcatcagagatgcccagactcctcagtttatacttgggaaaatgttgatttggccaaaaggcaagtttttgagtcaggctgagttttaactctgccctttggcagctgttcattgtcgggcaaggtacaaggctgtttccttatcggtgagacctagaataatattgccaacatttagtgtgcagtaaggagcagctgatattcaagacawctaaaattcctggcacacaatacatttccagtaaatgacagcttttttttattatttctcagaagaaacagcaccagcatagctctggacaactccaagtccctccccttagtgcacctcaaacctctccctcaacactctaactgcccttagtcaatatattattaatgactccaattctgtcccttccggggatgaggatgtagtgaaagaattggccaaggtgattaataaaaaaccatccgactctccggttctctggacaacagtttaggcaaggcagacccagcccgaaggcccaggtgctgggtggtcctagcaatgcccttgggacccagccagaagcacagaggggtcggagaaataggattgaggcttatggaaacgatactatggagaactgcattgtagactgtagaggaaatccctccactccaggttatttgagtccaaatccctggaaggtattgtacaactctagataacagcaagcacaacaaactgtggtctatagacaatttcktcctgctcctggaggttcaactgacttccctttacccactttgcttccctttacacactaactttaatattcctaatctatgactgtatctgccttcccactcttcccttgaactggtgtattagtccattttcacactgctgataaagacatacccaagactgggtaatttataaagaaaaagaggtttaatggactcacagttccacatggctggggaggcctcacaatcatggtggaaggcaaaaggcammtcttacatgggggcagacaagagaaaatgagagccaaacaagaggggaaacctttgtaagaccatcagattgtgtccaaaattggtgggttcttggtctcactgacttcaagaacgaagccacagaccctcccggtgagtgttatggttcttaaagatggtgtgtccggagtttgttccttctgatgttcgtatgtgtttggagtttcttccttctggtgagttcatggtctcactggcttcaggagtgaagctgcagaccttcacagtgagtgtcacagctcttaaggtggcgcgtctagagttgtttgttcctcccgtccagaactgttcgttcttcccatccggagttattcattcctcctgttgggagttgttcgttcctcccagtgggttcgtggtctcgctggcctcaggagtgaagctgcagaccttcgtgatgttacagctcttaaggcggtgcgaacccaaagagtaagcagcagcaaggtttactgcaaagagcggaagaacaaagcctccacagggtggaatgggaccaaagcagattgcggctgctggctcaggcaacctgcttttattcccttatctggccccacccacatcctgctgattggtccatgttacagagagttgattggtccgttttgacaggtgctgattggttctacaaacctttagctagaaacaagttgtccaagtccccaaatagattagctagacacagagcactgattggtttacaaaccttgagctagacacagagcactgattggtgcatttacaatcctttagctagacacaaaagttctccaagtccccaaatagattagctagacacagagcactgattggtttacaaaccttgagctagacacagagcactgattggtgcatttacaatcctttagctagacacaaaagttctccaagtcgccactagatgagctagacacagagcactgattggtgcatttacaaaccttgagctagacacagggtgctgactggtgcatttacaaaccttgagctaaacacagagtgccgattggtgcgtttacaaactttgagctagacacagagcgctgattggtgcatttacaatcctttagctagacataaaagttctccaagtccccacccaactctggagcccagctggcttccgcctagtggatgccatgcctggactacaggcggagctgcccgccagtccccatgctgcccacccgcagtgggcagtcgattggaccaggcgcctagagcagggggcagcacctgggggagactcgggccatgtggcagcccacagggtggggtggggtggggtgggggtctcaggcatggcatgctgcaggtcctgagccctgccccacggggaggtggctgaggcctggcaagaattcgagcgcagcgccagccagcagtgctgggggacccagcgcaccctctgcagctgctgacctgggtgctaagcccctcactactggggcagtggtgccgctggcggctccgagtgtggggcctgccgagcccacgaccacccggaactcacgctggcccaccagcgctacacacagccccagttcctgcccgcacctctccctccgcacctcctcgcaagcagagggagccggctccagccttggccaacccagagaggggctcccacagtgcagcagcaggctgaagggctcctcaagcgtggccagagcggacgcccaggctgagaaggtgccgagagcgagcgagggccgccagcacgttgtcacctctgaagatctcggccaggcctgctctgtgacttccgccacgctcccacgggtggcggcgaggagcctgagccggcgatggtgctacaggaggcgctggagcyggccatgtgcctggatcrctacccgcatgtgcagcttgaggcctcggagctgctgctggaagatggcggctcagccctggccactgagctcaacaccgccaagcttgccctggcctatgcaggcatggagatgaatgacttggtggtgagctgcggcctgggcctcrcgccagggtccgtgcccacctggctgctggaccccatgcggctcgaggaggagcacaccgcccccrgtgtcaccttggcactcctgcccatgctgaatcaggtggcccggctgctggctgcagggagggcggcctgaccatgagctgggtggaggctgtaggcctgggcctcgagggctgcgagccctcgaccccatgctgcagcagtgcctggtgtgggctgcctgccacaggggcaccactgccccaccctgaaccagaagcctgagcaacgacagacgccacgctgaggaccgtgctgccacygtccttttggggactcatgacattggcctccagcctgcattgagataaacagccggagccccggagagcacctggggaggctcgagcagagtctgctgtggtgttagaagggttttggtttttttttgtgagacagagtctcgctctgtcgcccaggctggagtgcagtggcgcgatctcggccaacagggtttgatctattgaaaagggctccctaggctctgttctctcttaaggtttaataagtatcagaaacacatcaaaagagacctgttctctccttactgcatatgcattttctttctctccatcctgtggatgccaataaacatttaaggattttgaggactaaaaagatatgaatcttgacttaccaatctccctgatacaagtattatcctattgatgttctataaaaagcaattattgtaaccatccaacaggttcttcttgctcgctgcctagacacagacaatttatcaagacaggggattgcaatagagaaagagtttaattcacgcagaaacagctgtacaggagactggagttttactatcactcaaatcagtttccctgaaaatgaagtgatcagagtttttaaggacaatttagtaggtaggggccagtgattcaggagtgctgattgatagggctggaggtgaaataatagggagtcaaagttgttctctcgcgctgagtcagttcctgggtggggaccacgagaccagatgcgccagtttattaatctgggtggtggcagctgatccatcaaggatctgcagggtctgcaaaatatctcaaacactgatcttaggttttataatagtgatgttatccccaagagcaattcggggagggtcagaatcttgtagcctccagctctgtgactcctaaatcataatttctaaccttgtggctaacttattagtcctacaaaagcagtctagtacttaggcagaaaggggatctgttttgggaaagggctgttagtgtctttgtttcaaagttaaactataaactaagttctttgcaaagtttggcctatgcccaggaatgagcaagggcagcttggaggttaaaagcaagatggagttggttgggtcagatctctttcactgtgataattttctcagttataattttgcaacagtggtttcattattatttctacaaaccaagaaaaaatttattttaaaagtcaatgtcattccactccaactacactaactgagccataacagagctctctaaattagtcatctgtgtacacgtggactttggtttttaacgcatattggaaatgtcatttcctttattcatcttatgaactgaccccataaaattcttcatatcaaacagttctcaaccacgtgggctaacaaagcagaaagtaaaataatagtcacgttcaatcatttatttggcccatgtgattaaaataaacattgtaaggcctggatttatatagcctttaaacttttagacagaactttcacatacattttcctgtaagcttattggacaggtattgctattctggttggaaaggttcagaaacaaggcacaaataagtaaatattttagatcaaacagtatcagaaaggatttgtgtttaattttcaaaaacaagtacagttgattctcacaattcatggtagttatgttctataaagtcaccacaaacactgaattagcaaatacttctcttaggggaaacacagagttataggttcctgcaagacccggtcaagtttttatcaactaatcactatataaccttgtttttttgtgtgtttctgtataaagacactttatttcttatttaacatacattgttgatttatcaacattgaactcatggttagtagcactgtagctcatgcataaacaaagcttatctaacacccatattttccctggaagttacgtcacacagcctttttgtgcctaggaacactgaacagcacccagcactctgcttggagccattttatacagtaaaatcaccaacaaaaagcacaacagtgcaacaacaacaacaaaaaaaaagtgacacaaaaaggactttgtttatgttatgagagctggctatgttctgaatgtttgtgtccctccaaaattcatacattgaaaacctaaccccraaggagatggcattaggaaggggggggcctttgggaagtktattagtccattcttgcattgctataaagaaatacctgagactggrtaatttataaagaaaagaggtttaattcgctcacaattctgcaggttctaaaggaaacatagcaacttctgcttctagggaggcctcaggaaacttacaatcatggtggaaggcaaaggggaagcaggcccatcttatatggtggcagcaggagcaagaggctgaggggatgctacccacttttaaacaaccatatttcatgagaactcgctcactatcatgagaacagcaccaacaggaatggtataaaaccgtcatgagaattctgcccccatgatccagtcaccttccaacaggccccacctccaacattgggaattacaattcaacatgagaygtgggcaaggacacagatccaaaccatatcagaagatgattagatcatgagatcacagccctcctgaatgggattagtgcctttatagaagagactccagagagttctcttgtctcttccaccatgtgaggacacggtragaagacggccagcccttgaaccaagaagcaggctctccccagacactgtatatgttactggcttgwtcttggacttccccgcctccaaaactgtgagaaataaaacataaagcaactgtcagattctaataaagcattctgaggattacaacaatgaaaaggctgcagaggcccagaccccttcaccttcatgggaagggcataggttctctctggctgcatttctgagagcacgtrctttgtacccacacccacaagatgttctcaaaggaataaactggttctagggcagcttagcttgagaaagactaaatattataacatgatcttgttggggtacagaatatgataccccacaatatggcactttggcattctgagtactttgaaaattgaaaggcctcagaaattagcctcagaaccaaggcctttctctgatctccccccactgcccccaaccctggtctctctctctctctgatcctctgtctctcccaaagtacagaatgaagctgttttctgaagttccytgctccacctagaaactgaaccccaaagaggaacaaaatygcttttgatcccttccctgaaatttcattaaccagagaaaattaaaactcctatcacagaggaagactgaaaattgaataacactcctgcagcccagacaaacttcgtgctagrycactgcgtgtcctctggtcccattcaattcccaaagagaattatttacttaccattgtctgagcattaggtccattctttcccctraaaattatttaccccagcagcccccatttcctcttgctgtgtgaagtaacaaatgtaagtatctgaaccccattggattattggattatcattcttctgcaattcccttgtgccgcgcacattaaaatacatttgtatgcccttttctcctaataatctgccttytgttagttcattttcagcaaaccttcagaggttgaaggggggaagctttccctctctcccttatagtttttttgttggttkgtttgtttttgtttgttttgaggcagagtctcactctgtcagccaggctgaagtgcagtggcatgatatcggctcactgccacctccttctctcgggttcaagtggtactcctgcctcagcctcttgagtagctgggattacaggcgcacatcaccacacccagctaatttttgtatttttagtagagacagagtttcaccatgttggccagctggtcttgaactcctgacctcaggtgatcaacccacctctgcctcccaaaatgttgggattataggcgtgagacaccgcgcttggccccctcatatagtcttaatgatctgaatgcaaattagcatattgaagattctgagaagcacatgaaaggtcttgcataaaacaagactgcttgccttttcacatttaatccaatgtttcccagaattattcacacaagctatatcgaatccaaggcaaaagaaagttctgttatctgtgattcccatattcaactcatgttatttgttatagtttgcatagcctaagaagctgcctgtgatcatttcttcaatcagttgaattatcaatttatttattaaaatatagcttcaagttctcacctcaaaacactcacatttgtaaagccaatttactgccaaaactggctctgatctcctcctttcagggataggaagatgtgaggattttgattagggactctaagatagtgacattccacagattcccttcttttccattctggtcttaggaagtagtcctttgggctgggtgcggtggctcaagcctataatcccagcactttgggaggctgaggtgggtggatcacctgaggtcgggagttcgagaccagcctgatcaacatggtgaaaccccatctctactaaaaatacaaaaaattagccgggcatagtggcgggtgcctgtaatcccagctactcaggaggctgaggcaggaggatccttgaacctaggaggcggaggttgcagtgagccaagatcacaccattgcactccagcctgagcaacagagtgagactccatctcaaaaaaaaaaaaaagaaagaaagaaaagaaaaagaaagtagtctttggcaatttgtctctaaatccaggatcttcgaggcagaagaatagccttgcaggaggagcagaaagcggaagatccttcagccctgtgtggaaacaaacagaccctcacgacccacctaggtcttatccttggtgctgtcttgagattcccttcccagcaggtccatgcaaagctaagttacatcactaaatagacagcttatactttcttctcatttccaaataaccctgtattcataggcttagcttcagagaagccatcgtgccacaggtgggagatgcagccagggctgaggagggtagggtagtttaggcgatttctgtttctctttgtgttgcttcattaaaccttcattaaattctgctccaaaaaggagtctacaactgttacttgcagaatatctccatttaaaatcatttagcccctgaaaactccagttgattttagcttgtaccattcaggccaaagattatcttctaactcagaagaatatacaaaaatgccttcctcagcctcaaactggaaaaagatcctgtatctgctctcagaatgagcacgaagtaaacctacaaagggcttcctgtatttaaccccttctgtttcctgcctcgtgtgttctcagcccatctttttttttttttttttttttttttctgagacggagtctcgctctgtcactaggctggagtgcagtggtgcgatctcagctcactgcaacctccgcctcccgggttcaagcgattctcctgcctcagcctcccgagtagctgggactacaggcgcccgccaccatgcccggctaatttttttgtatttttagtagagatggggtttcaccgtgttagccaggatggtctcgatctcctgacctcgtgatccgcccgccccggcctcccaaagtgctgggattacagacgtgagccaccacgcccggcccttagcccaccttttacccagccattgtgcaagtggactctgatagaacctaccccagatgtccctatttcccttacttgctgccccagggcttctctgcagctaatgagtgggccaccacccagaaacattcaactgcaggcgtgcaaacctagagcacaagggagttaacactctggagcagcttyaatcaatgagggcgagtcagtaagaaaatatgactatcttctgcttctcaagagaatcattccaagatgcagtctacacagctcttcaaagggtccctgtggatggcatggcagtgaccaaccagctccacaatgcaatcttgcatgaatcggctttctctaccctgtttccttcttcctgctctcccctgccccaactcctgtttcttcaatcacttccccaaattaacaccagcacacgacccttatctcaggctctggtttctgggaggaggcaggctgagatggcttccttccatgagatcctgtaggacaattccctgatctttagcacacacaaaagaaaagaaagaaagaaaaagactccttaaaaaagtaatataggccgggcgtagtgctcacacctgtaatcccagcactttgggaggccgaggcgggcctatcacctgaggtcgggagttcaagaccagcctggtcaacatagtgaaaccccatctctaccaaaaatacaaaaattagccgggtgtggttgtgggcgcctgtaattccagttatttgggaggctgaggcaggagaatcacttgaacccaggaggtggaggttgcagtgagctgagatgatggcaccgcactccagcctaggtgacagagtgagaccctgtctcaaaaaaaaaaaaaaagtaatttatgtgttcattaaaattagtcattggcttttaaataggatttttgtatcttataaaaaattatttaaaattattacstgtacatgtgtgtggttgttagacatctttgaataggtgataatatcttattaagttctttcattaattgagtttaaaaatatttgacacccattgattttatatttgtatgagagtcatgattttacttttttwaaaaattgctctttaaataacagatgctactgaggttgcagagaaaagggaatgcttatacactgttggtgggaatgtaaattagttcaaccattgtggaaaatagtgtgacatttcctcaaatacctaaaaacagaaataccatttgacccagcaatcccaaaactaggtatatacccaaaggaatataaatcattctatcataaaaacacatgcacatgtacattcattgcagcactactcacaatagcaaagacatggaatctaaatgctcatcaatggtagactggataaagaaaatgtggtacatatacaccatagaatactatgcagccataaaaaatgagatcatgtcctttgcagggacatggatggagctggaggccattatccatatcaaactcatgcagaaatagaaaaccaaataccgcatgttctcacttagtagtgggagctaagttatgagaatacatggatacatagagggaaacaacacacaccagggcctatcagagagtggagggtgggaggagggagaggaccatgaaaaataactaataggtactaggcttactacctggttaatgaaataatctrtacaacaatccccatgacacagtttacctgtgtaacaaacctgcacatgtaccccagaacttaaaataamaggttttttatttatttatttatttatttatttatwgagatggagtctcgctctgttgcccaggctagagtgtagtggcgtgatctctgctcacygcaacttccgctccccaggttcaagggattctctcttctcaacctcccgagtagctgggactacaggtgcccaccaccatgcccagctatkttttgtatttttagtagagacagggtttcaccatgttggccaagctggtcttgaactgctgaccttgtgatccacccgcctcagcctcccaaagtactgggattacaggcatgagccaccacgcctggccaaggtttttctttaattgctctttaatagttgaggattcatgaattactgtcaaaaaaactcagtcattttgtgacctggctccaagtagtcatgtggactttccctataagattgtcatgaagggaagatcagacatctgtcttattaacctctctacccccactgacacaaagctgacacatggtaggttcttaatgaatatatgaatggaaaagctaaactcggtaaaataatttaaagaggtttcttctgagccaagatgagtgacctcaggcaggggaaaacaaaaacccaagaagtcttgagtaagtgagcccaaggagatcagattacagtttggttttatacattttagggagacaggagtatcaggcaaaggcataaatcaatgcatggaaggtatacgttggtttggcccaaaaagaaaggatattttaaagcagaagctaacaggtgtataggtggatttagagattatttaatttgtaatcggttagagtagtaaggctctctctaaaacttgtagtcagcagaaaggaatatcttaaattcagattaggatgctaygtagcaaaatcaatggcctgcaggygtgatttaacccttgccttgcatggtctcaggtcttgtttataatttggtatctcatctcgacagaagtctgttttgtcagtccgatggtctctattttaacattaatgctggccagttgtgcttaaactctaagagggagggaatatagcaaggtatgtctgacctccattctcatcatgtccaggaattccatttttaaggttttcttgggtccctctggccaagaggggatcctgttcaatcagaggggggcttaggattttattttattttattttwgaaacgtttgtagaataaatgaattcatgtggtcatggtatcccttatgccaaggtcagtaagggacctaaccatgtgtgaggtgataaactttccgatgagaatgtttctttccctacatctgtctttgttatgtgccacgcccatgatttctgattcctttgccctggggaggcaggtttctaatttgaaaaggaagccagaaaaaaatgtcaggaaaaaataaattgtgatggagaaaagaaagagtaatgtcctgaataggaaggggtgataagtgaagagaataaaagcagttttgatattgatgtgcttattgaatttaaaatgcraagatacattttatgagaaatgcatattgaaggtagaagttasagaaaagagcaaaagaccctgtggttttaaatctaatagaatctgtgacaggcaggaggaaatctaacgtcttgaattgatatggacgaaaatgagaagtaatacaagaaaatgagtgattatttctcttcctagagtagtgtggtctaataaaagtatgatgtgaaccacatacgcaattttaaattttctagtagcaagattaaaaagtaaaaacagacaggtaagatcaattttaacaacgtttcatttctcagtatgtygaaaatatctttgtaacatgtaaacaacatgtaaaaattacttaatgagctatttgacattcttcgttttcatgctaagtctttaaaatgcagtgtgtattttatgtttaaagcatatctcagttcagacaagccacatctcaagtggtcaatagccatgtgtggctggcggccaccgtattggacaacacatgtatgcaacttcaaggtgacaaggctcctgtattttgattcagtggcagatttattaaatcacttccaatttctatttattagaaaacattgggtcttcatggtccccttaatctttctaaaatttcaactttcctttaaacaaaagaaaaatagtactctgcatatcattacattttgatgtttggtgttattaagtacttatttcagtatcagccaaaatgtcaaaaaaaagtctgattcaaataaaatgaaagtcgtaagagccaaacttgtccttaaatcttcacattcacatttaccattagctccttgtagatctgtgtttcaagaggaaatatcagaatgcaggagagtgactgtgtcgggacatctcaaaaccactccagccctgttctgtggctgggattgcgaggaggcatttggaagggtcacgagagccttaggttatactataccwcttactaacatcacaggakcttctgggtgtcattttgccagccagaaacctctgtggctggtggtgcctttgtccgagttttgcttgggctggctaggctcattccacccactcagcccagcaggctgtactcagcccacactaccggcccagatcccacgcctgccaagggcaagccrggcacagagtggtgagggatgtgtaagtgagcgagcatggggtctggacactgcacacaaccaggcatgccagctgctgcagcgggatgggcagctccagacaccagctccctgcgaggcctcagttggaccagatgtactacgagtggtttcccctgtgggcaccagtgtctggactgggtaacaaagtagcttggagatgccagaagccgcagagccctaaagagggtgctacagccctggctgggggagcccctaggtctgggcttcctgaggggctgcagctcttctctccttcttgtcacctgcaacttggaaaacaggggtgcgtgtttcagccctgtttgtgttacagctctttcagtcccaccatttgggtttcctgagttattgtcatgcatccaggaggaatgagatacatggacaaatggagggtgaacaaggtggagaagagatttattgagccacagtacagctctcaggagacccgaagtgggtagctcctgacaggtagcaggtcatcccaacatctgtgcagctctcggcagagaggagacctggagtgggtagcttctatctgcaggcagggcgtcctgccattggcttgagtctggctgaatgggggggtttatgggctaggaagggaggaagtacatgctgatttatccctggatggccatgggcaggccctgaaaaaagcaccataagttctcactctgggctgcagacttcacctagaactgacagcctggcccccaggcttcaggccatccctggcttgaaggtgggcagggacctccccattttacccaggaagctgtctgtctcccgccatcaatgtgccatccatgatgcccaggctgttcatgccaaggggtgctttcaggctcacgtagagccaccctcagcacctcccagcctccctcccacactctttggtgcccaaagtccaaaaagggctgaggcggtgtgtcagcatggtcctgagcacatgcacacctggctgggtcactacagggcccaggctaggctaccttgttccacatcagagcaggccctagatatggggagaggccagggaataagaggaggaacttccgagcctgtgggggtagggggagcttccctggcccccaagagtgcagggatgccggagcctggagctgcagctgggcagctatagctatgcctggggagcctggggctcccaccccgccagcgcggccaactcagtargaggcagggctctgacctgttcctggcccccaagaacacaggaataccagggcctggagcctgttcccagctcctgctggcttcctggagggcgcagtcccaaccacacccttctcccccattacagccggcatcttcacagtggccactccagacaggccactattgccatcactaattccctctttcagaattacctagaagcctcagaggacccagtacgctgtgggggaagaaaaggaataaaagctcccacccactcccagattcagccccacagacttgcatttcccaagtccccaccttctgtatcccataaagatcgtttgcctttagccatggtactcagggtgagcttggctatggcagggsctctataaccttcatcagcacctttccttggccawcctcaataaacagtcattaaaacagtgggcagctatacgaacaaaaaaccacagggatgttccctgatcccagctactttccagacacaccttggttccaaagtcaaattctggagctgactctgacagagaccaccaggtctaggacccaaagttcagtgccaggctcaaaggatacaagacagaggcagactggcaggactcagagactccatccaactttgcccctcctgaagccacaagacagggaatgcctggggctaccaggagctggaagaggaaggaaggattctctctagagtctttgcagagagagcaaagccctgctgacacctgctggcttccagaactgtaagrkaatgcatttgtattgtttgaagatgtccatgtttgtggtcatttgtgataacagccctaggaaactaatgcacccatatgtcagacattattacagacaggcatccttatggttggatcagctggatcctggaagaattgagctcacctgggagctcttactcccstggcaagcaaaagggaactctgaatgctgaacaatgtgccaggaaatggttatttatatgaaagctattggtgggaagaggaatgggttctcaaacctggctgattatcagaatccctggggctatttttaaatagccaggttgttgttgttgttgttgttgttgttrttgttgttgttgttktttgagagggggttttgctcttgttgcccaggctagaatgcaatggcacgatctcggctcactgcaacctccacctcccgggtgcaaatgattctcctgtctcagtctcccaagtagctggaattacaggcaccctccgccatgcccagctaatttttgtatttttagtagagatggcgtttcatcatattggtcaggctggtctcaaactcctgacctctggtgatccgcctgccttggcatcccaaagtgctgggattacaggcgtgagccactgtgcccggcctaaatatccaggttcttagagctcatccacaaccttataaatcagaatttctagtagtacagccaataagctgaatttttaagggtcccctgaggtttctgcttttcgacttggtctcatctccatgccagggtgagagggggtttacttctctatgatgtgtgtgtaacaggcgccatcctgaccagaggagggcagggacaagaagacttctgagttcttcacacagccaggaaagcttgggtaaaaagaaccaagggatcatggtagccrctcacacaaagctttagaggggaagatgccttcttttagggttcaaagcacatttctcattcttgaaaatggatagcagatttatcaggaggcgttgggagtggcctgtgcagtgaaggattaaccttgactgaagataggtttcatcttttgtgccccaacttgggaggtaacttcgaagccactgggatgttctggcagataagaatgcctttgttgccgggcgcggtggctcatgcctgtaatcccagcactttgggaggctgaggcgggtatatcacgaggtcaggagatcaagaccatcctggccaacacggtgaaaccccgtctctactaaaaatacaaaaaattagccgggcatgatggcaggtgcctgtagtcccagctactcaggaggctgaggcaggagaatggcgtgaacccgggaggcggagcatgcagtgagccaagattgcgccattgcactccagcctgggcgacagagcgagactccgtctcaaaaaaaaaaaaaaaaaaaaaaaaaaagaatgcctttgtttaccgaggggctttgggctatgctagatagtctcttctaacagtaagattcatcctggggactttgggccacatgatattaatttgacctcttgaggggctagagactaaggtcagccttatagttgtcagacatatctgtattaccaacctccaatgaaagccctggatgccaggcctcaggcaggttggtgatattccatacttcatatcacacatttttgctaggaaaaagaaactttgctcacgatgccactgggagcagatgactgagtgctctgtgcctggcctcacctggaccatgctctatgaacctttttgcattactaattttaatcaatatcatttcactgtagtaactatagccatgtgaccaggcacggtggctcacgcctgtaatcccagcactctgggaggccagggcaggtggatcacttgaggtcaggagttcgagaccagcctggccaacatggtgaaaccccatctctactaaaaatacaaaaattggccaggtgtggtggtgcaggcctgtaatcccagctactcwgaggctgaggcaggagaatcagttgaacccaggaggcagaaattacaaccagctgagatcgtgccactgcactctagcctgggtgacagacagagactctatctcagaaaaataaaataataaaataaaataaataaaataaaataaaataaaatgaataaactgtagccatgagtataactgctttgctgagttccatgaatcctagcaaactattgaacctgaaggtaatcttggagatattcccaaagcataattataaataaagttttgtgactagtgtttcttcacttaacaatagagcataattgcattttrtattattaarcattttccatcatttaaatggcatatatccaatatatggctatcctcaaacttactttactattattaatttacctgccytactacattactttattattggacctttagatagtacccgaattttccctatggaaatattgctgaaaataacaattataagtagatgtatttgtttgtccatcattttgactttataacaaattcctagaagtgggatactccatcaaatggtacgcatatttgtttcatattgccaaagagtcttcacaaatattttcccagtttacatttctcatacccttgacaattctgtgcattagcatttttccrtttctgccaaattaagaggtggaaaatgctatctgaatattagttgaacttgctttaatttgcacttcattgattactaatgggagtggacagctttttcagatgtttttattagtcctttgagaactccctgtcatttaggagattctcgatctttttttttttttttccagtttgcaccaattcacactcccaccagcagtatttgagaattcctgattagaaaagggccgtattggtgtgagctggactcactggggtggacccagcaggtgaggctggggtttgaatagacgggcattttcatcagggaaacctgcatgtagtgagaggcaggtatatttcagaacctgaggataaagcagctgggtgggagcagagggtgggtcaggttgagcaagaaacagcagagctggctagacgggcctcaaggtggaaagacttgagtcatagccagaccacttatcctgtggacagcaataacccacaacaggtccctatgcaagggaacaatttataactattgactttcttgcttaaccaaatatttaaattctcaacatgtgtggtattgctaaaaagtctgttttaatttttatcttccacccacccaatctcccaagcctccatctgctcaactctgctcctcaaacacatatccatatcgcagtacctataccaccaacactaccatggtatgtactacatacacactcacatacacatgtacacataacacacatgcacacacacaaatatacacactcacatacacacacgcacacacatacacacacaagcacacaaacatacacacataaacacactcacatacacatatacacattcacacatatacatacactcacacatatatacatacacatgcacacatatacaaacatacatacacacatacacaacatatacacacaagcacatatacamacatgcatacacacatgcacacacarcacacacatgcacacaaacacatacacatttacacawgcatgcacacacaatacacactgtacacacatatacacatacatgtacacatacactaacatgtttcgagaagtcagggaccccaaatggagggatcagctggagctgcagcagaggaacataaattgtgaagatttcattttaatatggacatttatcagttctcaaataatgcttttataatttcttatgcctgtctttaatctcttaatcctgttatctttgtaagctgaggatgtacatcacctcaggaccactgtgataattgtgttaactgtataaattgattgtaaaacatgtgtgtttgaacaatatgaaatcagtgcaccttgaaaaagaacagaataatagcaatttttatggaacaaaggaagacaaccataaggtctgactgcctgcagggtcgggcaaaaagagccatatttttcttcttgcagacagcctataaacggacgtgcaagtaggaaacatatcgctaaattattttcctagcaaggaatattaatattaataccttaggaaaggaatgcatccctgggggaaggtctatgaacggccgctctgggaatgtctgtcttgtgcagttgagataaggactgaaataaggcctggtctcctgcagaaccctcaggcttactagggttgggaaaactcagccctggtaaatctgtggtcagaccagttctctgctctcgaacsctgttttctgttaagatgtttatcaagacaatacgtgcaccgctgaacatagacccttatcagtggttcttctttgccctttgccctgtgatatttgtgagacccttatcagtggttctgcttttcgccctttgaagcatgtgatctttgtacctactctctgttcttacacacaccccccttttgaaacccttaataaaaacttgctggtctgagactcgggcgggcatcacggtcctaccgatatgtgatgtcacccctggcggcccagctgtaaaattcctctctttgtactatctcactttatttctcagccggccgacacttacggaaaatagaaagaacctacattgaaatattggggatgggtttccccaatactaacacacatacacacacatgcacacacaacacatacacacaagcacacatatatgcacactcatacacgcatacacatgcacacacaacacatacacacaagcacacatatgcactcatacacgcatacacatgcacacacaacatacacacaagcacacatatatgcacactcatacacgcatacacatgtacacacatgcacacatacaaacatacacatacacactcacatacacaaacacacacgtgcacacatgcacagatgcacacacatacacacatatacacacttatacaggtgtaaaaatatacacacatacacatatatacacataaacactgacatataccacatgcacacacatatacatgcacaaacatgcacacacatacacacacatacacatacatactcatgaatgcacgcacatacacacatacataaatacacacacgtacatacatatacatatgcacatacatacatatgcctacccacccattttgccatccagtgggcccttctggtttgaatgtccttgttccactttttcacctttagaataaagataccttctttaccctaaaggtgtagaataaagtcctacaaatcttttaaggccacagtctgcttgttcatatccttgggagctcagttacaagctgtaccacgatgtgtctgtttccttatcagtctacctgctgacaaagattaagaccaattctgttttgtggttgtcatagtcattaggaaccgatctttcctagaactctccaagccttagtggtctgatttgagggtccstagggaagctttcccacctgagaatttcacacatttgccaataaaccagaaattctacttcttttgagtctcagtgggttttcattttccagcttctcctaataaactgaaagtgctcttactgtcaatctctcatcagctaatattctgatcattggcccatatctaagtggtgatcagacaacagctcggctttgcctgagtgcaggtgagtcgggcaaggacaaaagaaygtgcacactaggacttcacctgtgttgctgcttcctggcagcagactctgaagggagagtaacagatgcccacaactggaatcaraatttaatctggaggccaggcacagtggctactgccttaatcccagcactagaggccaagacaggtagatcacttgaggccagaagttggagaccagcctggtcaacatggtggaaccccatctctactaaaaatacaaaaattagctgggcatggtggctcacgcctgtagtcccagctactcgggaggctgaggcacaagaattgcctgaacccaggaggcggaggttgcagtgagccgagatcacaccaccacactctagcccgggtgacagagcaagactctgtctcacataataataataataataataataatctggaaaatagctgcagaagtagctccagcatgcatattggtccctgagtttcaattctcaatacatcatattaaatgcctccatcctctttacactaacctggatcaaaaaagagaagaactggcatcctgtggacagtaactgtccagaaagtcttgagataaatttattcataaaaccaggcatcccagtgaatctgttgggccattttttaataacttccatgtcttcatcttaaataacacgtatttcacagttcactcctgycttccatcctactccctccttttgttctttctgtgtaamtttctttatccatggcctaagcgctgaggatacagaggtaaatgctgtcacctttcacagactctcagtccgtccctctcgtaatcccttccccatggtgttgtctgtcactcatggctctttgtgtgggtgtgcgcattgccgtgtgatgcaattccctcatcttctcatgaaaacacacgcacagccaagttgactctatcatccatgcttgtcagaagcagggaggcctttgcgtgactctcctctgggttacaggaaagacataaacatgaaaaatgtgcttttaattgtatttgcttgcactcctactcaagtctattcttttttttttttttttttttttttaagacagagtctcgctctgtcaccaggctggagtgcaatggcgcgacctcgccccattacaacctccacctctcgggttcaagcaattctcctacctcagcctcccgagtagctggggctacaggcatgcgccaccacacccggctaatttttgtatttttagtaaaaacggggtttcactatattggccaagctggtctcgaactcctgacctcgtgatccgcccacctcggcctcccgaagtgcttgaattacaggcatgagccactgcacccggcccaagtctattcttaaaagccagaagaaggggcccagcgcggtggctcacacttttaatcccagcactttgggaagccaaggcaggtggatcacctgaggtcaggagttcgagactagcctggccaacatggtgtaaccccgtctctactaaaaataaaaaattagctgggtgtggtggcgtgctcttacagtcccagstactcaggaggctgaggcaggagaatcgcttgaacccaggatgaggaggttgcaatgagctgagattatgccactgcaccccagtctgggcaatagagtgagactccatctcaaaaaaaaaggagaaaaaaaaaagccggaagaaggacccattaacagcaatcacagccccacaaccagcactgaggcaacaacaaggatctctggttctaatttttcttcccaaaatcctctggaggcagcgctgaagacaccttasagcaggggggtgattaagtcaatttccgggaaacaagccaacaggttgcgttgtggtttagaacaaaaaccttgattaaataaattagagtcttgggagccctctttctctgaaccccaattccatggtactcatactaagatgcttcagttcaattctgcaaatgtttattgagcgcctgctatgtggcaagcacagtgcatggcgctggagctaatgagtgatagagcctcttctctctagaagctcatcctgacaggcagacaggacacaccctaagtgactctattactcagtagcctatagtaggtgctaatttaagggttcaaacagaagtgcaatgaggaaagacagaaaggaaacagtaatcagagaggcagtggagcttaagaggtaggaattggaacccagagccagtggactggctcaacactctcaaccatttgacttaatctcattaatcctcaacttcctcacctgtaatatsagcataattctagtaacatccttaytgtgttattctggaaaggatttttaaaacggtggatgtgtccttctcagcacagtgcctggcacatagtaagtgctcagcgtaaatattagatagcakcagggcagcacacaataacttctttgaaaattattataataggattttctatgacctctgaatgttaattttagaaatgttcttaattatggaggaatctcaaaagacttcctggttccagttcttcctaggtgtccagctgccaactccccctgcagatccagggacttgcgggctctctaactgtgtgagccaattcctgagaatacatttctgtctctatgtatacatcctatggattctgttcctctagagaaccccgaggaatacaagtacggtttacatctgaaaacggagcacatccctccccaggcagggtttgggtaacttttctccgaagtcatgacctaaatgcaaaataactgggccaaaaaggaagtccatcaaaaggatagactttttggaatttttcctgtaagtctctattagtttcttaaggctaaataaattgggatatcataaaaagtacttttcatgcttttctgataaatccaggaaaagatatgggagagatatagatatatagatatacatttggttaatgtcagtcaagtgttgtgagaaacggcctctcgtcaagaatatcccagtgggcagctcaggctcctgggttgcctagcaygctgccctgtgacactgtgtggtcacttagcactccaaatcccsctctgccaaatacctctaatattgcttccagctccacaatgccaaaataaagctctatgaaatgtacactaaatataaatagaaataattacacatttgtgactgcgcatcgatttacagatttatagacccatcactcaaagcttgatatcggcatcaactgacatttggtagcagcagttatctcagttcttaaggcttcctgatgctggctacaaagcttatgtgctttatgtgagatccaatttttttttactttttacatgtttatttattacttattttttaaagagacagggtcttgctacgttgctcargctggartgcatgataaaaccccatctctaccaaaaatacaaaaattagctggttgtggtggtgagcacctgtrgtcctagctactcaggaggctaaggcaggagaatcacttgaacccaggaggtagagtttgcagtgagctgagatcacgccactgcactccagcctrggcaacagagtgagacaccatctccagaaagaaaacaaaataaaaataaaactgatggcaataggtgaataacacggaagcagagcaacatgaaaaaaaaaaatctatatatgaaattagatcgaaagagagcccatgaagacctctctggcacaggtcacaatcaatacataagcctcggcctcaaacttcacactcatcaattcacaagatgtcaaactcctgtccaccacatactgcaaccaaagggtgaggagtgctattgtctcatctgaggctggggaaacccggcactcaatcgtatgtactcctacataatcatcaaacagatttgtgcagtggtgtctgcagagtgctcagcggtccatggaggtttatttatttattttttatttttttttgagacagagtctcactctgtcatccaggctggagtgcagtggtgcaatctcagctcactgcaacctctgtttcccagattcaagcgattctcctgcctcagcctcccgagtagctgggattacaggcacgtgccaccacgtgtggttaatttttgtatttttagtagagacagggtttcgccatattggccaggctggtctcgaattccagaccacaaggccgatccgtccgcctcggcctcccaaagtgctgggatcacaggcatgagccaccgcgcctggccgtccacagaggtttagaggccaccgtggaagaggggagaaaaacacagagaacaccatctgtgtctgcttcctgggtgcgccagaacaaagatgaacttattgtctcacagttctggaatctgggaagtccaagatcaaggtgttggcaggactggttccttctgagagccgtgaggaagaatctgtccgggcctctctcctyttccgatggtgtgctggccgtctttggtgttccttggcttaaagaagcatcacctcaatctccgtcttcatccttacatggcattttccctgtacatgtgactgtgtttatactgccccccacctttttttttttttttttaagacagagtctccctctgttgcccctgctggtgtgctgtggcacaaactcagctcacagctcactgcaaccctcacctcctgggttcgagtgattctcctaccttggcctcccgagtagctgggactagagttgtgagccaccacaaccacacctggctactttttgtatttttagtaaagacagggtttcaccatgttggccaggctggtcttgaacccctaacgtctgatgattcgcccatttcatcctcccaaagtgctgggattacaggtgtgagccaccatgcctggcacttccccctttaataaggacatcagttatgtcagacgaggtcccactctcatgacttcatcttcatcaattacatctgtaacaactctatttccaaataaggtcatgttggaggtactgggagttaggacttcaacatatgaattgggagggggcggggcacacaatttaacccatagccctctcctgcttcaaagcctgtatgaatatgtaaactcacattttagaagtgcatttttggccgggtgcggtggcccacacgtgtaatctcagcactttgggaggctgatgcagatggatcatgaggtcaggagatcaagaccatcctggctaacacggtgaaaccttgtctttactaaaaatacaaaaaattagccgggtgtggtggcagtcgcctgtagtcccagctactccggaggctgaggcaggagaatggcgtgaaccyggggagcagagcttgcagtgagccgagatggcgccactgcactccagcctgggcgacagagcgagactctgtctcaaaaaaaaaaaaaaagtgcatttttattttgaattagtataagactcacaagaagttgcaaaaatagtgccaggaggtctcacacacccttcacccaaagattgcttatgtaacgctagttagtacattgtagaaagcaggaaattgatattggtatgatgctgttaactctggaacagatcttactgatcaacttttacatacaaattttcaaatctgttttttaagtccaacaataataagaaaaaataataactacatgttttaaaagatacaaaatgagaatagtaccagtaaaacatgatttcttaatgtaaaatatcaaaatataatgtacttggtttcaagagcagcaaattctggcatttgaactacagtacttgatttgggtttataaaatgttagcaggctattgaggcagaggtccagaagatgaaatattttcctattatttcactggatcaataaactctgctttgtgttcaaagcctctcagctcagtgctttgcaacggttcactttcatttctcctccatttcccctccagaaaccaaggtcatctccctccaccattcggtcttagcagctaagccctaatcctcacaattattagaggaattgttcttaggtcactattctgtttctahtttttggaaaatgcaagatgtagtgtattggggaggggcaaccacaaaattcctgaaatgggcctggcgcggtggctcacgcctgtaatcccagcactttgcaaggccgaggcaggcggatcacgaggtcaggagattgagaccgtgctggctaacacggtgaaaccccatctctactaaaaatacaaaaaattagccgggtgtggtggcgggcacctgtagtcccagctactcgggaggctgaagcaggagaatggcgtgaacccatgaggcagaggttgcagtgagcagagatcacgccactacactccagcctgggcgacagagcaagactctgtctcaaaaaaaaaaaaaaaattcctgaaatgaatttagatctgaaattccaaattctcccatsagaagagtggggatttgagatttctaaggtatagattttacaagttactccttcccaaagaacccatgcccaccaagaccatgatgaggtgaagagaatcctgaagttacaccaagggaaaggaagtcccccacagcaagagaggccaggcaactggaaggcaagaaagatgaggaatgaagcaaacctcagaaggcacatttggataaaaaactgacagaatatgcccttcccactctagattaggtgagagggcaaggttgagtgagtgggcattggaatggctaaagatgggcaggggagggttgtaggaagaggacaygttcatgtcttccacagacctggctcaaggttaattataatacctttgcaaagttgaacctgaccttcctgtacccacctagagctcccactccaagtaaccacttagccattcctgttcctgggaggatttacagggaaaattgtgattgggtctcatcaccatcaatggcatcccattttgttattatgttttaaatcatcaatttgtgccaatattgatagaattagtgagacagtaagtaccctacctgtcggggagaaagcaatacttaccttgacaacctgaggaggccgcactgggtatgtatggtacagatgctaactgaactttaaaggggtcagtacattcagtgaatatatattgagcctgtgcggcatgtcaggctctcctttaggctttggacatacagcagtgaaaaagacaaaccattttttgaccttgtggaacttatcatctaaggggagcaaacaaataacaaatacctaaatgtataatgtaacgccagaagtaatgtgtgtcataaaaaagaaagcagtgtaaagagaaaaagaaaagccaggcacagtggtgcacgcctgtaatcccagcactttggagggccaaggtgggcagatcgcttgagctcaggagttcaagaccaggctgggtaacatggcagaatcccatcactacaaaaaacagctgggcagtacaaaaattagccaggcatggtggtgagcacctgaagtcccagctacttgggaggctgaagtgggtggatcacgtgggcctgggaggtggaggtggcagtgagccaagatcatgccactgcactccagcctgggtgacagagccagaccctgtcttgcaaagaaaaaaaaaagaaaaaacagaacgagaaaaaggaggaaggtgctggtttagattgggtggcccttctttgaggaagaaggaggcatttgagcagggacctgagtgacgtgagatagccaggcaagtggtctaggcagagggaaccataggtgcaaaggccctggggcagcagccagcttacttagggaaactggagggacaggtgagtgagtgaggatatgaagccacgggatagccaggagcctggtcacattggacctcctggtgaagattttggattttgtgcaaatgtttgtagaaagccataggaggattttgaacaagggagtgacaaaaacatatttmggttttaagtaaaacagaagtagatgaaatgacactagttagagggctagtccagcagttgcagggagagatggcagtggcttgaaatgaagctgtagcagaagtggctgaagcagccagatttaggatatatcttgtaggtaaaggcagcaggacctgctaatggatcgaatagaaggtgtgaaacaaggagaagaatctaagattcatactgcgttttragtatggtatcactgattgcagtgggaaactcaagttctgttggctttctgaaatgtgaggtgttattagtcatctcagagaatgtgtcccgtaggcaatcggggtkcccgttaacaaagccttgtaaaatgactcacaaaagaaacaaattgggccggtcgtggtggctcacgcctataatctcagcactttaggaggccgaggcaggtggatcacctgaggacaggagttcgaggccagcctggccaatgtggggaaaccccacctctacgaagaaaacatcaaaaaaaaaaattatctaggcatggtggcacacacctgtaatcccagctattcgggaggctaaggcaggagaatcacttgaacctgggagcgagaggttgcagtgagccgagattgcrccactgcatcccagcctgggcaacggagcaaaactccatcttaaaaaaaaaaaaaaaaaaaaagaaacaaacaaacaaacaaattaggagatgcttaattgtgagatatactggattaataagaaaggtgaagccagctcaaattacaggggcccattatcctaaagtccagtactcttttccccggggtctgtctccagagtgtgagtgtgaagcagtctgcaccaccctactctggccccgtggacttaatcgtggcatctgaggctggttctgcctttcagtctgcctggctgcgatgttgagtcctacctgcgtatcgccacactttcccctgcagggagcctccttccatccctaagcagccagctgcagtcctgctccaaaaggacaggacgctcaggatctaggaaatgagcgttttccaaacaccaggttgaatcccttggaactgaaactagactcagtcaagctcaagttcatcacatccctttgggcagccagctacccccaaccctactacactcacacccaccaggtcccattcaccccggccagagcactgaatttcagcaaccctaccccatacagcgtctgacgctgcagtttctttaaacatttggtgcacttgcaacagaaattgaatttctgaaaaccattttcacacaatttgtcaagtcacatatgctgggagaagagaaacccacctgtagcagaataattttatttctgtttattttaaaataaggaggagaaagctatytgatttcaggctttcttgggaatcttatcctagtaatttggacaaatggctggtatctagatagcaacaaatctatttctgataattaaccgacagtgaaaaatactaaggtcccaccatttgtcatttgaagtgaactatgtgccctgctggagggagtgtcattacgcagctgccgagctagcaaacaaaactagaacatctccagagaagtttctaaccttggctccaattccttagatgaacttctgtgactctcactgcggaaaactccagaggacttttgtctgtcctctgcccagatctgacacgggtaggagcacgatgcagctctcccyaggtgatcagctgtccccagaagacaatatggcaccagacggtctttctcgaatgcttggagaggcaaagcgatggccaagggtttccactgaagctgccatcaggacaggagtgaatgcagggtccttctttgtgattttgaccttcaccgaccttgattattcaatgtgacctttccctggacctacgtcatccctttcaagaacgttattcccatttaccattctctgggtacacagttcagcataattttatttttagacctatgtctagagactaactttaagataatgttcataaaaagttataaattcctactgaaatgtatatggtcataaattttccttcccttctgtttcacagctgttgcctccaaaatgctgttttcaatttattcgcagtcccaccttcttctttctttcgcccaaaccctttcagtttgaatccacaggacactgacagttaagtcaccctttgtcaagtggatgaatgtgcacacttgcatttttctggagccaccaagcatatcaaatcctgtgtgaagagaattcccagtctttctttccggctgccccagctgacaacagggggtcttcactgagagaccctctctctgggcagcttcagtgagagccacatttccagttccagggctgtgaggtgctgtcagaaagccgcagagagcaggtcggcgtgggtggtaacacatcccagagggtcaggcacagcaagacctccctctttgtctccacagactccaacttgaagaccacagccacacagcggactaaattagagagtaggcacttgagattccctaaagaaagacactgcagaactacagggtatccaccatatttatggcatccaaaatgccttgtgatctatagaaatctgtcttctccgcttcttcccttcatcttcccttccatggctgtaaaacttcatttcccacaattgggactgaatgaaagaggactccaataaaaagagggagaatagccaatttgacaccactgtgcagagtgatcagatgcattcagctctgataaaggagaggactcggagagaggcgggcccaggaacccatggctgtctgttagtggagagtttattcacccagatgttgggtgcctgttgctgtaagaggagcttaggaatcagagatgaatgtggttgtcaaggaattatgtgttctggctacttattacgagatatgtggcctgagataattactcaacctcttgagcctctgttttcttttctgacaaatgggaagaattaaatccatcactacacgtaaagagactttccaagtgactacaagtgactacaaatattagtcattatttgtattaaaaataaactcctagaccaggcacggtggctcacgcctgtaatcccagcactttgggaggccgaggcaggcagatcacttgaggtcaggagttcaagaacagcctggccaacatggcaaactccatctctactgaaaatataaaaaattaggccgtgcatggtgctcacgcctgtaatcccagcactttgggaggctgaggtgggtggatcatgaggtcaggagatcgagaccatcctggctaacacggtgaaaccccatctctactaaaaagacaaaaaattagccgggcgtggtggcaggtgtctgtagtcctagctactcaggaggctgaggcaggagaatggcgtgaacccgggaggtggagcttgcagtgagccgagatcgcgccactgcactccagcctgggcaacagagcaagactccatctcaaaaataaataaataaataaaaatgttaaaattagccaggtatagtgatgcatgtctgtaattccagctactcaggaagctgaggcatgagaatcacttgaacctgggaggccaaaatcgtgccactgcactccagcctgggtgatggactgagactctgtctcaaagataagaaattatttttatttttacttttattttattttttcagatggagtctcgttctgtcgtttcgtccgccctaacagttacccgctctacactcatctgccgtgcatctctagccgcgcactcctcccttggaggctcacgcatgctttcgtccctccccctcgacacgaccatggcacacctcgccgcgtttctttgctccgccttactctctctcagtgctcattcttgcctgctcaacaactccacccataatcgacactgttgattctcatttccgtctactcgctatgatccaaccagtcctcggcctcctcaccgatatcaacgacgtcgcttgtgcatcccgtcagactaaactgtccctgtcatagtacgcaacgcttatccatctacctctactgtccgtcccggctacatataatcgtccttcatactctctataaacataccaacacgctcatgatccagctcctccagcccgacccgataatgtcatccagtctcagcaacgccttctcactctacctctcgagtgttcctctctaatggatggtatatgtgtacttcatctgatcgttacacttatctctnnnnnnnnnnnnnnnnnnnnacgaactcggtaaggatttggaagccattagcagcgaccgacaatgtataggaattgtccagatcatggtgctcacgcctgtaatcccagcactttgggaggccgaggcgggcggatcacgaggtcaggagatcgagaccatcccggctaaaacggtgaaaccccgtctctactaaaaatacaaaaaattagccgggcgtagtggcgggcgcctgtagtcccagctacttgggaggctgaggcaggagaatggcgtgaacccgggaggcggagcttgcagtgagccgagatcacgccactgcactccagcctgggcgacagagcgagactccgtctcaaaaaaaaaaaaaaaaagagaatcagtaacaacatgtgggcagcaaacaatgaagctcagatggacaaaaacagggaattgttcccaactagggtttctgaattatgaaaatgattcttatataagtgaagcccctcaaatcaactttcattgcactgcttcctacgttccatgcaccacgctgctgccttgaaggcgtggcttcagctgaccctctcagcccccatattagctcagtctctctaatgctcctatttacaaagaaacaagcacaatttcccacggtcccacttccagcgagtggtggcatcagaatttgagcccagttgttctgaccagcagatcccatgtatttaaatggaatccttggggaggatcattgcaagaaagaccagtgttacaggctgaagtgtgacctcccaccccaaaattcatatgttgaagccctaacccccagtacctcagctgtgactatatttagagatggggagggaatttaggtaaaatgaggtcatcaggatgggtccccatccaacataactggtgtctttatgagaagggaaggttaggacgcagacacacacagagggaagaccgggtgaggataatggggagaaggcggccacttaccggcaaaagagagagggctcaggagaaaccgacaccgccagcaccttgacctcagacttccagcctccagtactgtgagaaagtaaacttctgctgtttaaaccccccagtctgtggtcctttgttatggcatcccgagcaaacagatacaacctgtcatggaaatctcacatcagcacagggagacaaatcattatttagatctcagagccacacaacttgatctgaacaccttcctcatcgtgggaaaaaagggagccttttttttttttttttgagacaaagtaagtcttactttgtcacccaggctggagtacagtggggtgatctcggctcactgcaacctcctcctcctgggttcaagtgattctcctgcctcagcactgagtagctaggattacaggcatgcaccaccatgcccagctaatttttgtatttttagtagagatggggtttcgccacggtggccaggctggtctcaaactcctgacctcagacaatccacccgcctcagcctcccaaagtgctgggattacagacatgaaccaccgcaccctggcaggaagtcaatttttatctccacggacttcagaaagcccaagtttcaatatttcgggttcctgtcattaggctcttagttttataagaacaggaacaactggacatttcaccaagggtagagtatcatgaggcagagccctgtcccttaaacactttactgtttttttagaagattccaggtggagccataccagaactgggcaggtgaaatcctgcctcaaccagtcgctggaggatttatcttggagaaagcattgcagggtctgtggtcgcagtttggactttttgacatttgattatttgcacaattaaaatttattttaggccaggcacggtggctcatgcctgtaatcccaacactttgggaggccgagtcgggtggattgcctgaggacaggagttcgagaccagtctggccaacatggtgaaaccccatctctactaaaaatacaaaaaaaaatagccagacatggtggcgtgcgcctgtaatcccagctactcaggaggctgaggcaagggaattgcttgaaccagggcagcagaggttgcggtgagccgagatcctgccactgcactccagcctgggcgacagagcaagattccctctcaggaaaaaaaataaataaatattttaaaattacaaaaacttttaatgatggagctgggtgtcttgtgtatcctcaggtcagaagcaaaagagccagtttgaatgctcaacccaaactccctggctcttctgggttagcccatgtcccggaactgctggaacatctctcaccccatctcccgctattcggtcccacaagtgctgctgtcactcctgctcctgttaataccgcctcagtgtcatcaacagcaggaaattacaaaggaattcaaatggaaaactaatcccttacaggagacaaagagcattaaagacaaagcccattggaatgactttcattttttttctggtgcgtgcgtgcatgtgtgtgtgtgtatctgtgtgtgtgtgtgcgcgtgtgtgtgtgcgtgtatgtatgtgcgtgtgtgtgtgtgtgtctgtggggggtgtgcatgtgtgtatctgtcggggtgcatgcacaaaaagcaaaggaaagaaaacatcactcttgaagctttccaggccccagaaggcacacaccaaccacaaatctaaggccaaaatctttcctattgttcaactatgtttaacaacaatccacaaaatttaatagagcaatttataatcatgttcaacaaacaatatatgtgcactttatataccccccaaaattaacattttttttgcagtttttagttcccccaaatttctctaccaccttccggtcaattttaatttcccaaagagaagagcaacgtgacagattttgagaaacagaagagacccttgacaactgggagccggcctggcacacagctgggagcggtgtcttcctgttaaacaggcgattccacagaacaccagcacrcaatcactctgtgactaagtggaacaagacaggagcaagaccactccttaatcatgtctaaacactgaaaaaaatagaatcatttgtccaaatcacatagaaaccaaacatctccccatcctggttaatatgggtgacctctgctcctttaccagtaacagcatgagcctctattcattccaaccccttgcagatactgtctgttaaaatatctaatcacaaaatttgcttcctgacaacattcggtccagagcaaagctctgcttccttggatcagccccagaaccaccaaatacagcccgaatcctacattaagtccttcctagcactctcttactgaggtgccccacaactctgcatggggttctctctgtttgcaacaaataaacccaacatgttccacgacagttgtattcctgtagttcctgcccctttacttcaaaattgcacaatccttctgtgttagctgcagttactcagtttacacagaagagcctcagacccagttctcaacaccacttaaattatagcttctggccgggcgcagtggctcacgcctgtaatcccagcactctgggaggctgagttgggt

SEQ ID NO: 93581 - DNA, 48246 bp, Homo sapiens
tgccagctcatatagtatctggtcttcctgaacttgtctgtctcaaagctagtacgatcatgtaagttattgccttaccaaatcactaagacatcaatatgaacaccacatgccatttagacttattgtaaagagctgaattttcattttcaaatatagataagcagtctagatatactttgaacaaatatagccttatatgtctttttcgtcaaatttctgatagtcaaaatgtaaacgtactattacaagattaaaattctacagtatttataattgtgaaggctgttgatctcatgtaaagaaacatttaggaactctgaaatatttaaatacaaacagaaactaacagataaatgtttatttcctctgggtacagagaacagcctgggcaacaaagcgaggccctgtttctacaagaaatgtttttaaattatgtttcttatacagctttaggaacagcatcatctttttatgaaccaaaaaatgtttattaaatctttgtagattttaacatcaaacaaaatgagaggtatatttaatttttagttacttacttcaaatttagcttgtgtcttttaagaaaaaatcctatttgggctttttagaggataagttaaaaggaccactgtcatctttgcatattaaaaattctcaagtggtaaggactctgtaaatatatacaacatctatgacaaaccatcctcaatctagacattaaaaagcacgtaacaggcgaggtgcagtggctcatgcctgtaacaccagcactttgggagaccaaggtgggcggatcacttgaggtcaggagttcaagactagcctgtccaacatggcaaaaccccaactgtacaaaaaatagaaaaaatagctgggtatggtgatgggggcatgtaatcccagctacctgggacgctgaggtgggaggatcacctgagcccaggaggtggaggttgcagtgagctgagatcatgccactgcactccaacctgggcaacagagaccttgtctcaaaaaaaaatataagtaaacagcacataaatagaatgataataaggtgcactctgaacaattggttgtcaaaacaatgcttctataagaatgctttaggataatttctcattgttctgagtctatggaaagtaagaaaaaaatgaaactggcccaagctatggtcctatacataactttccttctagaaaatgtaatttcaaaaaacgttttcctaaattatatttcactatgtaccagaggattgggaagaatattacatgatctattcctgcatcttgagcaatacagaaaattaccagaagtcctggaaagcttctgctttacttgcttgctgagagatttagtaccctaaaactgacagatgaatttgaataaataaatgtttagagaatacagctgccaagaaactggcattggccaggaatggtggctcatgtctgtaatcccagcactttgggaaaccaaggcaggaagattgcttgagccctggaatgcaagaccagcctgggcaacaaggtgaaactccatctctacaaaaaaataaaaaaaattagccaggcgtggtggcatgcacctgtagtccgagctactcaggaggctgaggtgggaggatcacttgagcctaggaggtcaaggctgcagtgaaccgtcatgacatcactgcactccagcctgggtgacagagtgagaccctgtctcaaaataaaatatagagaaaccatcattgataatggaaaaagccaaatattagaaacccagatctacaatgttttgttcatacccttcagctgtgtgttcagaaaattaaagcaaacaaaaacatagctggctgttggcagagagcaattcaccttcattcttcaactacagacaacctgcagattctaagagtttggtaattaccttgtcatatacccagacacattgttaaacaaggtggaaaagcagctatgaaatgttaaaagggctgatcaaatccaagtgtaactgtagtttgcagagaataataaaaaactagcaagccttattgacatcgtatggtttctcctagtttgttggagcctgcagaagaaaatgcccacatggaggtgccttaagagcacacctcttccctatagacacatgctgaaacgttcctcctggacaggaacttcttcatcttaaaagcatttcttatcccgtctctgcgcttctaaacacaaggttttagaaacaaatgtttccaggtgattgtgtgaagcagcacatacatgcatcactgctaaaaatacaaacatgcccgaggagaatcgtaatcctgtcttcttaaaatattttagatggtttggctctgtgttcccaccccaatttcaccttgaattgtaatattccccacgtgtcaagggcaggacgaggtggagataattaaatccccgggccgtttccctcatgttgttctcacaacagtgagttcgttctcagggggagatctgatggtttattaggggcttcttcctttgctcagcactcattctctctcctgccaccctgtgcagagagatcttccgccatgattttaagcttcctgaggcctccccggcgatgtggaaatgtgagtcaattaagcctatttcctttatctatacattactcaggtatgtccttataacagtgtgaaaatggactactacagtatcagacctctacttcaagtacaacacaatcagtgtcgtcaatcaaatcttcaaaccaaacgacttgagcaaagtctacaacctagttaccaggaggaagaaaagcttgatctcgtgaaggttacctcatctcagcaatgccataactagaggctgaaaaacatctaccttttccactgatctcactacagtggacaattagtgaccactaacagcaacgtagcacccgtatcattttcctatactgtacccttcaagcttttaaaaatctaagatgtggcatatctattcttttttccctttttgagacatggtctcgctctgtggcccaggctggagtgcagtggcatgatcttggcttactgcaacctccacctcctgggttcaagcgattctcatgcctcagcctccctagtgtctgggattacaggcgtgtgccaccatgcctgtctaatttttgtatttttagtagagatagggtttcacgatgttggtcatatttattcctatatcccagcaacacattccatgatggtgatattcggtcttgatactggttgaatactgacttaatgtttggccagtcagcattcattgtgaatgtatatgcttatctgtgatagggacaatgaaaatccaaatagccaatgaaagaaaaacaagcaaatctgtaccccatgattaatgaaaatctgaccttgatttgcgaacactaaaggttatccaaaaaggaaagataacactacgtactggaatagtcaaaacctcaaaagttgatgcaaaacgcttaatttggcagggcgcagtggctcacgcctgtaatcccagcactttgggaggccgaggtgggcggatcatgaggtcaggagatgagaccatcctggctagcaaggtaaaaacccgtctccactaaaaatacaaaaaaattggccgggcgtggtggcgggcacctgtagtcccagctactcgggaggctgagacaagagaatggcgtgaaccagggaggtggagcttgcagtgagccaagatggtgccactgctctccagcctgggcgacagagtgagactccgtctccaaacaaacaaacagacaaacaaaaaacggcttaattcaccttttcgtgcattacttttctgagaactcaatacctcaaagttaataataacgactttcccacttatgtaagttaactgaaggactggcgcctccggagttctccaagcatctttacaagatgctatcagcacaagggatcaccttcatacaactgagactagaaccgagccatgaggaataggtaacccagaaggcacctccaggacaggtcaagaaagaggtagctcccagagtagtagcacgcttgggtgctgagactcggaaatgctacattggctggtgcagtctgtactgcgaagtaccaggagacaacctgacagcagacagtggtaacctgtctgtaatggaaaacactaagagactacctaccaggagactgttgtcaagctaagtctgtcctttttctgaaggcaaagcagccactctgcaacagttttgatgtgagaaaacaagggctgtaaaagggagctggcggaagtggtgacataaaggaagaggctggatgtactaggaagagctggctgaaatcagtgactcataaagctgcaaatcgcaaatcgcatgaaaacttgcgtagcaatataatgttgataaaagcaccaggtactagaacattaggatgtttgcaaagtatacccaagctctttaacagcaaatgcagtaccaagaaatataattcaagtgatagagattaatatcccaaataaatattcggcatgaagcactgtggtacctaccaactcagtggctgtggaacttcaactttctgaccgtccacctccaggtcctccaattccttaaaatatttgttctttaagcaatggagaatctcttttgcgtggctattgaaaaataaggaagtttcaaactgatctaaaaaactaagttaatacattgtatcttcttaaatttaagactgcaagtgttttaaaactaaaaccaacttttgcatggagagtaaacattctttagtcactacttttacactgtatgccttcaaaatttaagcaatccacactgtttgagccctaagagcaacactgcattccttctctcctaagcatatcctaccgttaagttttacttgcgactcatttagaaagatgtaactacaaagatggagggggggcgcggaggaggggagaaccaaggggttttatgcattctctataaattctcttacgttccaaaaggtaagaccctcagcttccctcctggaagattccccaggagccgaatcttcctcagatctcattttcatttcgtcttctaaccttgcgcctgcaatacctccgtgaccatttcattggaccctgtgctccccacctcaatgcttcctgaatccaaaccgctgaaacgccacggttctctggcactgtaacacttgtcgaagaaaacaccgtcgcctttaacctccagcatcctggccccaactcccaaaaaatcaggcactgcctccctaccttttgtaaccagtaattcttaaagtggccgggagcggctccctgagagcgtccatgaactggccccactcgccctcgggcacgatcttgagctcctggtagtagtgctcgaacagcttgttctccttgacgatctcggggtagcctccttcccagccctgaggaaggaaagagacgtctaccccgaggcccaaggarccgccccctcgccgccgcctcgcaggcctcggkgtccgggaagcccaggaggagcccctggcccgcccgccgggtcccggctcctaccgcctcgccgcgctttccaccaccctcggcgccatcctccgcgtcctccggccgctgctgttgctggagccgccgaccccgcgaccgccgccccatagcccacgcggccgcgcacgcagcackcagaaaccggcccgccacggccagaactctagccctacacctcccgggacttccggccggaaaccaaggccccacgtgtccgggcctggtcctttcggggacctttggggaccgtccaggaataagcccaaagcgcacaacccgtctttcagaaaagcggcgtgacagggaaaacagcgaacagctctaaggggaaaaaaatgctccaggaagcagccacaaaggcgtctccgcgcgaagcgcccaggtttcccacgcgggctcaaggagctccgcggacagcctgaagccgcgcgtgcgcagagcggcgcggggttactgcggcccyggcgtgggtggggcgcttgcaggtccctccccgcgcaagtgctcgccccgcccccggggccgcacccacagccccggctaccccggagaagcctgacttgagaaccctttctgcagagtcccggcagtgcgggactccggtagccgcccctccggtagccgcccctcctgcccccgcgccgccgccctatatgttgcccgccgcggcctctggggcatggagcacgctgcccagccctggcgatggcaacggcgacgggggtggcggaggagcgcctgctggccgcgctcgcctacctgcagtgcgccgtgggctgcgcggtcttcgcgcgsaatcgtcagacgaactcagtgtacggccgccacgcgctgcccagccacaggctccgagtgccggcgcgggccgcctgggtggtgcaggagctgccctcgctggccctgccgctctaccagtacgccagcgagtccgccccgcgtctccgcagcgcgcccaactgcatcctcctggccatgttcctcgtccactacgggcatcggtaacgtccccggcccccggccccctaccctactcccggcccggcgtcctctccgaccctcccctcactgcccggtgccctctccccgaagcctcccccacccagatgccctctccctgccagatcccccggggcgtcccccatctgcacgggtgcccttccccgagtcccccggccccgggagtttggaaaccagaagggattcgtctggaaagggcgggaaacaaaggactggaagggagtgatggaaaaaaacatgatgaaactgatctggaaagagccactcagtggtcctaggtttggtttccttagccgggcgcggtggcgcctgtctgtgatcccagttactcgggagtctgagatggaagaatcgcttgaacccgagaggcggaggttacagtgagccgagatctcgccactgccctccagcctgggtgacagagcgagactctgtctcaaaattaaatatataaaaataaagagttaaaaagtaaaaatgtaaaataaaaatgaagactagattttgttcccttagatcacgactgtgggggcgggggggagggggttggcctagagtctaatgctgatggtcggtcttgagggccactggtttctactcctttctgccggttccccttttggtatcttyggtgatggtggagctgttttctcccagccaagtgatcagctgcaactggaaacctgstgtcctaaaactgcctagcagtttctccttataggcttgatcactttcagagactttcatgtccaccttatgcaagggaccccaggattgtgggggtggaaagccagcaaccttaaaccttaaacaaacgaagtcttaaagatgacttctaaatctttcaaggtttttgtttwtttgaatatttgaaaactggctgtgtctgaaatcttcaagccttctaataagttggggttctctccaggtcgtatcttttggcttttacacagccaaagcaaacgacaggtcgaaagttcaaaattaaattttaaacgttttcattcaggctctggaaagcttcacagttaaaaaggatgtctctacacccaaggaagttgaactcactggctgtgtgactatgggcagtttacccaacctttctgatttggggtcccaccttaaaacactcacttcccagagagacaggaagaactcagtgtgtgtttataagcctctcttctttctcctggtgtcatgcattccagcgaagagaaagtacacagctccactacttggaaccagtgttgtacccagcacagtttttggtacctgagttccctgaaaaccagcaccttaccctgtaactggtgcagtctgtgtcctcagtgtgctttgatgacttgcactttaaacaagggcaagtcaacattcatcagaggcttagtgagtactgtgtgcctgaaactctttaccattgctttattttttttttggaatgggatcaaccattgctacaatttgaatattagtcagactttgctgtttgtatatacttttccataaatataccagaagctgtatgtctgtttctttatggctaaaagcaatctcaggtcagagtattyggtgctatcctagtcccatcastcatgacccyggatgagttactaagctgccccgcagcaaggtttccccacctgtagaatgggcatggtgatggaacccccctgtgggatcacatgaatttagagcaaaggcaactccctaaaatgcttgcatggtgctggcgcatctgcgtgctcagtacacaatacctagcactattttgcattgctgtgaatgcacatccagacakgtactstgtgtgtcattcatgtgcactgctgccagcctcrtgtgccagcaaaactgtggtgttggaaatcaagggaacacttkacaaagttttgcctgacatcccaagtggaagctttttaacttgagacatcatgtttcrttgtacctacattcactcaagcagaaaaatgaatgcagcctcccaaagggccagagtcaccttgaatgatagaacttgaacagctcattcatacagagtagaacacggaggcacagcatgctgctgtcttccctgaggctgttggataaggagctgctgggatgaaagcccacttcctatactaatagtttaaaagctgctccaagaggattggctgggtcaggtatagtttttttttaaattgctaggctatttttttttttgagttgtacatgttattgtgtacatagtctatgtggtttggggacatttacattttccaaatagaaaagataaacattttccattctacccaagcaactaatttattaaacagtcacttgatctaagtcatgagcacttggaagagaaccagagtggaaacagcatttagcactgaacacaaaccatcccagcagyccctggaagcgtcctggagccctttatttgcacagggccctgcagagaacrgagaacaccacaccyggtgagaggaggctgtgggtacaaggatgactcttatgaaaggcaggagaaaagtgagcctgaggaggcgctggccaggcagagccagtascaccttacacaacctgacaggtgtgcacacaggccctgtgctgacctgtgaggtttcgctggagtgaggttgggccctgccttggggarctagagcctcttttgggagtggcaaggaccagagccaggtccagggactttccacagtccatgaggcctgaaggcagcagcagagctacagctcttcccagagcaactgacwgttytgggaacaatgagtacaggacagtcaggtcaaggagggaggaaaggtgaaggaagggatagagggaatggtgcgctttcatgtatttattcagcaaacacttaaggaagacttacgtgccagtgaggatttctggacctggcgttgtgctggggatatagtgacaagacattccctttgagttgaggagtaaaagacaggttatggagaatstatggggtcttttggacacaaacaccagggagggaaggacaggctgcctggaaggggacagggctggggtggggggatagccatgacgcaggacgagctgtggtcctgaccagttcccccaggagggcaaaggacattttcaggaacatctttagggctcacggtagcgacaaggattgcctgcctcctatctgtgctgaagcctccttctgatcccagggygcttgggttcttgggtgcaggggcggcagcgtctcactggggccctagtcatgtagagcatggagtggcgtctggcatggtggcagcccctggaggcaggtgccttccccagcctcctggcaggcctccctagggccttccgaagcctgtgcctactcctatcacctttgccctctgctctgtgrttacagtgacgccccgctgcatttaccctgttccctggccctctattttgtctccctgggctggtgctgtaacccaggtcctcatcatctgtgttggttcttgctgggcttcttcactcttccccactggtctttctctaccctcgtttgtaaatcctgctttgctagacacagcaaaagtctcccggagtcaagggcattagctctgaactgtgtcggagtcgctggggggctttgcagactgtgcctgacctcakgctctttctctccacccacgcagctttgttcagtattccctgaacccaggctgctttgctcatggattttccttccccactatcagcagtgaattagtcaggggattgtctctgcattgcacattcatttaacaaataactccgaggagcctgagcaggaggtgccrcttgccacgggagtcctcagtgactgcctttgttaggactggtggccaaatggtgcccagagtgcacagtcagatgcccagaggcctcctctttctgacacctgtcccaggtttgtactcagccaggtccatgaccttrtgggactttgcttctgtctttatctctgacgatggtgcctcaaaacattgcacctactttgattccttgtatctctcgtgtaatcctattaatgggctcctgtggrgagcctagcccagcttcacttttaaatgtgcggtgrgtaatgttaaaacacagcagggaactttgagggtraagtgtgttaaaagataaactcaggtgcattaaaattgtagtttttttaggctgggcgcagtggctcatgcctgtaatcccagcacgctgggaggccgaggaaggtggatcacacgaggtcaggagatcaagaccgtcctgaccaacatgctgaaaccctgtctctactaaaaatacaaaatttagctgggtgtggtggcgcatgcctgtaatcccagctacttgggaggctgaggcaggagaatcgcttgaacccagaggtggaggtgcagtccagcctgggcaacaagcactaaactccatcttaaraagaagtcatagcgttttttggagcagaccaattcatgaatcagcaccaaaccacaagcagtatgagctccacctagaaggtgtgtgggaaagccrttttgtaagacgtgtttgcacaagcaagacaaaggaagcatttgattggtcagagtggaaagttccrgaggttagtgggtggtttctccttggaacaatctctcattagaagtcaattgkcagtttctgattgctttaagtttccttccactgttgggtttccatgtgcttatgtaagacacaagacaccatctcagcctgatggccttctaattaatttgttttaataagggcatactgaatccttggcccttgcctcatagattggaataatctgagaaaagaaaaacttctattcaaaagtgtaggatgatgaaaagtgaaataatgatagccaagcacttattttaagcatgctttgttggcagctgtgcaatttggccatcatttcaaaagtcttttacagaaggaaaggctaggygaaaggaacagacccaaatctaggaagtgccatagatttcaatggtctcacgttgttaggggaaaaaagcaataaagtcgatcattaaaattaaccactctcagttttaaacatttaaaaattattaaatccaccatgacctaaattactcccatataaccaaattctctatttcattgttcccaaacttgggggtacaacattataggttgtcctgaaagatgacgtccagwcgctttgagagtcaaatcatttgctgaataaatgccttgttgttataagtaaaccmagggattattattccagtttgttgggaaaatatttcaagacatacttctttagttccctgtgtgaattaaacaggcatagaacttgcttgcaasacgacaaaacccaaacatcttactttaaacgctttaaagaatagtcattccaagtagttgcttgcattttcatcctctggaatgcatactgtgctatattttgagtctttcccctttggagcaggtsccatcgagcatatgagtatgaacagttatttaccagttacttgggtttatactgtatgggtaattctgcccgtttgaatagctggagaaatcactcaagtgctgcttaggagcagacgtttgagaagctcagagttctcagtgcccttgtgtgggtgccaccccacagccctcgcggacagtaagaatggacatggaggcagccccgatgattttgttcttttcaataatccatttttcttcctgggtgcttatagggcactttctttttccttagatggataatctgtgtttgcttgtttattaakttcgcctgattttctccargcctttttaggaaattgaatttagcccaggaaattgaatttctccgtgtctctcattctgtctgttctgaatgttaggtgccaggacttaagatacttgtcaatattgtatgtgaacaaacttacaggtgaaatacatgcttgttgtagaaaacttagaaaataattcaaggaaagaaagaaaagttgcctataatttcatcttagagataaaactgacgatattgtggtattatctttttcccatatctttcattgcttttaatargtttttttctaagcagtagagatacacacatacacatacaacatcttgtaacctacttttagcagttggtaagtatttcttctgacttaatagaaacacttaatgaaaatgactgacagtgaggatttcatatgcttgggccagacattcccatgtctcaacgggtcctcatggtgtggtggctggagcacctgggaaaagggacattgccagccagccctgcctctgtgatgttctctggccatgtcaccatattcctgtgagcttccacgttctgatctgtaaaatagggataatagtcacagttttgcagtgtaaaaaaagggcatttagtataggattaggaattattagaaacactttgataaggaactataagatgcacttttatattatatctaagcttgtaaacttaaccaaaaggcaactgcaaatcgtcctggccattaaagcaccaaataaattctggcacattaatactctcagttcagctccatcatcaaacatgtctcccattcctggtggcctcacagacaccaaggtttgcrgttttcatgggttataaaaacaacttgatgaaaagcaagtcttattcttttttttttttttcaattgagatggggtctcccagtgttgcctgggctggtctcggaactcctgggctcaaacagtcctccttccttggcctcccaaagtggtgggattaccaccacaccaggccamagccttgttctttgcctggaaagaaataagataaaataggaaaattataacatgacagagaacaaagtgtcagatttaatcttacatttactctgattaatcagcaaacagaatctctgtgtagcttcccagacctgactgttttgtattcgttagcttgtaatcagaacagaaaacagatatatgacacattactcaacatcctttttaatccaagtgcttcatagtttctcttaaaaatggtttccatcttaagggactgtcaccttcttgttcaatcctttattttctcaaagagagggaatagttgtttcccattgttcctctatggaagggtgattttgggtgcgaatgggatggtgtaggagaaggggctgtgagtgcccatgcctgtcctaactggggtagtctgggccgcagactgatgtgctgtgagttccatgagtaatttatgtccaggcaggtgcacccaccttccttgctatctgaaattggccccatggccctaagtaggaccctgtcatttatgcctggggtccgctgcactctctcaagtgctgtcgtccctctagagtctaaacaaagactcaggtaaaagccatgcccagacaccttcttcccgaccccaccccacgcgagttccaaattggccacagtcaaaggaaaatcttcaccgacaacaatggatttccaaggaagtaaactgagtaaagctaaagggaatggcccgcaagaagaaaagccttccaggagatgctgagaggggcagagcgcttccttggagcggagtgctaggtccaagtcagagctctctagagggagggaagtcaggaagaagatctcaccttctcctagcaactggaggcagaggcagcactcccctcctctcccctgtccaccactctgttgacttcagcggttttatgacaggcctataggcatcagggttactggtgtccccttccagggcaggaatcagagaacaccagaagagactggtgtcgatctttgtaaggctcggtttccagtccttgcagttctcagacattcacatgagacaaaaaagagggacaaatcttatcctgaggttctttgtgaatgtcttatccagggcatgtgctagagcagaagtcattcaaaaatgcagctacgcagaagcacgtcctcactcccagagcacagccaaacctagaccgcagcagctgcagccatgtagcaccagkgccctgagcaagttgatgtcaagttgatgtctccaaaatataacacacttgtgctaattcagactaattgtcagcaggcttttctggaaagagccaggtagtgcatatcttaggctttgtgggccaagatactgggtaggtatttacgatgagagaaaacacattttcacaaaagtttcagtggtaaattcaaaatatattatcttagtgcattttttgtaatatatgtctaatgagaagaatagaattcttttcttggtgagggataacatttcacttattgggattcaaagttagtgtttcctattatcaacatctattgtaaatgttcctctcttagtgttgatctgtcatgagattttaygtattttatctctataaatggaagcgttgacatcagtccacatgtatatgattttaattgagcatgatcrtcacttggaaggcactcatggaatcctgttagattcttctcttgatctttgcctttccatatggtattacattacagattcatatcttcctatggaagattagatggcaactcttccactgcacagctaaatggattttgaaatatggaaatccaggttcacacactgtatttaaacttagaatttatatccactgcaaactcatgtgagcatggagagctcacttcttttaattttaatagcatggaaagtacagaacgcagtttgatatgacttgtgattggaacaatggcagttgtcatcaaaatgactttaacacagtatgagttttgcacaagtgctgttttgccttgcagctttaggttgaatttattatcaagtctgcagtaaaagctacttaagcccttcagaactcaataatggtggtgagggcagttcttgctcagaaaagtttcagtctcagctctgagctcaaaataatgtgatgaaacttkattaagccatcaaactggtgtrtttatgtgggacaaatcggcatagtcagcttatttgtgacaaaaagttagagaactgatgatagttgagtccatgagagggattgtcattcactgttgacactatgggcttaatcacacacaacagattttctgcaaaagacctgctgatacaaggaatagcatgaaacaccttacatttttacaagtttgtaagtttgtaatttgtttttttttttgtcccatacatttttatcaccatcatttgcaacagcttagcagattccactttggattctactaaattcgtgttttctcaacatctttgaaaatattctcaccggtagttgttctgcacagactatctaaagagcctaacccttcattcacttcagccttgatgtgaactcctcaaataaacaactgagccatatcagtaacatccatagactcamccagagccgacaaagactgctcatcatctgccttgctttttcttttttaattattattttgagacaggatctcactctgtcacccaagctggagtgcagtggcatgatcctcagctyattgcagcctccacctcccaggctctgatgatcctcccacctcagtctcccaagtagctgggactacaggcatgtaccaccacacccagctaattttcatattttttgtagagagggggtttcgccatgttgcccaggctagtcacagccatctacctgccttggcctccygaagtgctgggattacaggcatgagccactgcatctggtcctgccttgcttaaatagactgttgagggtgctcccagtgtccttaactcctctagcmagtgttctccccmaaaggctaattgtgagaaacaagtgtgtattctctggacacgcctctttggttgctgctgttgattaactcaccrttgatgcacagctttccttgcttcacyaaccaatgagcygcccgataacctactttggttgcagcctcattttcctttgttttgtgaagaaatcctgctgccttggcctctgtgccttaaatgttctagtttttctgaccagtgcttttctgtgagttgggaataggctggtgagtgcagagtctgataatattatcctctattatattcttttgacacagttctagtgtcattgccagctgacgtttttcaggtcagaattcaacccacaacttagaagaaaattgggagaaatggatcaaggttcgctggatgtgattctgatatgccagagggaacgtccaccacatacgcagaatgtttcctgggagttgcttctctcacactgcatttgtccattgtttaaatgggtgacatccaatgcagaagtgtcttaagccattttcaattctgtgtatttcaaccttgctaatattttcccttcctctttttcaccttgccttcctgttatccagtattgaatttaggatggatttttttcaggtccagaggcccgacctcttatgaactgagtcctttctattttaatagacatcttgctaaaccaaatccaggccttacattccccttttatgtcttgctctttttttctgtatttcctcaaacttagaatttgaacactttctcacctctatcctgcagtttgcctagtgggaaataacttgaggccgtaactctcagggaagttttctctcaactttctcataccggtgtcccttttgctctttgccgcattgagaatctcctaagctgacttcagaagtgggctgcttgctcttggtacttctcagcttggtacactgaggggtagagtgagagccactctgtcttctgccattaattctgtccatccgggtctaacacaaggcctcctgttctggttgacaaatgggccgaggcaggaaggatgtctgatcacaagacaagattgcctcctgtttttaagggagcctatgacagtccaagaagcccacacgtacctctgtcaaaaccaaattctgcttgttccacaggaaatgttggtatgcaagcacttgcagtgtgcctacatcccaaatgccagcccatggtacccattgtctgcccggatctgaatcatgattccaagrcgcagagagaaattgctgggattcgttrttcttattcattgcttggcaacactgcagcttccaggagaatacccacctcactgatgacacaacatctgaatgcacacttactggccaacacgtgctttgctgtaaatcagtrtgaagtcttcctaggggtcctggcctgaatgagatgagaaccttggaggctgcttttgactcatgtgaatgtcttccccaggagttaagtgggagtgctggggagagagtggcttgaggatgcacagccagcatgacactactattatgtgattactgtcgacgttcataaccataactaatgactaattatgactttaccctggcgcacatggtcagaatggaaacaaataacaagctttacagtttttcctgctctattaaggtataatttacaaataataaaattcacccattttaagtctgtaatttgggctggtcgcggtggctcaggcctgtaatcccaacactttgggaggtagaggcaggtggatcacctgaggtcgggagttcgagaacagcctgaccaacatggagaaaccccgtctctactaaaaatacaaaattagccgggtgtggtaacacatgcctgtaatcccagctactcgggaggctgaggcaggagaatcgcttcaacccgggaggcggaggttgcggtgagccgagatcacgccactgcactccagcctggaccacaagagcgaaactccatctcaaaaaaaaaaaaaaaagtctgtagcttgatgaattttggtgattgcatatagttgtgtaatcatcaccgcaaatcaagaggtagaacagctgtattcctctaaaaaactccctttgtgtcattgtggccagtctccaccctgactctatttttgccttgtctggatttcgtaagtctaaattcagtttcacaatctatttttttttattttctttattattatacttgaagttctagggtatatgtgcagaacgtgcaggtttgttacataggtatacacatgccatggtggtttgctgcacccattaacccgtgatctgcattaggtatttctcctaatgctatccttcccccgatcccccaccccacaacaggccccagtgtgtgatgttcccctccctgcgtccatgtgttctcattgttcaactcccacttatgagtgaagacatgcagtattttgttttctgttcttgtgatagtttgctgagaatgacagtttctagcatcatccatgtccctgcaaaggatatgaactcatccttttttatggatgcatagtattccatggtgtatatgtgccacattttctttatccagactatcattgatgggcatttgtgttggttccaaggctttgctattgtgaacagtaccacaataaacatacgtgtacatgtgtctttatggtagaatgatttataatcctttgggtatatacccagtaacgggattgctggggcaaatggtatttctagttctagatccttgaggaatttggttggtaggctattaattactgcctcaatttcagaatttgttattggtgtattcagggattcgacttcttcctggtttaatcttgggagggygtatgtgtccaggaatttatttatttattctagatttttctagtttatttgcatagaggtgtttatagtattctctgatggtagtttgtatttctgtgggaccggtggtgatatcctctttatcattttttattrcatctatttgattcttctctcttttcttctttattagtctggctagcagtctatctattttgttgatcttttcaaaaaaccagctcctagattcattgatttttttgaagggtttttcatgtctgtctctccttcagttctgctctgatcttagttatttcttatcttctgttagcttttgaatttgtttgttcttgcttctctagttcttttaattgtgggttagggtgtcgattttagatctttcctgctttctcttgcgggcatttagtgctataaatttccctctacacactgctttaaatgtgtcccaaagattctggtatgttgtatctttgttcttattggttttaaagaacatctttatttctgctttcattttgttatttatccagtagtcattcaggagcaggttgttcagtttccatgtagttgtgtggttttgagtgagtttcttaatcttgagttctaatttgattgcactgtgatataagagactgtttgttatgatttccattcttttgcatttgttgaggagtgttttacttccaaccatgtggtcaattttagaataagtgtgatgtggtgctgagaagagtgtatattctgttgatttggggtggagagttctgtagatgtctactaggtccacttgatccagagctgagttcaagtcctggatatccttgttaattttctgtctcattgatctgtctaatattgacagtggggtgttaaagtctcccactattattgtgtgggagtctaagtctctttgtaggtctttaagaacttgctttatgaatctgggtgctcctgtattgggtgcatatatatctaggatagttacctctgcttgttgcattgatctctttaccattatgcccttcttcgtctcttttgacctttttggtttaaaatctgttttctcagagactaggattgcaacccctgctttttgctttccatttgcttggtaaatattcctctatccctttattttgagcctatgtgtgtctttgcacgtgagatgggtctcctgaatacagcacaccgatgggtcttgtctctttatccagtttgccagtctgtgtcttttaattggggcatttagcctgtttacatttaaggttagtattgttatctgtgaatctgatcctttcattatgatgctagctggwtattttgcctgttagtttatgcagtttcttcatagtgtcaatgatctttacaatttggtatatttttgcagtggctggtaccggttgttcctttccatgtttagtgcttccttcaggagctcttgtaaggcagtcctgatggtgacaaaatctctcagcatttgcttgtctgtaaaggattttatttctccttcacttatgaagcttagtttggctggatatgaaattccagatatgaaagaaaagaaaattcttttctttcagaatgttgaatattggcccccactctcttctggcttgtagggtttctgccaagagatctgctgttagtctgatgggcttccctttatgggtaaccagccctttctctctggctgcccttaacattttttccttcatttcaaccttggtgaatctgacaattatgtgtcttggggttgctctcctcgaggagtatctttgtggtgttctctgtatttcctgaatttgaatgttggcctgccttgctaggttggggaagttctcctggataatatcctgaagagtgttttccaacttggttccattctccccgtcactttcaggtacaagagtcaaacgtagatttggtcttttcacatagtaccatatttcttggaggctttgtttcttttcactctaagtcttctcgctttatttcattgagttgatcttcaatgactgatatccttttgccacttgattgatttggctattgatacttgtgtatgcttcacgaagttcttgtgctgtgtttttcagctgcatcatgtcttcacctgttcttctctaagcaggttattctagttagcaattcctctaaccttttttccaggttcttatcttccttgcattgggttagaacatgctcctttggctcagaggagtttgttattacccgccttctgaagcctacttctgtcaatttgtcaaactaattctctatccagttttgttcccttgctggcaaggagttgtgatcctttggaggagaagaggcattctggctttttgaattttcagcctttttgcactggtttttccccatctttgtggatttatctgcctttggtctttgatgttggcgatatcgatactattttttttcggtttgttagttttccttctaacaggcccctctgctgcaggtctgcctgagtttgctggaggtccgctccagaccctgtttgcctgggtatcaccagtggaggctgcagaacaacaaacattgctgcctgttcctacctctggaagcttcatcccagaggggcacccgccagatgccagccagagctctccagtatgaggtgtctgtcggcccctactgggaggagtcttccagtgtggatacacagggggtcagggacccacttgaggaggttgtcccttatcagagctcgaactgtgtgctgggagaaccgctgctctcttcagagctgtcaggcagagacgtttaagtctgctgaagctgcgcccagagccgccccctcccccaggtgctctgtcccagggagctgcggttggctctgcccagttcgaacttcctggggctttgtttacactatgagggtaaaaccgtctacttaagcctcagcagtggtggatgcccctccccccaccaagctctagcatcccaggtcaacctcaaactgctctggagcagcgagaatttcaagccagtggatcttagctttctgggctccatcggcatgggacccactgagccaggcactggagagaatggtctgctggttgcgaagactatgagaaaagcgcagtgtctgggccagaatgcaccgttcctcctggtacagtctctcatggcttcccttggctaggaaagggaaatcccttgaccccttgcacttcctgggtgaggcgatgccccaccctgcttcggctcgccctccgtgggctgcacccactgtccaaccagtcccagtgagataagccagttacctcagttggaaatgcaggaatcacccaccttctgtgtcgatctcgctgggagctgcaagaccggagctgttcctattcagccatcttgcccgcccacccttcacaatctattaatatatagagagcagtaatattgcccaaaaagggaaagttaatctttgtggttaatcctctcccctgagtctcattttgccttttctagaatttcataagtctaaattggatttatttcattggtaacagtgctattcatgttgtctttctttcttctcgggtcagttttggtcatctgtgtctttcaaggactttgtctatttcatcaagttgttaaatttattggtataaggttgttcataatagttccttattatctgagtggatcacgtgagcccaggagttcaagaycagactagagatcagacatagagagaccctgtctctacaaaaaaaagtttttaaattaaccaggtgtggtggtgtgtgcctgaggtcccagctactcaggaagctgaggcaggaggatcacttgagcctaggatgttgaggctgcagtgagccatgattgccccactgcactctagcctgagtgacagagcaagaccctgtcttgaaaaaaaaaaaaaaagagttccttattatcctcttaaggtctgtaggatatgtagtgatgtcccctctttcaatgtgttatacacttatattaaaaagaaaattcaaacagagaataacattttgcattctctttataattttctaatttcttgtccttttattttaactccttaaacctttagtaaaatgcacctaagccagtgtggtacaacagaacgtgatctttctttttttttttttaattatactttaagttttagggtacatgtgcacattgtgcaggttagttacatatgtatacatgtgccatgctggtgtgctgcacccactaactcgtcatctagcattaggtatatctcccaatgctatccctcccccctcccccccaccccacaacagtccccagagtgtgatgttccccttcctgtgtccatgtgatctcattgttcaattcccacctatgagtgagaatatgcggtgtttggttttttgttcttgtgatagtttactgagaatgaacatgatctttcaattgccccgatttacatttaagctcagccactcactagcttgtggccttgagcaacttactttaccactctgagtcttaattttatcctctatcaaatgtggataagagtgcctctgcctggttagctgagctgggggcaaggagttgctgggggaattgggggtggggctagcaggtgaaagtgctcagtgaatggaagccattgcaatggtgatggatgatgtgatgatgtgttccaaatcttattacttagactaggactagttaatggttttaggatagtggaaatcttgagagcctcttgaagcccctagttttctcaaattcagtgtattctgttttatattgcatgtaagtagaatctggagtttgtacactgtggtaaacatgattgaaacgtggtaatgctttattgaaaaatctgctttttggctggatacagtggctcacgcctataatcccaacattttgggacaacaaggcaggaagatcacttgaggtcgaagtttgagaccagcctgagcaacagattgagacttggtctctacaaaataataataataataataataagtgtggtggcacatgcttgtagtcccagctactcgagaggctgggacaggaagatcgcttaagccctggagctcaaggccgcagtgagccatgatcaagccactgtactgcagcctgggcaacacagcaagaacctgtctcaaaaaataaaattaaaatcaaaatccacttttagcttagatataataaattagtataaatgttactgaggatgacatttgtacaagaaagtaagatttaaaacccaaatcatttaagataggattacagaaatgattatctttaattttttaaaaaattgtgcctrtttcttgtttcctaaggtgcttaatttacccrtttctgatgcgaggaggaaagcctatgccactgttggcrtgtacaatggcgattatgttctgtacctgtaacggctatttgcaaagcagatacttgagccattgtgcagtgtatgctgatgactgggtaacagatccccgttttctaataggtgagtgyccacagcagtgaactccgccttgttcacatcattgcttttatattgatgtcccagtggtttctaatgagaaagtccaagcttcctgtgagaacaaagacaacagagaaagcagcagcaccccrgagtcccatgggagagcccagctgtctcagcacagctgggggcagagaggtgacgcaggtgctgggcaccttcccccgcacgggcaggcactgaagcacaggtgcctggtcaggccaagaacccaaaaatagcagtgggctgtagcagaatgagcagggactaaagattgagaccctttggccactcattgaccacataatctcctgcggttccttccatgacatgaggaaaacccagactgggttagcttcctacagtgcagcttctgtgattctatgaacttgaatcaacttttaggtctatgaagttgttgaatttttttatttgtatcagttaatgtgaattaatgtacattttcaacctctaattataactttttaagttctaagcaaaaatgaaaataaaacagccatcaaaaatatttgcaagagcattaaaaattaacactctggctgggtgcagtggctcacactgtaatcctagcactttgggaggctgaggtgggcagatgacttgaatccaggagttcaagaccagcctgggcaacatggcgaaactccagctctacaaaaaatacaaaaaygtagctgggcatggtgacacgcaccatggtcccagcttactcagaggcactgaggtgggaggatcacctgaggccaggagatcaaggctgcagtragccatgattgtgccactgcgttccagcctgggtgacagagtgagactctgtctcaaaaaaaaaaaaaaaaaaaactcagggatcttatatataagaaaggttcttctatatatttgtttagtctatcctagcatttagatattaaaccatactgaggtgttgcttacaatggtagcatgctaaaagtctgaagtcagtctgtcaratttgcaaactaccctgcagtgcttcaccttaagctacataaagtgaccttacattgcattgtgctttttctccatgtgtattaatttataatcatagaaataaactaacacttggatagtactttgttgctgagagatccctttcacatttctcagccatgttttttgttggtgaattagaattttattccaaggtttcatcatacctgaggatcgttacagtgagacacctgtccctcctctacaaaaggagggttggctgagaaggcgtttcaagatccttttctagctccagagtctgtgcctccatgaaatgctagactaaattctttggtactaaactgttgtacactacccccaaatatcttcttggtttacctgctttttgactactttattttcttctgccctacctgtcaagaggaagaacaggcttttgagttcctgtgcagatcacacgatttatgcctccccatgttctctgaggcagaaaggatgtccctaagatgtgaaaggtcagaagagttacacagctggcccaagacatctagacgcagtgaatggcagagcggtgatttccaccacctcaccaagctgagcttccgcaagtggtaacaaggaataagaggaaggggaatttctttctttttttctttttaactaaagatacagattttaaatgtttgccagagagtctcatgggactcacctctatggtgaacaacaacagaagaaccctcctgtttaaagtagctccgcagatggttcgcatcacgtagaggtgactgtgaagctggtcagagattccaaacaccaatcaattgtagacagacctcttgacttctctacaattaaacagaaggatttgaaaaggaaaaaatatgccaagtggaagacaatctaggttaccttttgtgtgttatatttattgcctagagtttattgtttttgtgaggaaacagacgtgaaattacataaataagtaattatgcctactgtagttaccatgaagtaataagcaaataataataatatatttttttttttgagatggagtttctctatcgcccaggctggagtgcagaggtgcaatctcggctcactgcaacctctgcctcctgagttcaagagattctcctgcctcagcctcccgagtagctgggactataggtgcatgccactatgcccaactaattttttttattttttttagtaaagacagggtttcatcatgttggccagactggtcttggactcctgacctcaggtgattcaccygcctcagcctcccaaagtggtgggattacaggtgtgagccaccatgcccagcaaatttctaacaaaaggtttttcaaaacagcaaaagtggttaatctaaaatattttatagaaagattttaagttttttttttgtttgtttgtttgtttgtttgttttttcttgaggcagcctgtcatccaggctggagtgcagtggcgtgatcttggctcatggcaacgtgtgcctcccaggctcaagcaattcttgtgcctcaacctcagagtagctgggattacaggcttgcgccatcttacctggttaatttttgtattttcagtagagatggggtttcaccatgttggccaggctggtcttgaacccctggcctgaagtgatccacccaccttggcctcccaaagtgctgggattataggtgtgagccactatgcccagccagattttaagatcttataaatggaattaaatatttagcttagatgaacacaagtactagttttcttccaatctaagcaataaagggagcttgtctcctggaagaaacataaagtaaccatgttatttagacaacatgattcctttctagaatctcatattggaagccaaattacctaggggtgaaatactaaaatcccaaaaaggtagcaaatcaactataaatgtatggatccaataaatgacttacaaaacgtattataaaacttggtatgaactgctttgcttaggaaaaaaaaataaaagctgattacagtggcaaaatcagaaggaagaaatcttgaaacccttgctatagaccagaaggttttccatgtcctttttctaactgtgaaaaagtattsaatgtcactggtgatgactcagataataatgatgccccacgtgtacattgatttaatattgaactgaatgccagcactaagcagcatctgtctttcccattttaaaaaagtatatcagaaccatcaagttaacctctttttatcaatatttcttttataaaacactgttttggccttttgccttttcttgatggaattaattgatgtgatactaacaactctcctttaagtgatgaaaaatccctgcggattcgtaagaataggagagaaaactggggataccgtgggattctggggagaaccatgcaggcggccacgggagactcttgtcaagaaccgaggaggaaggactgaccgagcaatgctgattgatgagcctgcaggaattctgctgtgggggaaacatagatgcgcattaatttgtttaaatgaggttgtaaataagagaagaccagagatctactcctaggaactgccacccttcaaggggtgacgtacagccagtggtgacagagcagcacaggagcatcacccctcctggttcatgtggtggagatggcagcattgcctcatgcagattttgtgagaaataagtgggatgcgtctgtctggtgggctgactccctgatgctccctggaaaggagccgtgtgcccaagtcagatttctgtccatacttgtcatcctgaagatgtagattgtgatgaacaggtcaaagtattttgagtacattagatgatgtatttgtattattagraaaacaaagccctgcttggcatacctgacaacagtccttaatggtttttactaccagttatggctaatatgttacactaacaatggtaatctgaagggttgcaataatactgttcagtcaggctggggctcgtagtgaaattttacggtttattagcyataatcatcttgcaatttttttcctttaggttttggcttgtggttaacrggcatgttgataaacatccattcagatcatatcctaaggaatctcagaaaaccaggagatactggatacaaaataccaaggggtacgtacagaaagtgaagaatttctgtgaaagttgcttgccatggttcctggctattttagtgttgccagctctaagaagtagtagcgtagtagttaytagctacaagttttcagtgtaagtcatcattattaataacaagtgctattgttattgtcttattagaataacaaaagacccaaatctagctaactgaacagttattaaacaaagcagaaactccagttatatctgtgcttgggaagagaggatgaggaagaatttatgattgacgaggagtgtctgacacttttgtttctagcagtataatggaatagatactttgaccctcctctgaaaacagtttaaaacattggaatattttgaaaatcttcttaaacgcatcagtatactatcaagaaaggaactaatcatcagaggacaagatctaggtgaatgttggaatctggagcgtgtcttttgagaatttgtgatgaggcgccgaccaccatgctggtttataacccagattcgcactacttgtatagtatgaaaaatctcaagccataaattaatttccgtggcctggggtagtggtggactctcctggccagcaaaagcccagatccccaaggggatgtgcattcaacctgagtctcaaagaacccaatgtgccacgttccacagagtaagaggcacggtcacaaggtacagaacccacaaggaagtacagcaccatgagggagagcgtaattcaacatgaaagatttcagatgttagaattaatggaaacattataaagtgagtacttgaaatgctttttaaaaggagtagattacaattaggagtaagaagcaatgtaccataaaaggactagaaaccaatagagcttcagaaaaaattttttaaagtacataaatctaaaactttaatggagaaagggcgtgacatcacttagtttgaaattcttccacttatgttcctagaaaccatatgagaatagcaacaaaaacaaacaatgctacaaacctcaaattacttaaactgtgaccctgagaacctggaatcagcaaagccagctccagacgtgatggtagtgtgatagaagtggcagagaagagaaaacatgacagagtcctagacaggctgctgatcacctattcagcccctgggtggattggggaagaatcctctctttggtgttgggcttatgagcaaactgyaccctcatggggtcatcccaaggagccgcttcctctggcaggtacagtggctgggagagcacagtgtaagctggatggtggccccctcgcttcctgcccagcacccttgcatggggaacagcatgattccaaattaatcggcaagtgttcatcccctgaaggagagggccctgtcctgaggaggagctgccatgagccagactaagaagggacagggcacagtcctggggaaggcagaatgaaaaggtgcagaagataccagaagccacagactggcagatttgagaaacaccacttccaaaagaaagggcatycccagagacggcaggatcccatgggagggccctcctgggccaggctggttacggaaaggcctgcggtgccttatacagagggtcctgtccactgttccacagtagttgagatgccacaaaaacttttcagcccctgtccctccatttcctgctctcagtgtctgatccttgttctaatccaacatattcaaaccygaacaacaaaaaaggtacaatccccaaatctgtgcagtcataacattaggacagcaaaaaagcagcaaaacttacctgagcagaaacgtgtttcacaaagcaggggaaaattgtaatcaaaattccaacatgaattttaaaatgtgaatggaggccaagcgtggtggctgacgcctgtaatcccagcatgttgagaggccgaggtgggcagatcacatgaggtccagagttcgagaccaacctggccaacatggtaaaaccccatccctactaaaaacacaaaaattagctgggcgtggtggcacgtgcctgtaatcccagctacttgggaggctgagacacgagaatcacttgagtctgggaggcagagggtgcagttagctgagatcatgccactgtattccagcctggacgacagagtgagactctgtctaaaaaaaataaaaaaaataaaatgtgaatggagcagttgcagagtctatacccatcagctaaagaacacctgcgacgaacccgcaatctacaaacttattacctgtcgcagtaaagggagacctctccctgtgatgtttccccacagcatgtagccgccttcctgaagctagtaatcaacccagcttcctgacggcctgtggccatcaatggcatctctgtgaacagacaggccaaaggaaatgcagaagcttggctgtaactctcaggcagcaggaggtgacaccagacatcggtgcagatgacatgggacacatgagacttagggaagaaaatgcttctaaaattcttaatttctcctctccaagtactaaccaggctcagccttgcttagcttccaagatcagacaagatcaaaattctttatttctaatcatttaaaaaaaaaaacaaaccacagaagcatgttagaagatagaaatggaaaagcaaagaatatgaaacctagactgggtgcagtggctcacacctgtaatcccagcactttgggaggctgaggcaggaggatcacttgaggccaggagttcgagaccagcctaggcaacatagccagactcccatctccacaaaaaaattgaaagaaaattagccaggcatggtggtgcacacctgtagtcccagccactcaggaagctgaggtgggaggatcacttgaacccaggagtttgtggctgcagtgagcctcgatcataccactgcactccagagggagaccctgtctcaaaaaaaaaaatcttttttttttttttgagayggggtctcgctctgtcacccaggctggagtgcagtggcgcgatctcggctcactgcaagctctgcctctcgggttcacgccattctcttgcctcagccccccgagtagctgggactacaggcgcccgccaccacgcctggctaattttttgtatttttactagagatggggtttcaccrtgttagccaggatggtctcgatctcctgacctcgtgatccgcccaccttggcctcccaaagtgctgggattacaggcgtgagccaccgygcccggccaaaaaagatcattcttattgtgaatgatgttttggtgatagctggagaaggtagggaaaatatatccatcctaggcacattgaagtccatgaagaagaaatccaaagcattggaacagaatatattttaaaaactaattcaagaaagcttttgtgaagtaaaacaagacamaagagcgtctgccgtttgcaggtacgcacmctataccggaggaagtggacaggaaacagtgacgatcatctgcacgtgccatgagtggcttgtaagggaaagttcgttagattcttcagggcagcgttccgtgccagggtcttagaggcagcaacacgagaggcccaaggaacgtggaagccaaaatattatcctagctttggagtccctcatgtaaaatctgtcaggttttgaagactcaggtgtagggagtctgagtgctgtgccccatgaagactccaccatggtcggctttgtgaccagctcccttcgctgcagactcttaattttgcagggcgttttcatgtgacacattgatggtttctaatacacaggtgtgccgtctacatccagtgactccgtgaggtctttcagaaacgcttcgcaggactctgttaatcatggtgccataactggttagggtcaaaggagcaagtgacaaaatgaacaaataaagagataaagagaggtgcacaggtgtgacgtccatagtcagtacatacaggctgaactagggcttaggacaagtgctgtgggctgtgtgtgacaaccagtttgtggttttgtaatgtggcatctgtaagcagcctgtgtctcaagaggacattttttagcagattggcatctgcaggttttccagtctaattccatgcttaccagtccamccatacggttccaccacaccgtgtgtcccacaccagacacttaagagagaagsttcactgagcaggcggcatgcaggaaggcatcgtggccccagccctgcccacaggctgtctgccctttgggtgactggcatctgcagggtatggtacaaaggtccttccacgtctgggattcacctgcccagggctctgatgaaatacagatcatgattaacgtaatcttgtagaaagttgaagcagttacagaaatgggtgaataagaaagtgaaagtgactaagctccatggcccagaaggaacagcgctgtgaatgctttgggtccattcttgcaggtgcttctgcaggtgcacatgcccacacatggcgaatgacattctatttattgggcattaagtttgatatttttatgttttatattgtcattaaaaagttcacttgtcaatgaatattgatatttgtattagtctgttttcactctgctataaagaactacctgagactgggtaatttatgaagagaaaatgtttaattgactcacagttccgcatggctggggaggactcaggaaacttacaatcatggcagaaggcaaaggggaagtaaagaccttcacatggtggcaggagagagagcgagtgaagggggatctgcctcactctttcaaaccattacatgtcatgagaattcactatcacaagaaaccgcctgcatgatccagtcacctcccactgggtcccttccttgtcctgtggggatcacasttcaagatgagattgggtggggacacagaatcaaaccatatcagtattattttacaattctgaattatttcaagcttacagaaaagtagtagagagttcattattgcaaacgtctacataccccaccttccttaagaaaaagaaaagcactgtgctgtctcrggctcagcaaaaccattttctttctttttaaaaaaatagaccatctcaggctgggtgtcatggctcacacctgtaatcccagcactttgggaggccaagagaggtgggtcacctgaggtcaggaattccacaccagcctagccagcatagtgaaaccccatccctactaaaaatacaaaactccaaaaaaaaaaaaaaaaaggtagccaaaagccctcatgcatgcatgtaagttgcagtgtgctcagagatgtagtctctaccctatgctgcagtatttgctgaaattggtcttatgacttagggcgtaataggtttgtcttttttttttttttttttttgagacagagtctagstctgtcacccaggctggagtgcaatggcacgatctcggctcattgcaacctctgcctcctgggttcaagcgattctcatgcgtcagcctcccgagtagctgggactacaggtgtgtgccatcacacctggctgatttttgtattttcagtatagacaaggtttcaccatgttggccaggctggtctccaactcctgacctcacatgatccacctgcctcagcctcccaaagttctgggattagaggcrtgagccactgcgcccagcctaatttttttttaaaaaaagytctgtccttacatgccttcagaattttctcagctctgcagacatagtgtccagttggaacctggggcagatcacaccaggcctctctaaacacacttgagtaaccacaaagctacagcctgagggtgagtcccaagtccaaggaggggccttctgccctccctctctgctgggacccttctccccacccctcatctggtctttggagtgtgccagccattgctgtctgcctcagggcctttgctgcatctcttctcctgcctggagcactcctgagagcacctccagcacctgccaggctggccctcacctgcaagccttgaatcgaccctcaccttccctgtggcctgttgccagccactctgtgatagtgacctcctccaccccatyccagctccggggccccctcactctgccctgcccctcgctactcctccccctccatgagctgtgtgctctccttgttcatgacactggagttcatggttctagatgtggggagggtgtctgtccaagtgcctgggcagggcatggcccataatacggactcagtgcatttgtgaagatgtgacgaatgaatgaatctgtgcttgaaaatgaatatctttgtccctcattgctctagggttctatctaggtccattttacatggtttactctstattctctgcttgcatgatccatcagcaggtgcactggtttattggtgtcttccactgtaactgtatgtgtgtgtrttcacatagacaggtattgatatacatatgtagttgatgatcagaagttgtgatatgaattagtaaaccatgtaacgctggatatgtcttactgattaacattctgtaaggataatatttttccrttcttgaatttatgttctccaggtaagtattcactagcatctctgaagtccgtatttcattttgtagtaaatgcactactttggtctgtgttttcttctaggaggcttatttgaataygtaactgcagccaactattttggagaaatcatggagtggtgtggctatgccctggccagctggtctgtccaaggcgcggcttttgctttcttcacgttttgttttttatctggtagagcaaaagagcatcatgagtaagttttaaaacacttttaccatttgtaatttgttctttgactatattattaccatttttcaggctagatttttgaagtgttaatttaaatcgctgaattccagtttattctgtgctttggccaaacaagtacaaaaccaaatagctgtagaatcacccagctctagggaataatcaggtccacatcagcacagttgttctctataccacgtccttagcctctctgaattgacagtgctgaattcagtggtcaagttagacaccaagcaggggattcagggctctgaatgggaaatactgattaaaacagatccctgactgagcaatagccaatggccagcttgcgaatgctgcaggttgaggaagtcctgaagaggtaggtgaatctcagagcccagcgacactggcagaactcatacacacaagagctctccagctatgtggtggcttaggccatggctctgaacctggggtccttaatgggctacagaagctctgcatgccccctaaaatgacatcattttccagagaccgggtccttggcttttatctgatcccccaaaaggcttgcgagccatttgaccaacacactcataaagaaatcaaagggactgggcgcggtggctcatgcctgtaatcccagcactttgggaggccaaggccggtggatcacttgaggtcaggagttcaagactcacctggccaacatggtgaaatcccgtctctactaaaaatacaaaaattagtcaggcgtggtggcgggcgcctgtaatcccagctactcgggaggctgaggtacgagaatcccttgaacctgggaggtggaggctgcagtgagccgatatcgcaccactgcactccagcctggttgagagagtgagactcagtctcaaaaaaaaaagaaaaaaggaaaagaaattgaaggatgtcaaggctgaagtgaatttagagaacatctttctaatccaatggatgaggaaactgaggttcagggagcagagtctgaggccagccaggagccccatctcattgacgggaagagatctcaggagcaacgtgggatctttacctgccctgacattggcgcgtgtccctgacaataaatgatggagactgggcttagcaagcggccagcctggtatgcacatttactatgtcccctgagccacccacttcatccactcaaaacatctaatcgaaatctccaatgctgctgatgctacgaggtgcaaaaatgtataactctgtcctacttcatggagtttatcatcttttttgggactaaggacagagagaaaaagctaaaagaagaatagattgatatggtatagtgggaagagtacctaggtgtacttcccagcctcaccacgagtttgcagatgcaaaggatgattattggagataagaagaagaaaggtcatatctgaagtatctctttgtctaattttttttttaagacagcrtctcactctgtcacccaggctggagtgcagtggcacaatctcagctcactgccacctctgcctcccaggctcaggtgatcttcccacctcagccttccragtagctgggattacaggcatgcaccaccaggcctggctaattttttatattttttgtagagttgtggtctcactatattgcccaagctggtcttaaactcctggactcaagtaatcctcacacctcagcctcctgaagtgctaggattcgaggcgtgagccawcgtggctggcctctttgtctaatacttgaagaagtgatagcataaatgtgagctctaagagcagcgccccgcattcttcgagacactccatcgtgccagtggcctggtattttcacgcatagacagtgaggagagagcgagatcagagagccacgacctacctaaatcccagagctgctgagaaaaacagaggggtctgcggaaagttgagtgagtgccgaaggcagagagggtttgagaaggaggctcaatgccaggcatggcagaaaacactgtgggccaggaatgggccttctgtgctgagaactgtgtctgccagaaggtcatatgagagtcctaagccctggcacctgtgaaagcgaccttactggagaacgttatcagttgagatgagaaggggaaacgtggatwgacgtacaccaggtgatcacacagagtgggaaggccatgcgaagatkgacacagaggcgggggcgatgcagccatgaacccaggaacacgtggtgccaccagagctgggggaaatgggactggaaccttccctgaaccttcagagrgagcgtagccctgctgccaccttgatttccaactcctggcatccagaactgggagagaatcagtggccgttattataagccacccagtgtgtggttaactttgttctagcagccacagggaactgatacgccagccttccagccatttaaaattgactgggaaagtaagggcaggagtatgattggtgaacccctctgttttctcctccgccagatgactttgttgtcaccggtttggttgaaatacaacgttatctctctaaatatacattctacaatctgacttcctcccctctgcgcccgctgctcccagcackgcacctggcctgggcctcacttcccggtgaagatgccatccttttatattcctaatatttgatgtgaagaagtgagtaatggctcatttctcattaaaaraaacaaatgagataacactgacgtttaaaaaaacacggatcagagtaagattgaacatgggcacaccaagtcagtggcaaagatgttttctcaaatgaaatcaggaaacaggaaagcccctctcagtatttgaatatgaaacatatagaaatggaaaataaataattcagttatctaaatgaaagtctttgctaatgaaaacccaaagatagtctttgcagaagagttcatgagttgaaagagctctttgtcattcatttgctgtttaaattggtgtcagtgtgaaaccagttttaagccctgaagaattaatcaattcagttttgcagaagtatgttcagaaatgtaggacttacaagctgagaataaaataaaaactcctttttaaaaaatattttcataaacccaactaattaagccatcaaataaaagtattccaaaagaaaacatgccaaggatctattccttgcactccatttataatgttctttttttttttgagacagtctcgctctgtcrcccaggctggagtgcagtggcgcgatctcggctcactgcaagctctgcctcccaggttcacgccattctcctgcctcagcctcctgagtagctgggactacaggtgcccgccaccatgcccggctaatttttttgtatttttagtagagacggggtttcaccgtgtcagccaggatggtcttgatctcctgacctcgtgatttgcccgcctcagcctcccaaagcactggaattacaggcgtcagccaccgcgcctgactggattataacgttctaaaaacaaaattgtattcaatgaaatctttctataataatcagtatttaaattcataaatgattgcattgatagttaatgcattgatttctaggtcagaaacagtcaactgtgctgggttgctaacaaatattctcttaaagggcaaaatttaaaggtattctaaggagtaagaaaaatttaatcatttaaaaataaatattttatttctatataatggtttctgtgaaatacacttaacctcttcagccaacatcccttcattgtgtgagaacaccctgacctcacacatgttctttctgatgtcacggagcccagccttgctgcccagcctggtgggggggcgcgttttctcggcatcctgcggcagtcctgtgtttcccatctcccacctgccctctcgtgtttgcccatttcaggctctcctgctgtcatgtactctgcccttgccttttcgggccagggtgcccatcttcccaygggcagtttctgggagagaggcgctcaccygctatgtcactgtgcggyggccagtgccgctggcccatggggaagctcttcagcacttgcaagtgctggatggcctggatcccagcaggcctgtgaacaccttcagcctctaaccagcgaacatgtttgcaatgcactttcgcaggtttgacaccagctgttaggcttggccacgttgtgtgttgggcactcgtgggtccatgcgccaccactgagccacgtagctggaaaggctgcagtctcgaggcctcatgccaggggaagtgacgcttgatccggaagtcctgaccgacttcttagaattgttcttattacatgcctttttggggacacagaacatacaaaagtaaacgtggccgcccagtatgttcgaattctctatttgtggattccggtgttaaacttaactaagaccagcagggttttgccaactccctctcagtttctcgtcctcatatgtttctaccacattaacaatgagctaattgctttctatcatgatttttagtctgttgtttaatctttctgtgtgtgtttatagaaactccctttctccatcttgtcaaattatttctaatttttactccatgcacttagttgccacctttcccaactggctattatccccaaaacaaatgagcacgcctgcattgatacaatttatatcaaaacggaaaataatgtttgtttcgagcacaaggctgaatggtggacaatgccatattgcatttccccagatttcaccgaatccttactaagagcgttcatgagcctcctggtatgcagctgggtgcccactctacacaccctgggctaggccagtagttcccaactgcaggctggagaaaactgctggagtcaccagcaggtattcaggaagcacctacttggtcctgcccctcctccagcctgcatgctttccccgggggctgaaaagacagctccgcaatgtgctgatcagtattttcatcaaatgtcagtaattttccttccagatagaaargtgaattctatgggctacttcttctgaatcacactttatgattagatatatttaattcttcatgataataggcaaaattaaactataagtatgaaatgccaaagtttttgttactacatttaaaaaactgagtactctttkgtaatgaaaaatattgtcacttttgttagcattggttaaatgtctaagcgacagaattatttcmttttttaatttttttttcttaggtggtacctccggaaatttgaagagtatccaaagttcagaaaaattataattccatttttgttttaagtgcgtttttcatgaaattatcttcaacttgaagctttccaatggcgcttctctatggactttgtaaataagttatatctttgtaattttcctgctactttatcattttcaagatgtcctctaggaattttttttctagtaattttgcaatctacctaataagtacctaaatacgctgaaatggaggttgaatatcctactgtgtaacaggtcagaatttcaagctctgggtaataactgctgatattttttctaatttcaaatttacctcttttggctatgtcttgccaagtgtgtatgagactagactttacaactgtctttgatggcattttcagaacaataaatgtcacaatcccttctatagccccctacagtgatctcttcaaggtcaactgcagtgttgcttccctccccctatagggctggaatctgtctaggagccctctctcggaggccayagaggcygggggtagccattgtgcagtcatggcccgggggaaacttgccaaccttcgtgtcaggtgctgtgtrtaagtggagaacttggggatagaggaggaagctcctcgtggcccttccaaggtgaggcaaaggcatctggacttgttccagcccrgcccaccgggtgacatcaccgggcagggaggggtgctggtggtggttcatacggagtaagctgctctgcctgtgtgagtggctcctgggccctaaacaggcacctttaggccatgggtcactcaccgtgagccatcaatgtgctctggtctgacatggtttctctctgtcttctagtctagacctagtttttttgttctgttccccacgtatggatatagtagagattgttgtctgtgaaatttctcttttgtagattttgagttttcccttgtagtgtaaagaatgatcactttctgtaacaataacaagaccactttttaagatttatcctgtttgttctttgttgatygaaacataataattgttaaaattctctacagccttctttttcttccatagctaatcttccttctaatagtttttgctttctgttttgctgttgttgctttgcaaagctttcccctcatagcctgtacctgttatcaatataaaataatcttcctgttgaatgcttcatgacttgaattctactttgataaaaacattgycatactgctttttatcttgatgaattcatctggcattgctttgccttatcatctcatctggagtttttaaatgccatttgtttcagttgtctttaacaacataataaatagactttgccatttaacaaggtagctcaaattcttttactaattgttacatcgaaacattctttcatcatatttcctgtttttatttggttttttcaacttcttctgtttactatctacagtgatttggaaaggagatttcctttaaaacaaacaagcttattgggaatggcttttatgatttttaaagtagccttgagagcttccagttaaatctgatgagctgaacatacacctttccttctcccctctctattctgaccccagttgaaatcacctcaaaggaatttaggtgggggagtggccccataaagagagtgagagagagtcaccactgcagatggaccacagcacgggtggagatgggcctgatgtggcagagcagagaggccatgacagtgcacaccctgcggagaccctgggtcctcacatctgggctgacagaaggcagagggaaatgagcatctcaaagtgagaccaactaaacatggcgcctgcagcagaaagcagtgtcctctgcacccccactctccagggagagcacagagagcccagaaatgagccatgtgcccattgccggggaagagaaggtaggctgaggaggtggcctttcctaacacaaaaattaactaagtggggaaaaccagagaactaggtgttggcatcccaggaaaaaaataaagtctccacattttggcctatagggatcctgccccataatggctggttacctcctgcctcaagctgcagggaagccagggggtggcatggccatggcttctccctcagagaggcctctgtgcacgacttcagtcacccaacactgacagaacttggaacccaaaagcccatttctctccttccgtccagaccctgtctgctgttatctgtaggaagaccacagccaactgctatcatgaccaaagctaaaatccaatgaggcagagaacaatagttgtacccatctcctccttagtctccaaggccagcggtgcatgcatttgtgcattcaacaacatttgccaagcacttactgtatatcaagcacagcagtgggtgctgaggacggatgggtagaaaaaacagtcctggcccaggtggagtgacaggtaagaaacaagtaagtagctaaaataatgttaggtagaaaaaaataacaagaataaaagcaaggaaaagggaagggaccctcacttgtgtctgatacagccataatcttctctatcggccattgctgtaaccaaagcttaaccacctttcttaagatattgatcaaccagatcattgcaaatactgctaattgattcctttttatggctgagtagtattccattgtatatatatatataccacttgttgactgatgggcatttgggttggttccacgattttgcagttgtgaattgtgctgctataaacatgtgcgtgcaagtatctttttttgaataatgacttcttttcctctgggtagatacccagtaatgggattgctggatcaaatggtagttctacttttagttctaaggaatttccacactgttttccatggtggctctaatagtttacattcccaccagcagtgtggaagtgttccatgattgccgcatgcatgccaacatctactgttttttgatttttttggttatggccattcttgcaggagtaagggggtatcgcactgtagtttttatttgcatttccctgatcattagtgatgttgagcattttttcatactttgttggccatttgtatatcttcttttgagaattgtctattcatgtccttaacccactttttgatgggattgtttgtttttttcttactgatttgtttgagtttgttgtagattctggatattagtcctttgtctgatgtatagattgtgaagattttctcccactctgtgcgttgtctgtttactctgctgactgttgcttttaccatgcaaaagctctttagtttaattaagtcccatctatttatctttgtttttattgttggaaactattattctaagttaagtaactcaggaatggaaaaccaaacaacctatgttctcattgatatgtgggagctaagctatgaggacacaaaggcataagaatggtacaatggactttggggacttggggggaagggtaagggggggtgaggaataaaagacaacatatatggtatagtatatactactcaggagatgggtgcaccaggatctcacaaatcaccactaaagaatttactcatgtaaccaaataccacctgtacccccaataacttatgggaaaaaaagatattcatcaacctattccaggtcctctctccaccactgagcctcgtggggacataaagagctgcctgccctcccctgttccccttgcctttttgcagcaggattcctgaaaatgttgacttacagatacgtttttgagatatgaacgtttgttatttcctggtgcttagggaagaaaataattgatgttgtgagttgggcgggactttagggactatgctgaacaatccactgaccactgcaggctcccatttatgatcttgggccaacagccaccagcctctgttcatgcagtctcactgagggcagttacttctttggagtggcatgcctctgagcagataattccaataatcaatgtcaaactagatattgaaacagcccaagtgtcctggtaaagctagctgttgatactcctgactgttgcattattttgttttttgttttgttttgttttgagacggagtcttgctctgtcacccaggctggagtgcaatggtgcgatcttggctcactgcaagctgtgcctcccgggttcaaacaattcttctgcctcagcctcccgagtagctgggattacaggtgcatgccaccatgcccagctaattttgtatttttagtagagacagggtttcaccatgttgtccaggctggtcttgaactcctgacctcaagtgatccacccaccttggcctcccaaggtgctgggattacaggcacaagccacagctcccggcccaactgttgcattattatttgcaaatgttggctatccctgctgttgtctatatatcaattttgtctacccaacacagctgtaaacttctcaaggtgaggagtgagccatcactctttgcacctcttgctgtgattgacatggtataccttaagatatatgttaattcctatgtcttaataaatattggcttatggagaatttgttggagcaagtacagaccctatgtttaacttcttttattcaacagaattaaaaaactagctagttctctcaataaaataatactttcttttctttcttaaaatctagctgatctggtctaaaatacacatgtgggaggcgggattgtagaaatatctcaaattaattagcgtctagctctttgtaaggtaattgacagtctgagttagttgcttcccccactgcaaagcagcaaaatctgctctcaaaggcttcacgtagccgggaaaactccgttcccaattcagatcctctggggagggcatcaattatttcctattgtttttagcaccgattgttctgtctaatttgaaaggatccaaaaaaggaaatgatacttggcattagtatcattctccatcactcttgaaagatatatgaagggaatgttggcgcaatcagtctagaaacatatttctcccataacaataagccagttctttttgctttgaatcagaaatagctccatcaggcccatgaaggaaagggaaacaaaactgagtgccaagcatatgataacatgctcagcatcatatgacattaggggattgcaaattgaaacaacagtaccaccacacacctatcagaatggccaaaatccagaagactgacatcaccaatgctagtgagaatgtggagcaacaggaactctcattcacggctggtggggatgcaaagtggtggagccacttgggaagacagtctggcagattcctaaaaaggtaaacatactcttactaaacaatctagtagatttgctcctaggtgtttacccaaaggagttgaaaacatgtccacacagaaaacctgcacatgaatgtttatagcagctttactcaaaattgccaaaaattggaagcaaccaagatgtccttcaataggtgggcggataaagaaattgtatccaattctatttctatgaggaaaatctattcatacaatagaatactagtgtcagagatttttttttaacaaagagctatcaagccatgaaaagataaggaagaactttaatgcatattggtaagtgaaaaaagccagtttgcaaaggctagatactatatgatcccaactgtataacattctgaaaaaggcacaactatggagacaataaaaagaacagagttttggatgaagggagggatgaacaggcagaatacaaacaaattttagggcagtgaaactattattatgatactttatggatatagaatattatgcatttttcaaaacacatagaatatacaacatgaagaatgaatgctaatgtaaactctggatttttattaataatattatttaattaaaatgatttattttacttattttcattattatctaaaatgttatttaattattaaatttagatgctacttaatttttgctttattattattatgttaatatcatcaactgtaactagtgtacaacactaatgcaagatgttaataggggaaatcgtgttggagagagagatatgtgagaactctgtactttcttttcaatgtttctgtaaacataaagctgctctaaaaaattaaatctattaaaaaaaaaactgagtggaaaaagagcgttttgctcattggatggactttttgtcctccatgtgatggagtcagctggctgggcgtaaacttgcagaaggtgggagaaggctctgccagcctcgcccctgaggtttccatcctcccgtgctctgattcctggggttatgctctgttgcctctggtgagaggtggtcagtaactccatgagctgcttctggtgcctttgtgctagacagattttgcaaaggcaggtgtgtcaaccacaaccagaggccaatttccctggagtcagatttcagaccacatgctcctctcctcctcacaatgtagtctcctccccaggctgagccctgccagaggggagagttaggactggtgggaagggcttgcccccttggctgcaggaagctcaggtggcaccttggggacaatcctaaaaagatgctcttcttccagatgcctcacatctacctgtcagaaaattgtcacactgttctgatgtttcagaaaactcactttcatctgctagaaaactgtctagataaatataagcctgtgatgtctgtacctctgatgacgtcccgtagacatggtgtcctcctccacctattgtcggaaggtggcccatctgacctcgtggtggccagttccctccatccactaggacaggcaggccgctgggaagcgtccttctccacacccacaggccctgtccttgggagccaggagacatctcagatgacgtacagaatcccttcgtgcgggctcatcacgagccctttgttccttagagtaatagcaaacaaatgtgctgttgttcctcatttccatgtatttccatcagttaattggaaatggttctgcctgaataggaaatttttctatcttgggcttcttgaatagagaagctctggggcacaatcctaaatcttcagaggacagagagcccacatgccaccattccagtactgaatagcagcttgggtcctgagaatttccggtacccacattttagagactttttgtctaccaaaagtaacagtttcattcaggacaagaggttattcaaaaatacataattaatggcctctactgaggtcttacattgtgtagagaataatgcattgggaaatgctaaactacctagtgaacagcaagtatgggggcagggaggaggaacaggcttccctcttgattaa

SEQ ID NO: 93582 - DNA, 27492 bp, Homo sapiens
gcatggtacgatgtttagcaacaggtccggcctctacccacaatgccagtagcacacatgcacacacatgcacacacacatacacacacacactccccagttcagttataacagccaaaagtgtctccagatgctgccaaatgctggggtaggggggaagtgacacacacacccatccctctgcccactgagaatgaatgaattaaatgacttatatggaaaccttcattaatacattgaatatatactgatcacctactatatgccacacaccggccaggtcaaatcagatgtgattcatgccctctaacagagcagatgaataaatcagtgtttgcggtgacaggagtttaggagcccttggggtcaggaagggggaagggaagtgtaacattaagatatcaaagagtagaagccacgggaattggtgattaaatggatgcaggggaataagtaaagggaggagagaaaaacaattcttacaacatcaacaacagttcattattatttattacctaagtcataagaatttttccacaaaaacagggacatttcccaaaagaaagctcataccacataaatgttcataaaaataaatattgacttcactgtggctgctttcattttaaccagtggcgagacacacatagacaaatgactccgttcttccattccatttgcacttctatctctaaattctcaagaccaacagaggttagttagtctccatgccatagttagactatcaaggtccacaaagattgtaggaagggggtgacggacaacatgcatcactcatgggttttttattgcatccactgaagaacacattcttttaacattgtctaagagttctgttagatatcaactttgaaaacccaagtcaaatgcatttgtgccatcaccaaaagaaaataagacctaaaccagggtaaaaaacagcctttccttcatgaccctggagatgtataccttttcagaatattatttgcatgtgaggtcctcaacagaggtgactctattacctctcatccctggggtacagcaaggcaacagctatcccattatctcatggcactttctagttcgtgtgaaaccagtaacgtgtagtttcaaaacacagaacatcgccttcatcagaggagagctagttaaaggctgcaaatggggcccttcggctcctggtcctgcagaggtatttggaggaggtccatgtgcctaaccacatcaatttcagatgaaattctcattgcaaatgtatattacccaacacctcaaaatgtatgaaggccttcctggtttttagggcttacaagccccctgacaatagaattctttgtggaaatatcaaaattcgagtaacagagacaatttttgagaggatcaaaaatagaaaccattattggagtataaaaacaatttagttgcttaagaatccatatttctaagaaaagcagctttgttaactgacatgtgctcaataggcaattttccccatttaattttcacaaatagatcactctgaaatgtatttcccctaacaaagactgcacattaacgacaaatgatacatcttcagattttaattaatgtcaagagctttattttgcttccaagcaacttataagagacatgttattaatataatttaatttaaggggacaggcatttgttttctatttttaaaaaggtggtttgaaattctggccctgtcaacatcatttaaacattcctgttccatgcttcaatataataaattgaatcagcattttaattgtgcccatgctttgtggttcctggcaggacaaaaagattctctgtgagtgcatgactccycccaagaaaaccccactgagtgattaattactagtctggaagatataaatatgtctctcaataaagacagtatggactgctggaagctctggccttatacatctccatggggtgccttaactaagcagacatcctcttaattcaaacaagattctggctccagcattcacggacggctccctcatcatacactgttcctttactgaacagcatatttcttttaattagcatcattttgtgtatgtataagaatcaaaggaaatcggcttttatgtacaaatatatcaaattttcaaggtgcctctgttccttaagaaagaactgaggacaatagtaaataaccttgcattttcaaaaaagtaccatctttgtataaatacattttaggttacacccagacattactcatgcttcattctgagttaaaggtttggccaaaagaccataaatttataaacgaaaacacgaaccggcaggtctataagtctattcctaagcctcacacctattgtatgaaccgagaagcctcatgattgctagaagggagaggagcttagacaaaggactcattgccacctccccttactccatatagtaaaaacaagaattgatggaattcctaggactgttcctacaaggccagaattaggtaagaagagtttatactaaccatttaaaccagaaattgcaagcaacgtcaactaacttgaaaataaagattaacacaagaaatcaatactagaagttggcttttttaaattggagaataatcacgtataaatttttagtctaatactttgcattaataatcatggcatttattacgacagttgaataaccacatcccaacaccttttcattatgtttaaaatgagggggtggggacaggggaacaggattatcgtaagtcattttgaccagtctagaaatccagacatcaggccgggcgcagtggttcacgcctgtaatcccagcactttgggaggccaaggtgggtggatcgcttgagtccaggagttcaagaccagcctgggtgacagcaaaaccccatgtctactaaaaatacaaaaattagcgggttgtggtggcacacacctgtagtcccagctacttgggaggctgaagtgggaagactgcttgagcctgggaggcagaggttgcagtgagcttagactgaaaaaaaaaaaaaacaaacaaacaaggaaatccagacatcatgttcctaaccatcctatttgaaagaggatgaaagaaaggtgttctaaaaagccaatatgcattctgccatgggaaaatattacttgtatacagactttgactctcttactattcatatctttacctggccttgccaaagatatttttgagcaggatcatcaaacataaatgcaagcattaaatcagtaagcaaacatgaatctgaattggagttctgcagtagactgcaaaaatggccataatatttaagctcctcccatcaagaggtagagtatattttcccacccctttaatctgggctgatcttatggcttgctttgaccaatagaatgtgcacaaatggaagcatatcaaccctgagctgaggccttaggagaccctacagcttccattctcaaattcttggaactctgtgctcaccatgggaacaaacagagtgggctgaaagaggttcagagccaatgtggtaaaaggtcccaatcatcccagctgtcccagatgtggctctgataaaccagtcagcccacacaatctatcagttaactacaagtacacaagcaacctcagacaagattaactaggtttggcccacactagaagaaccacccatctggctgggcgcggtggctcacgcctgtaatctcagtgctttgggagaccgaggcaggtgtatcacctgaggtcaggagttcgagacaagcctgaccaacatggtgaaaccctgtctctactaaaaatacaaaaatgagccgggcatggaggcacacacctgtaatcccagctactcaggaggctgaggtaggagaatcacttgaacctgggaggcggaggttgcagtgagccaagatcacaccaccacactccagcctgggcgacagagcaagacaccatctcaagggaaaaacaaaaaaaaagaaaaaaagaaccacccagctgagcccagccaaaattgtcaacctgcaatattatgagctacattaaatgggtagtttttttaaactatgagttttggggtggttcattatgcagaaatagaaagctaatataggttctataacctcattacccaatatttccaggctttaagctccagtttaagtttcccattatagcctttttcaggtactagcatatatactcttttgacccatttccttttgaattctaatgccactttttctgtaacaaaattcagcacttagctaaccaattccctatatgattttctaaggtgtatataaccattatgcttcacatacaaatagaggcagagaccatgttttatgttaatttttattatctaacacataagacacatagtaggtattcaataaatgcttggtttgatgtgaaagcagctagagtttgcaataagagttttaaacttcatgtgctaaacttttcttatttgttacatgtaaataatattatcctgtgttaccacaggggagattgagtaatttttaaacttttacactcctttacaaatataaaatagagtaaattttataataagaaagcaaaaaacaactagataaaatttaaaatttctgtatatagcaaaagtcacaaaaaagcaattaaaagacagtgactggaagaaagtacagagaaaaaaacgaaaaatccataatatacaaagagctcctatgaagcaatggaaaactgagaaaaagatataaacttatggtattcagaagaaccaatgaaaaaactgaaaagatgcttaatctcacagataatcagcaaaatgcaaattaaaataaagtgttttatcatttagtaaaaagactaaagaagatataatattggtgagtatatatggaaatgggccttcttgcatactgtggataggaatataaactggcttataggaggagagttgggcaatatctatcaaaatattaataggtacatcacttgtaacccaaaaatatttaccgaaaccttgtttttagtatttaaaaactggaaagctaagtatccatcaatactctcatggtatacattgattaatctatatacagaaaactatgcaaaaatttaaaagaatgtgatgacgtcaggagcagtggctcatgcctgtaatcccaacactttgggaggccaaggcaggggaatcacttgagtccaggagttcgagaccaccctggccaacatggcaaaacttcatcactacaaaaaacataaaaattagccaggcgtaatggtgtacccccacagtcccagctacatgggaggctgaggtgggagaattggttgagccctggaggtcaaagctacagtgagccgttactgtgccactgcactccagcctgagcaacagagcaagaccctgtctcaaaaaaaaaaaaaaaaaaaaaagaatatgatgaattttatgtactgacatgaaagatcaaataacattaagttaaaaaggcagtttgccggccaatatggtgaaaccccatctctactaaaaatacaaaaattagccaggtgtggtgatgggcgcctgtaatcccagctactcaggaggctgagtcaggagaatcacttgaacctgggaggcggagcttgtggtgagccgagatcgcggcactgcactccagcctgggtgacagagtgagactcggtttcaaaaaaaaaaaaaaaaaaaaaaaaaggcagtttgccaaaaagtgtgcatagtgtaataccattttttaaaagaagtatataaatgcatagaaaaaggctagaatgatacacaccaaaataatactaatttactaattatgtatttgtattattaataatgattagtaaataggacgggttgagggccattgggagagtaaaggaagacaataatttttatatgcttatgcattatttggatttttcacaagcatggatttatgcgatatgtgtgtaacttgtttatactgcacatacctgggcagcagaggagagcagagcaaagatggcttcaaaaaaggagccaaagaaagagctgggtcttcacagaggaaktcttcacttttatcctggttcagaccagccagatggtcggcattgccatagacatgaatatatattagcaccaggtgctcctgccacgtcttcctctgtggctcaggagacaccgagcagtaagctgtgctggcgaccctgtgttcggcctctcaggagcacggaggagcctctccctgcaatctggaatcaagataaataagatgagctcctgaaagttaaacttgaaaaacagcacaaactggatcagaagagagagatgagaggtcacctacatcataatgaagctagaagttaccaattaccaggcaacctccccatgccaaacaccgcggactttcataccgtatatctcacttcatcttcacaacgcacctaaggttgcttattattattgaaaggaaaaataaggttagaggagttcaagaaagtggcaagggttccatacagtctacgtggccgtgccagggatttgaactcagttctgtttaattccaatgcctatgtttttggggttttttttgtttgtttttgttttttttttgagacagagtctcactctgtcgcccaggctggagtgcagtggcgcgatctcagctcactgcaagctccatctcccgggttcacactgttctcctgcctcagcctcccgagtagctgggactacaggcgcccgccaccacacccagctaattttttgtatttttagtagagacggggtttcactgtgttagccaggatggtctcgatctcctgacctcatgatccgcccacctcggcctcccaaagtgctgggattacaggcgtgagccaccacgcccggcctccaatgcctatgttctcaactaacatggtatgctctctcccttaacagacacagaaaggcttcagggttggcaatacttgactatatccttgctctatgtgtaacaggatacaatgaatcaattttaaaaaatcatattgcttagccatggaagtacagagccaaaagcttcagaaaagcacatggtaatagtgccractcaaatgcttcccgggcaatagggtccctggctcaagcaacaggccaactaagccacctgacgtgtagacagaaagcaaagttctcagcttgccaggaaaaaggccagtggttagactgtggattcactgaggtaatgtcatcccaagaagcctcttaagaaacaaacagctcatccatgagccccacgtgagttmttttcctatttggaatatctatggtccaactgggatattcccactgtctcatgttaccttaggcctgtttcgaattcatacagtctacatgattgacacaggcaatgtcgaagaacatgtttcccacaaaactgtcacaaacccaggtcaactggattcccctacagacccagagttaatatataaagaactagggcagccaggtgcagtggctcacacctgtaatcccagcactttgcggggctgaggcgggaggattgcttgagcttaggagtttgagaccagcctgaacaatatgcaaaaccccatatttaccaaaaaaaaacaaaaatacaaaaaaattagccaggcatggtggcatgcacctgtactcccagctactcagtaagctgaggcgggaggatcacctgagctcaggaggtcaaggctgcagtgagctgtgagctgtgatcctgccactgcactccagcctaggtgacagagtgagaacctgtctcaaagaaaaaaaatgttctagtaattcacttgttgaaaaatacacagtaagtgcttactctgggtcaagcactgtgctaatgaaggaaataataaggtaaataagtcaagattcctgccctcaagctttagtaggagacacagaaacaaataatcacaatcctaaaagatggagattgcaataaaagaatgcacaaaacactatgggaacacagaggatggagtaagtaagtttggcagagaagggagagatcttcctaaaaccacagtcagttggtgagagaggggatcacccaaaaaatgaggagagatctttaataaatgcaaaatgaagagagtaaagatctgcacccagtgaggaagtttagaatagctgagattataacatacgtgcatctccaagcctctggctgagcctgaagtgatgaatcctaaaaatctacttcctcaaaactccacaagcctctgaaagacacagagaaacagccccaattgcttagggagccagcgctgcaagaagtttgctcccctgaagctgttgacagttttgactcttaggtgaatctttggagaggatgcaaacaaaactctctcgtgtgcatttaagaagttctcctgtcatagcctggcgtggtggctcacaactcccatctcagcactttgggaggccaaggcagggggactgtttgagcccaggagttcgagaccagcctagataatgtagtaacatcctctctctacaaaaaattatgcaggtgtagtggtgtatgccagtagtcctagctactcaggatgccaaggcaggaggattgctttagcccaggagttcaagaccagcctggacaacatagtgagatcccatccctacaaaaaaaattttttttaattagctgggtgtgatggcatatgcctgtagtcccagctamtagggaggctgagatgggaggatggcttcagcctgagggattgaggctgcagtgagctgtgagcacaccactgcaatccagcctggaccacagagagagacactatctcaaaaaacaaagaacaagaagttcactgtcactgccatttgagaatggaatgatctgcacatccacaaatggaaagaaatagaatgaagattacaaaaattttatttagtataaagttgaagggcacgatggtaggccaaataacgtgcccccaaagatgtccacaatcttaatccctaaaacctgtgaatacactcccttacgtggtaaaagggactttgcatatatgattaaagatctcaagaagaagggaatgggatatagaagcaggggctggagcaatgcactttgaagatggggaagaggccatgagccaaggaacacagcttctacaagctagaaaagacaaggaaacagattctcccggggactcccccagaaggaacacagccctgccaagaccttgagccccatacgacttctggcctccagaactgtaagagaaaacatttgtgttcttttaggccactaaatctgtaggaatctattgcagtgccgataggaaactaacatgagggagggcgttttctccaaagtcctcaaagcccaaataaatagtgttttatcaatcctctcaacatcagacaaaggagaaagaaaatggaggaagagggaggttaaagtgagtcatccaaaatgaaagcaaacagcagagcaggcccaggcatttcattttgatgatttatcaaaattacagaaaaaggccaggcrcagtggctcacgcctgtaatcccagcacttcaggagactgaggcgggtggatcatttgaggtcaggagttcaagaccagctcgccaacatggtgaaaccctctctctactaaaaatacaaaaattggctgggcatggtggcacacacctgtagtcccaggtattcagtaggctgaggcaggagaatcgcttgaacctgggaggcgaaggttgcagtgagccgagatcacgccactgcactccagcgtgggcaatggagcaagactccatctaaaaaaaaaaaaaaaaaaaaaaaaaaaaaaacacagaaaagaagatggggctctgtatttggttatcctctttgccagtaggataacgtctatctcacagaagtggtacaaactgactccacagccaggagggccmggcaaactcccaagattaaacaaacaacaacaaaaaaagcatattagtattagccacagagatgcagagagaaaactctcttgccctgccacagcagtcaaagtttgtgctaatgtttgcgggagaaaagggagaaaacaaagtgaggaagaaaacatatccgcatcattcatatccccaagcaaacagactcaggacgctggggagtgccaaatttagttatttgcaactttccccacttgcagatcccttgcaaatacattcaaatgcaatcatcaataacatcacctcttaaaataaacatcttttcatttatgaattttctcccccgttttgaccatgtgaaacctgcaaatttaacatatgccaggagaggatggtaacaaggtagacaatctccagctaagaaatttgaaaaaatatataaataaagaatagggagggaaaaatcaacctttgatgaaataattgcttctgctgttatttttcactattacttcagaaatgttctctctctctcttcctttcttgtccctatagcgaggtgccctgctgttgtgcagatgaaaggtccagtctctttaaaatttcatgcagagctcttcacaacattgaagctttaaaggcccatggcaaattcaacatattgttacacttgatggaaggagataaaaattacatgcagaatttactgtatattcattgtctggaaatactatacaattacagcttcctctatttcactaacagatatggacatgtattctgatttcaatatttagaaatacaaaagatgcacatggagtgagtattgtagcaaaaataagaatgaaacttgaatcttctgaggttagattagggtcctaggatgtgtgaacagttttgttcatagttttcctaaattgctttagatatgtgaaacatatttaaaagacaacaaaagatacaaagggaataaaaaaagatttcctaaaacttgtayatagcatggggttctttgcactaagtcgtctttatttttgtatctctatgagaagaatatgggaatggctaggcttttatttttatgtataaaattatctcaaaaaaaaatgaatagcaagaactgcagacgttggaatgaagaacacgatgacctcaaaagcaagtttgtcagtcactagtctttgagctttaactgtcataggtaagccttattttaaagttgtttttaaattcacaaattggacatcactaattttaaatctaaagtttaggtttgtgctttattgtagctgtttttatgtagacccatttagtcaaactcattcgtgttcattcatcctcttctttcaaacatttatcagatatctactacatgccaggcacactgttaattatttgggatgaaaaaacaggccaggtgtggtggctcatgcctgtaatcccagaactttgggaggccgaggcaggcagatcacttgagttcagagttcgagaccagcctggccaacatagygaaactccatctctatcaaaaatacaaaacttagccaggcgtggtagcacctgcctataatcccagctacttgggaggcagaggtgggaggatcacttgaccctgggaggtcaaggctgtagtgagctgagattgtgccactgccctccagtctgggcaacagagcaagactctgtctcaaaaaaaaaaaraataaaagaaaaaaaaacaggaagatgggatccctgactccagggggattataataggaggaggcgaacacagcaaagggtttgtgcaataaagcttcaggggtcctatggaagtagatctgggaacatcatggtggcacagagagtgtttgatttgttcttcctggaggaagaggggaaaaaaaacacatgcagggatcagtccttgactagtgactgggaaactgtctaggtgctgatggaaaaaaccaagccagtggtagtagctgggaagggggatagagctcagaaaaatcaagaatacaaaatgaatagcacctggctactgaacagaaagcaggagcacaggagagcagggtgaatcccgggtttctaatactgggattgtccaccggcccattcactgtttccagtcatttactacctaatacgtgccaggcacacttctaaaaatactggagacacaacagtaaacaaatcgcagaagaacccaactccctaaatgtagaaaggacaaatggaaaactagtaaacaaacgaggaagcaatattaaaatagataagtgctctgaagaaaataaaacagcaagatgtgagaaagagtaactcggggagggcggctactttctatttgggtggtcaagagagacttctctaaagaagtgacccttgagtcaaaacctgaaggctggagaggagaaagccatgcaaagacccagggggaagggcactctgggagaaggaagaacacgtgcaaagcctctgaggaagggacaaggttggcaggttcaaggaactgagagaaggccgatttggctatggcacagtgagtgaggggaagttgcagaggcaggcaagcagggctggtctcgatctcctgacctcgtcagatcacataggtttttacagcccagggaaggagcttggattttaaatatgatggagtttaatgtttattttaattttgagacagggtcttgctctgtcacccaggctggagtgtggtggcacactcatggctcactgcagccttgacctcttgggctcaagcaattctcccacctcagccttctgagtagctgggactacaagtatgcaccaccatgtccagctaatatttttatttattctagagatagagtcttgctatgttgcccaggttagaaattgtgcaggttttatgcagcggagtaacaagagatcattagagaaatagatcagcaagtaagaaggaatcaggccagtttagaggcttacagtgacctgggctggagataacagtggcttggaccatcaaccaagaaaggcggcagtgcaggtgagaaaattcagacactttcagagtccctttcagactgacaggtcctattaaaggattgacagtgcagagtgaggaaaacagatgaaatggatccctaagctttggcttcagggactgagtagataaagcaatgaacatggggaagactccagggcagaagccaggtaggggagggagatcaaaaatggtttaggacatgttaggtttgagaygcctcttatacatcaaagtggaggtaccatgtgggcagtcagttatatgagactgaaactcagaggagaaggcagggctagataatcctttaggagtctgtcggtatatagatgaaaagtcatgggactgaatgagattagctggggaaaagtgaataggttaagagaccccagaggctcccccacacgcagaggtcaagcagaaaagactaagatccacaaaagagcccaagaagccacagccaccgaggtaggagggaaaccaggagagagtgtgatgtcacaaaagccaaagggacaaatagtgtttcaagaagggggaagtggtcagctacagggaaagcacttgaaaagtcgaggaatgtgaggacatagaaataaccactggggtggaaatcactgaggttgytggtgacattagaatttcagtggagtggagaggacagaagatggacaaccgtgttaagagaatgagaagtaaggaagtagaaacagctggcatcagcaacttttacgatttaaatttgctggtgaggccaggcaccatggctcaygcctataatctcagcactttgacaggttgaggtaggaggatcacatgagcccaggagtttgagaccacccctagcaacatagacaaaccccatctctaaaaaaataaaaaataaataaataaatagccacctatcacccagctacttgggaggctgagatgggaggagcgcttgagcctgggagatcaaggctgcagtgagccgtgatcgcgccactgcactccagcctgggtgacagagcgagaccctgtctcaaaataaaaataaataataaaattaaaactaaacaaatctataaaggacatttccaagtttaggaaatttgaatatagactataaattaaatgatatgattgaatccatgtggattttcttggttgtgasaatgataatgtggtcatgtaagaaaatgttcttttcttagacggggatgtaagaatcccttatacccytgataagggatgaagtgacttgccatctgcaacttcctgtcaaatgattttacaaaaagacaaacacattgattgattgatacaaatatggcaaaatgttaaccataggtgaatccaggagaagtttctttagatgtttgtgctattctttcaacctctctacagatttaaacttgtttcaaataaaaattgcatgggggtgggggaagatgtagattatagaaggctgagacagtcctctccccactagatgtcccaaatcataaactctggagacaaaacccagtaatctgcttttttttttttttttttttgagacagagtctcaccctgttacctaggctggagtgcagtggtactatccagctcactgcaacctccacctcccaggttcaagtgattctcccacctcagcctcccaagaagctgggaatacaggagtccaccaccatacccaggtaatttttgtatttttagtagagacagggtttcgccatgttggccaggctggtctcgaacttctggactcaagtgatctgcacacctcagcctctcaaagtgctgggattacaggcgtgagccactgcacctggccaagtaatctgttttttataaaagttcctaaatttttttagcagctagactctgattagcagctagaattgtgactgtrttcattatctattgccacatgcaaaccacactaaagcttattggtggcttaaaaccaccactattttatttgcttacacatttatgggtcaagaatttgagtaggactcagcgtagcagtggctccattaggactggyggactcaagactgcctaactcatacgtgtggcactttggggctggttgtgctccacacagcttctccctccagaagagcctggccctctttacataacggatgggtcccttccatgggaacagaagctacaagacctgggcgtggaagttgagaacattacttccatccctttgtattattcaaaccaagttgcagaccagcctagattcaaggggatagagaaagagatcattccttttttttttttttttttttttttttttttgagacagagtcttgttctgtcaccaaggctggagtgcgtggctcactgcaacctccgcctcccaggttcaagtgattctcctgcctcagcctcctgattagctgggatgcacaccaccacgcccggctaagtttttgtatttttagtagagacagggtcttaccatgttggccaggctggtctcgaactccttacctcaagccatctgcctgcctcagcctcccaaagtgctgggatgacgtgagctactgtgcccggccaaaagagaccatttcttgatgggaagagcaacaatatcatgttacaaaggggtgtggatgcagggaggcattgattcactgggagctgttatgatgatgatctactacagacacccactaaattagactaccaaagccccaccttaaataacacaagcttttgttatatcataattatcttgtccgtatgtaaatggttcctctaaaactgcttgaaaacaattcattttcttaattttatagagtcttgccattttcagatgctattcatttgctcaatagaccataagcattacagaaaattcaatctctcgcactggttcccagcctctgggaccaaaatttagatcccagtagttctgaaactaaaggacaatagaaaagattttagaagagtctcagaaagttctcaccaacctcacagacaaatggagagcagagctaagatggctgctctcccatcctcattcctgccctctgagcgatgacagaagtgatacctgcaaactgtccccttygcaacttcccaaaggttcattagctgctcaccatgtcaacagaggtggccaggcctttcactcgggatctggaatgggaagacgagtggtgggtcaggatgtctcaaaggaaatgggagtgagtgagtgagagagagagagagagaagataacacccattgccccagctcttgcccccatgaccacagcttttgaagtagtggcatccacattcacatagtttttattgtgtgcatttatgacatttactaaagcaatagatacacatacatacatctccttgtccagacaggctcttaacacagagtcctcactacgaaaaaattccactcatgtcagcttccaaattcaaaaagcagtagttgatgctactcctaacaaattattaagtgcctcttgttaatctaggctctatttacrtaaaccaccttggagtggtgccccctggagttgtgcaatgtggcagccctgagtatcggcgctagattttatacccgagttcatctgcctcaaaagcctgagctacttgcactatgctaagcagtgatgaaaccaagaaggtatgcatctctgatcacagaaagtgaagaaaaaattagctgagtcaggaggcatctgactttctggagggctcctgaaatcacccacagaggaggagcgaggcagtggaaattgcattacagttccttaggctctagttgtgcctgttctatcatgaataagctatgtggccttgagaagtcacttcacttctctgggcctccatgtcccacactgtcatgggaagagtttctatcagagctgacaactcttaacaccaagagtgtttatatgtgatcatgcatgtttatatgaagagcagtctatcaagtgtatgcacactttaaggaaagatatgtatgatgaaaatatcaccatcaatttcaatatactttattagaactagtcggttttttgtgggttttttttttttgagattaaaaaaaacacacacacacagcaagactttctctctacaaaaataaaacaattagccaggcatggtggtgcatgcctgtagtcccagctactcaggaggctgagatggaagggtcacttgagcccaggagttcaaggctgtagtgagctacaatcatgccactgaactgcagcccaggtgactgagcatgacccgtctctttaaaagtaaataaataaataaataaataaataaataaaacttcacttacattatcttaactatgaggcgtttccgccatttttgttgactcttttctactccattatagtyactgaaaggaattataggaactaaatgccaatcagtagttttattatacaatagtacaaattattacatctctaacaccatttataaatatcaatatctaagcagcaagcagtgtatgtatcttaaaccatctatagatgagtgtagtgtgtgtgtgtatgtacttgtgagtggccttttcatgaactttccaaatttgatcattgattaagatgcccagagataatcagtttaggcaaaatcaaatgttatacttggtcataatcagtagtgaccatatactaaaataatatgatatggaaagtgttttgtgaattgtataagattatatatgcccacgtgctattatgaaatttagctaagtgctaaatggctccaatgtttagctgatggatatatctttgaaatgttaaaattccagatgaaagacaatcgaatagaagacaaatttatctctaaaaataacgtagatatgatctgaaggtgtgatgaattttctaataagtaataatggatgctggcttttatcaaataacaatgaggtcccaagcagagctaaaggctttaccttcatcaaatactcttaattctcacaactggttttgccacctcaaatttcccactacttagcacatacagaaactgagtttgtcccactgctgaattcctagagagacagggccaaagggattctcagaacttttttttttttgagagagagtcttgctttgttatccaggctggagtgtagtgccgtgatcttggctcactgcaacctccgcctcctgggttcaaacaattcccctgcctcagcctcccaaattgctgggattacaggcacctgccaccacactcggctaatttttttgtatttttagtaggaacagggtttcaccacgttggccaggctagtctcgaactcctgacctcaagtgatccaccctcctcggcctcccaaagtgctggcattacaggggtgagccaccgcacctggccaacatctcagaacatctgtctgagaggcagacacatcagggaggttctgcctaggaaataggtgatctccccattatagggatgaagacactgagccttgaagcattaaccaacttaaccaaggtcccacagcaggtaaaacctgaagccacaaaacccccaaagctagattttactcactctactccagtgcctggctgtaagggaaagtttatcaaaaatcttgccatcagtaaatgaaaaattcaaggaacaacaacttttaaaatacccagacttccttaaaatagccttttgagaaagcaaaaacatttatgttgttttcagttgctgaacttggaaaacaatgctgttgtcattttttcagctcaggaatcaggcagttttaagcctgaattgctcaaatatcccatggggtccttcgctacctgatttttcccaaatgattccttgttcttattagtaaaatattaagattaacagctctgccccatatgaagctaacaacagaaagatattaagtaactgatatattctgcaaaaataatattcacatacaaatacttacacaaaattatcattgaattggagaggtgcgactgaataggtactgtattcgaaagtctccttgcagttcatcagataataaagaacacacaccagaagaatcacagaaatagaacgtaccctcgagttacatcacaaggagaaaaaaaaaatctccctagataagaaattcaggtttattttatcttaaatcagaccaaggggatttaggttgcttttttaatctacttgtgcataacgatctctcagattaatcatactgttcaatagaatattattattaattagacatgtcagcgcttcaggcagaaaattactgggaagtaaaaaggtctatattccaaaggctcataagagaaagatttccatttctatcacggcacatctctttcagttccaattctcagtggaaattcctcaacgaattcagtccttgtaacaataacatttcgaagtgtttcccatttaaaaaatagctgaactcgagtttgccttgtaagatattttctatgttattggtaagccaattaaattttttagggcacatagttttaaggaaagtccttcagtgttccccagattgtcatcatctctcattaggaggtcttagacaagactgaggcacagaggagaacaatggggtcatcagttttatcccatgggctggcgtcctctaaaatgttctcatttccatcctgtcggctcttacaggtcactgctgcttcctcctcatccccataagccccatgtagtacacctgtgccactctagccacatgggaaaatgttactggtcccccagtaggccaggattccatggggctctctcggacacccaccgacatttcttttgatcccaccctgtgctgcaggcaagacacttctaaaatcatcttgctttccaggggtccaacataacagcaagggtgcaggtatccttttgtccccatttctcaaacataatttggtcatattgtctatcaaccctcatcctccatcctctcctccatctttaacctcctctgtgtaaacattcaaggaaatgactgagccttttaacagtaaaaagtaaagactagcagagccaaactccctcaacttctggcatgcctgccaatgagttttcccagctgtaaaaagctcatctcttctgtatctcatctccaccctcctcttaaggaacctccctccacccatttcctttttcctctgtatcttcctcctgtctcttaactcttcctctgcagcttatacaatagatatgtggctgtcattacaatacgaagcatcaacaatcataagaactaccasaaaaccatcccttgacatgtttatttttttgagaagggtaccttgctatgttgcccaggctggtcatgaactcctgggttcaagtgactctcctacctcaacctcccaagtagtggcggattacaggcatgcaccaccacgcctggcctcccttgaccagtttaactcttaccttccctccatagctaagcttctttgaaaaacagtgaggcaaagaatttccagacaatggccatgggtatagaccctgggatggaaaataacacagcccttcaaaaaaacataaagctttgggtgagcaaaaaagtaatgagcaggtggagggaactgacaaacactagacaacactggtcgtatgagccatggaggatttcaacctacttcatggatttgttttgaagattaaataagcgtatgtatatttagtgctttgtgctggtaataaaataaaatattattattttaaaatatatgacctttggccaggcgcggtggctcatgccttaatcccagcattttggaaaggtgaggcaggcagatcacttgaggtgaggagttcgagaccagcctggccaacatggtgaaaccctgtctctactaaagatacaaaatattaaccagtcctggtggtgggcacatgtaatcccagctactcgggaggctgagacatgaaaatcgcttgaacccaggaggcagaagttgcagtgagccgagatcatgccactgcactccagcctgggcaacagagcgagactccatctcaaaaataaaataaaaataaattaaataggcagatgccactgccaccaggagccccatactatcagccatggtcaaccccaccgtgttcttcgagatggccrtcgacagcaagcccttaagccacatttccttctagctgtttgcagacaagcttccaaagacagcagaaaactttcatgctctgagcactggagagaaaggatttggttataagggttcctgttttcacagaattattccagggtttatgtgtcagggtggtggtttcacatgccataatggcactggtggcaagtccatctacggggagaaacttgatgatgagaacttcatcctaaagcatacatgtcctggcaccttgtccatggcaaatgctggacccaacacaaacggttcccggtttttcatctgcactgccaagacagtggttggacaaaagcatgtggtctccagcaaggtgaaagaaggcatgaatattgtgggggccatggagcactttgggtccaggaatggcaagaccagcaagatgatcaccactgctgactgtggacaactcgaatacatttgacttgtgttttatcttaaccagcagaccactccttctgcagctcaggagagtaccctccaccccatttgtttgcagtatcctatcatctttgttctctcgctgcagttccctttgggttccatgttttctttcttcccttccatgcctggctggattgcagagttaagttttgaaataaaacttaagtaaatgattatgaaataaaaactaaataacaaaaaaaaaaatatatgaccttacctctcttctgacttcattagggcaccctccaaggctgcagaagtaaaaaatctctcggctacttggcttgaagtctaattaatgatgcaggataaagatgaaatccctcaactctacatacggggctcagtgtttggaaatagaaatggatatacactcaacatgcactatacataaataggcaaaaataagaaaaaacgaaacctgctctgaagtgcctattctggcagatggaggctgggtattatggagtgacaaaatgggctacaatttgtcaacaatgactcagtctcgcagggaaattaattcaaaatataatcctggactggggagaaaatgctaaaaagaacaacattgggagaagtgatgacatttgaatatgcactgcagatgacacagaagcaatgtatcagtgttaagcttcatgaacttgatgtgattatggaagagaatgaccttgttcttaaaaatatacacacagaaagactaaagggaaaaagaggcattatgtatgcaacctactctcaaatggttcaaaaattagtaatacgtgcacatataaagatagagaatgctaacgtgtaagtggaaagttggtatatctaagcaaagggtataggggagttctttgtactgtttttgcaacatttatgttcaaaggctagaccctgagctgtcctccaggccctcagtgcccctgttgcctcttgagagatggctctttctcttctggccacctgctgaagtcctcacctggtggaacttgtggtctgttctcttgcgactgttggagtcctggggattccccatgtttggagacttggccccatctcagccctggcttcttgtgtctggatcatataaaaggagccttgagaagcagaagtcctttttctctctctacaaagtctggctctcaaaactactatctcactgtgacttccaaaagcttaatgtggtagccaaaacttagcagtgacttggttgttcggctgtttcacctttcccctgacactgaaacctgtgcttcagtgaggggtaggccccagggtatcttggtttaccggagtaaaaaaacacatccacttaacgtttgcataaaggtagctcttacatatattttccatttagacaatttaattagtcccaatctgtattttatacttctccactttattttctactctaggtgacagaatcacagttaacattctgagagtaaaagccctcaagattttgatagtcatcaagtacaatcaaaaatggctatacttggccaggcgcagtggttcatacctgtaatccctgcacttgaggaggtcaaggcaagtggaccactgaaggttgggagtttgagaccagcctgttcaacatggtgaaaccctgtctctactaaaaatacaaaaattagtcaggcatgatggtgggcacccataatcccagctactcgggaggctgaggcaggagaattgcttgaatccaggaggcagaggtggcagtgagctgaggtcacaccattgaactccagcctgggcaacagagcaagactccatctcaaatccctcccccacaaaaaaatggctatattaattataaaatgcaagttgaaatagaagaaaggagtgcattttagacatgcagattttaactactgtctctaaatgataaattttactactctctctaaatgatacggtgattccttatataaagttttcatttaaaaaattctaccttgtctgtacattttactcactttcacaataattaagatgtagtataagccacagctattgcaccaaagcaaagcataaaattgtagcgtgagtctgtggacctgaccttcccccctcttccacccacaataatagaatcaggattaaaatattcatttcctgcataaactaaatgatcatgacagtcctcaatgtgtatggaaactgtctagtgttcaacaattataaatagcctaggaagaatttgatgtggcaaaattattaaaaatgtacataaagaagttcagctgccccaaggaaacccacagctctccacagtgaaagcagatctgtgaggctttcatatgttaggatcctggttagctataaagtcacaacgggggcctggacactgagagaaggcaggagcaggaagacaacttccctgcaacatgtgtgggtcttcacctctctagccactcttctgatgaccacataaggaccacgatatatgcatatttttaagtgtccttttaggcttacaaatcccagaggcaaagagaaaactaaaaagaatttaaaacccttttatttttggagtaataaattttggggtctttgatttccttgaaatactttaaaaaaaaagaaaagatgactttgcttgactcatattaggtgtgctattaatgttgctaaaaaagcatttatcctttgagcactgtagatgcttctagaaaaatcgacttaataaagatatagaagaaatttttcctttaacttgaaatattccacggcctctctttttgtatcctactcacatgtataattttatgtaagtttactgaatgtttttcttatgaagtacataaggcctgaaaaatcttatagagcaaataaaaattctcttcctttaaaactaatgtcccccaaaaaagcagtccaatattccccaaatgatcatttttttcataaagaacaaattgtggaagtttttactgaaaaatttttattattttttgagtgrctcagaataaagagttataatgaaattttcttggagctttaacgttgtaatttatgatgactctaaaaatatacctatgtatattaagtctgtattttacaggattatgtattttaaattatacacaaaatagacacatgtgcataccctaagattattaaactttacaaatctatatgtattttctttttttttttataaaatttcctggttttgtattcatactatacctgatcataaggtaacccaaaacacatttactttaataacttttacacattcataaatatttttaaaccccataaatgtttaacattagtatagtatatcaaagtaccattcttttctctgtaaataaatcatttctaatctaaagacttagaaggagtggggagagatgtcaaacaacacatatccttctggccagggaatcaaaaggcattcccagacattaacttttctctccaaatatgaaaaacatattaaatatatatcttataataagatgttttcctcatgtttcctttgagtaaagtctgtttagtgcattcctcttcccattgtgctatgaaattcttggtcaactttgtcatttctccctctgcctgctggaagaaagccaaaatcactgtgatatcattcactcaaccaagactaaccacgttaggtacaggcaaaaaagagctataatgcaaaagaaaaatgaaaaatatatatataaattatacataggtacacacatacacacacacacacacacacacacgcacactgcccattacactacttctaaagaaaaacagataagaaggaaaagaagacaggctgtgaaaacagacataaggcattcataggattgaaatgaactttcagcacggctcaatgttctacactttaaattttttttttaaattcatgtggccatctgtatctgtaattaggagtgaaaccataaggggtttttcaagtgaacctttcctaaagctacaaactgtcatggtgcttaaaggagtgggtgccaaatgacttgtatgtttctgagcagccatatcgcaacaaacagcgcgtgtgggtggccacgttgcttatatttgaggtatgcacgttagcggtattagttacacttacatctcactaacacagaaagtcctcatattacttctatgatatctttctcacatctttttgctatgtctgtcaccaactgatatgctatgtcaactggatatgtctggagctgtcaataatttttctgtataaacatcctctttgaatcaatcttttgccacctgaattgttccacctcatttcttttgagcagcactaactccttcaagaggacaaccaccactaaaaacatgatatcgaagcaatcattcgttctgtgcacacattttaatttcatgccctacaggggggaatcactatcagccttaagcaaaaattgagtctttaatgctttattgttttacacaatttatctttcaaatagtctattagctctttataaaaaaaaaaaagaagaagaaagaaaggaaagaagggaaagaagagaaaggagggaagggggaagggagggagggagggagggaggaaggaagttagttggtactggggatttaaggggcatccagcccccaaatctgaagctacaaatattttaccaactgtatttttatgaaaacaaagtgaatttgtcaaatgtctcccccttcgcttgcatattccattgttatcccagcacactgagacctaacaggttaagccaaccctgttgtgatcaccagaagagagagaagcattgtgttttttgatatcacagatttaagatgggttttgcagtgtggcctataatgtatatctcacagaaaaaaaaaaagacaaaagatgtgggggtgagaggcagtgggaagcagtgaagaataaaaaataatatgagcaggagaatgtatgaatgtgtatatatgatcagaactggtctcaagtctattatgtgatttttgttttcctttgacacaggcattattttctcattggcaggagcctccagtgaaatgctggtctcttccttttccctgtatacgtattaagggtctaagatcatgagtcagtgaggacaagccgcctcagtcaattaacaggagcatagctacactaagtcctgcaattagaagctctgacttagaagctggagaagcagagagtgctgagcgatgctgaaaagtcactgcccagaaaaatttaagaaactttccaaatcacccactcgtagaacttcctttttcaatgggacatttttatatatttttaaaagtatgcatgtagagttaagtaaagcgcttcttccaataaagacattttttgaaaaattctatttacagcccagactttcctgccctcttgtggagaaaatacagagctctctattcatataaataggatggctttttaaaacttgcagctggctttttcaatggtacgtgtgatttactgtcatgtttggatcccctgatattcacagaactttactagctataaaatcagaataacaaagtagagctaaataggtattataccggaagaaaccatctaattccagacaagaaaaaattgcattgattaggatctgtttgtttgtttgtttgctgggaggcagggaaggggagggaaagtgagagggagaaagtgattcgtttttaatagtacttagatttataaataaatatattcaaaataactagcaaaagagagaggaagaaagagacagagagttttcaaagtggccatcagaaagctctggtcctgtttccatctttccgcccagagaatggaccagtgtctctctcttgtggggctgccactgcacagtgccacctggacaggaccagcctgggacacagaacacacgaatcccatcggcaactctcatgaaatcacagaattcccaaattgccgtaggttgttttattttgttttcttttgtgactgttgcccaggctggagtacaaaggcac

SEQ ID NO: 93583 - DNA, 97678 bp, Homo sapiens
ttacccacctttgaattgtctttatctggcctaggtatcatattaagggaatcaagaaagtcaccatcttggttcctttaatgaaataatttatatttcattataatttatagtgcattataatttatgtttataattatttgtatgttatatacttatataattttagaacagtgggactctctggtttttgtaagtttgttagcatccccctctgaaaccatctggacctagtactgttttgtgtgggatagttccttaataacgttgactgttttttgtgtgtatgaaaattagtctgtttaagcttttttgctgtaatggggtcaatttttgttatttgtatttccacaggaaattatccatttcatctaagatttcaaatttatttgcataaaagtctgcaaagtatcttttatgaattagacatgtaaattaattttaaatcttttttcccataattattttacctatatcatttattattttttgtgtttgttctttttctctttttcttgatcaaattaggtagtagtttatttattaacttttccaaaaaatcagtactttgatttactaattggatctatttttctgttctctacttcactgacttctgcttcatatttattatttccttctttgtgttttctttgatttactttattattgttgttttcccattaaaatttattgtttttattctttcatttatatagataacagtgttttatggacaggcacagtggctcacacctgtaatcccaatactttgggtggctgaggtgagaggatcacttgagcccaagagtcggagaccagcctgggcaacacagggagacgctcactctacaaaaaatttaaaaatcagccaggcacattggcatgtgcttgtagtcccagctgctactagagaggctgaggtgggaggatagtttgggcctggtaggtcaaggctgcagtgagccatgattgtgccactgcacagagaaagatcctgactcaaaaaattaaaaataaaaataagtaaatagaacacacacaaaaaaatttttttttaaagtgtcttttgcaatcaatttttctctgatcagtgctttcaatgtatcttgattctgatacatagtgttttcaatgtcgtttttaagtttctccttttctttaggagttattaggaggttttaaaaattccaggtagatgaacctttctggttttttgtttttatttgtaaatctagttttattgcattttggtcagaaattatttattgtaatatttctgctttatggaaattgccagtattttctttgtgacctactataggatcagcatttataactgtgctgtgattgcttagatgtatattctccataatcaaggtctaaagtttgatatatatccatgagatttactgtatttattatgttgcttagatcttctgtttcttattttttgtaaataagtgatctgttttgtactaaggttatactaagagttgtatattaaaatctactgtgtcctgtgtttccatgtatctcctgtagtttttgcttcagaagggtggttgctctgctttttgctatgtaaatatcatgattattacttattcattttggattatggcctttattatattaaaaatgtcctcatttgtcatgttcagtgctctggactaaagacttaaagtctttaagatataaagactttaaaaacatatttatgagaccttcctgataactcctaccactcctatcttcaatacctatgatgatcattccataatagcaagcagctttaattaggatgtactttcatgggagctactagaagctgtgatatacctagtgtataccatttccaatccaaaaagaaggaagaaaaaaaagtggcaactggatggtcatcactcggaatttatactgaatgttgtggcttttgcttttaaaaattttaccaactaagctgtatagcaaatcatctgcatgcactgtacatttaaactaaaatagaaccttatttccttacagcattttgctgtgttttatttagaataggtacttcttttgaaaggattaattaaactctatctaattacccaaggcagtggtatcacactggctctgaagaggagtacgaaggagtgaaagagacctttccacctaatcttgtatacctttttaaatttgggaccatgtctatgtatttcatctaaaaaccacatttacacacatgcatgtaaaatataactaaactccataacttgaaacatgatgtattaggtgcaggaatctaccctcttactgaaaaaataaaattattgggtaaaatactaaaaaacataccttgaatgcatttcttaactaatgactattagccaaccaacatttcttttagtaggaaagtaagaaaagctcagatcaaagatcaaatgatagcaggaactcagaggggaactgaccttatcctgaagatatttgtctaactaggtgaacctaaacattgcattcacaaccctatggggctagggacagaagacaaatcctagggtttatccaaaataaatagtctaatagatcttcttccataaagttgatctactttctcagtaaaagagcaaactaaaaataacctccccactagcttgctcagccccaggaaataacttgggtgctgaattaaggaggaaaaaaatctttccttagaattcataaccaaaatacagcctttattgcagattatagctggaattcacaatatttcgaaggcaaaaaaaaagttaagctgaggatttagtataattagtgcatgaactatagtgctctgttgtctattagaagcaaatattttgtagggagttgtccatctcacacctcaacatgttttgcacagccaaagttccaaggaaaatgaagggctacctcatagtaaagaaaaacattacatacacaggggaacaaggtatcagcagaaacagcaatcagacacagaatataaaatgtttaatgtttcaataaaggagaggcttgaaaatgaatgaagatgttgagtggaaaaagtcacagaaaaacacctacagtacgattccatttatataaagatatctatcaaacagataaaaccaaacaatatactttgtgggagagcaatacacaaacgcttaaaacaaaactgtaaagaaaggagtgataatagaattcaggatagtggtccctttttgggggaggagagggttgtgatcagaaaggggcatattggaggtgtggtaatattttgtttcttaacctgggtgtaggaacatgagcatttactttgtttttaaatggtatattttcacatgttcttgaacatatgctaaatttctaacaaaaaggaactatgtaataaacatgtaatatataaaatctatgttgattaatttttcttaaatatttgaaatgaattatttgaagtactctgatagtgagaactataagatttaagaaaaattagagtatttcaagtatttaacaaagcttatggtttaaggaaacttcttttctactgatatgatgaaacaattttcttctccatgcttcacagcaaaagcattaattttgggttgttattaatcttcctttttttctactttgcagcaagatgagaagatgaagtgaatttatggattctggtttttctgaattttcaaagcataaggaatcaaaacagaaatatagtatcaagaagatgaaatgcttaatgaaaaggttttttttttgtttctttggcctttcatggagtgttgatttgtccattcttaatgtttattaataggtatatgtgcataaaatagctattttgtaacattaaactttttgagtcattttggtcatcatataacttaccttcctgtttatttaagcttctttttacctagtagcctttaaccaaacaataaccttttaaccaaataaaatgtgttaataaatacctttgcattggttatcttgtatactaggctgtcttgttttgctgtctgtttttaacccattcaatatatgtggacatccaaaagggtttaaaagccacctcctgccctggcccgttttctctcccttcattcttctgttttcagaaatacatgttgaatgtcagcttctgtattatttctattatatgtaatctgatgacttagaggaggagattaacctttcaggctcttttgaatttggtttttataatttggttttaaagatcacttactcttccagtaataagtagtaataaatcctgttcatatctgagatcaatacacagtttattgaattcaaatgactactcaaactctattccacctagatggaaaacttttttagacaatatctgaccactaacgcggtgggcccagaaatctgcatcttaatcagatgcttcaggtgagtccgtccgaggattgtcctagtaccacactttgagagactgcagtgggggtacagagtgctggaggggtttagtcaatagctctagtgaaggatggatagttttattcaaagaatcccagttgatgaatgaagaagaaatgctagaattagaaaaattgcaaacccctattaaaactaccgctcaggcaatgctcaacaatggatgtaaaacaattaggtgaaatgttgatggagaaattcattacaaaggaatagccctctgaacccactgatcaatgttagcatcattacgaatgaaacaaccagacaccatatgcttcctgctgtgctgcaatattaattatatggtaccacctatgaagtgttcttgccctctcccccccaaaaaattgaacctgaatttaatcaaagctttagatctaatatttagtgcataggaaataagtagagtagaaaaacaataccagggagaagcaattagccaaattcaaaaaatggttcatttcaatagaacaactgacctggtttctttttcaatgtgttaatagtgttaaaaagtctgttttagatcaaaagagactgatgagaccacatgcaaatacattgcacagctcttgtttgattcaaagaagtcaagtgtaaaagacattttttagacacgtgaaatggtgttgcggctgactaaaaggatgtgtatgtgtgtttttgaagtatttagggctaaaatatgtccaggattggcttttaaatactacaaaaaatggagtatgccaaaacgttgaccattgttaaagctcagtgaagggcaggtagatgccaattgcactcttcacttttatgtgcaaagtttggaaaatttcacaataaaatttttgtgtttacataaatgaaataacatgggaaaatgttctaaggtatggcaagtgaaaagaagcctggaaaataactagtttgtcccacttaagtttttaaaggtgttaaaagtacatgtttcaaaaagtaaggatagactaaaaaagtgaacggtggtaagttctaagttgtgggcttacaggtgttctttatttttatgctttgctgtattttccaagttttttttttaagttttccaagatgttttacatctctgttcttatttaccagataaactttgtggttagttactggataaactgtaaatagtgataaaatttttaagtttatatcaagatagcacttcattttaaaaccagtaattattaggttggtgcaaaattaattgcagttgttgccattggaagtgatggtaaaaaccgcaattacttttgcaccaaccttatatttctaaaagatcaagttgtaaacctatttgttttccctaagatccgctcttgcagagttggaataaatatgattgtttacacttaagagtccaggactacagcaggcctggttggaggggagttactaatgttcccagacttaaatccagctggaacaccacctaaaatatgcagtaacataagaccatcaaaagcaatgtcccaggacttacaatgtttgctaagacgcaagagggtgtgacacagacgctaagcgccactggcgaggagatgaaggggtcgtcttcatcttcgccggatgatttccgcccacatagagggcgccagtgacgcccacacacgtgctggtgtcccgggaagagttcctggcaaagagctcaggaacgttggatcttaatcaaggctttctccgtcggggtggatgggttggactttaggctccagcaagccccgccccactcggcgggtcggtgccgccgggtcccaggtgcccgctacttcccagaacctccgcctcccgctccgggccctcgaaccagcgcggacaccacaatggaccgggcgtccgagctgctcttctacgtgaacggccgcaaggtgagcgcccgcgggcttcctctgcccccagacctgcggccagggccggggcagagaggagcccctgccgttcgtcccatcctttsgtgcccgccgtttaaggcactcaggcacggactggctttctccygtaacagcggctttgccttcgcattcccacccctgcctccggggcagctaaaggctgcgttttcagggactgtcctggatctttgggcccccaccttccttatgttcccctttcctctccttccaaggctcacaagctgatttccaaccacacgccctccctaaacagtaagataaaaagtattcttgcccatcaggggtcagcactcccagatcttcgttccctcaatcccagccgataacgggaacgtccccagtacactgagagcagcctacagaaatggctgagcctcagctcgcggggtgcgtttggaagcgcagagagcaacttagattcgggacaagaccgtagagacgaacacattcaaaccacccccatcgtttctcagatgaagaaatcgttactttccaaagtcacagctagttcctggcagagctgaacccaagtcaggctctgggggctccaaggtcctcacgggttccactgctgggtgcgggctctgtcgcctcagaagctgggctcgctctgcgcaacccgagggacagttccaggcagtgtccgatgtttgggagaagcaaagccccctgggcatcctttaaaacaccccccttaatgtgagcatcaactctgctcactcttaatgttccagtttcattgacattactctgaaggaggaaactgaggcaggaaggttaaggagctcccttgagagctgtggctcacgcctgtaatctgcactttgggagaccgaggcaggaggattgcttgagcccaggagttcgagtttagcctgggcaacatggcgaaaccttgtctctacaaaaaaaaaaccaaacaaaamaaaacaacaacaacaaaaaaaaaccggtgtggtggtgcgtgcctgcagcccagctactggggagggtgaaggaggattgcttgagtctaggagttcaaggttacagtgagctgtgatcacaccactgcactccagcttggacaaaagagtgagatcctatttcttaaaaacaacaaaaacagagctaacaaccaagcaagagcagtggcacctgatttccctggtgctcgtgttggtgccggttcattcagagccacctgtgaccactgcttctggctaagggcagccacaacacttttcccgacgggcaccagctgcctcccctggaagctaaccagtgtgaagcaccaggccctagttgtgaggcctgttctaagaccctgagcctaatttcatttgtggttttgtattatgtttcttaaagaggatcccccaaattgtacattaggcccctcaaaaactttgtctgcccctgctgcctgggttctacattggataagatgagctagtttttcctgatctgtaagggtcattaggaccccttcacaggactgctgtgagggtgaaatatgacaatggggtgagatgattgacattatgtcatttttttcttcttttgcataatagaatggtatagtaaacacaacactggctttgttgtttagacaaacaagtcttcaattccaattctaattctgattgagaaaacctaacctctcagaggcccagtttctctgttaaaaggggatcataccacttacttcataaagagtgatcatgagcattcaatccacttatttgttaagggcctaccgtatgccagtcagtgttccaggcttatgagatacagcagagcacagaaataacaagtccttgcgtgcatggagcttacattgtgctggggagatagcaagcatataaatacgtggaaatgtgtaatgtcaggaagtgagaagtgctaatataaaaaataaagcacagcgtggggacagagagtatgcaggatacttagaggggatggatgttttggcctgtctgaaagggtggcatttgagcagtgactgggatgcagtgaggagcaagccatgcaaacatctggggagacagcatccaggcagtgggaatggcaggtgcaaaggtcctgaggtaggaggatttctgtgtgcttaaggaggtaggttggtgggcctggcaacatgggcagkggcctgattactagggctttataggtgatggtaagggtttgggttaaatgaagaaacagggattgtgagtctaacatctcctcgcttctccttcccccacttccaaacaaatattggtatttttaacataatggccaacaagtttgtgctctattgatttttaaaattagataagctagttcttatctacggactcactttgtctatgggccaaatgtcctgtggttatttgtaaagtataatctggagatattgattctgtttttgcaattacccattagaagaaattgtgttaatctttccctttccttctcctcccttctaaattctgttaggtgtgtgcttcggtacttaataaacaagcctgattacttacatggaaagaactagaataagctttttttttttttttttttgagatcgagtctcactctgttgcctcctgagtagctgggactatgaaactgcaagcacccaccaccacgctaatttttgtatttttagtagagatggggtttcactatgttggccaagctggtctcaaactcctgaccccaggtgatctccctgactcggcctcccaaagtgctgggattacaggcttgagccactgtgcccagcctagcataaactttttcgttccagagagtaagggattgttgagaagagtgtgagagaaaatccaccctagaagagrgcttttgaagtcaaacacaatctctggaattaaaaactcacctttgaaaaagaagcttagaagtgaagccacttaggagaaaataggtgacatgattggcttctattctgctttttgctaaattttctcaggtcaccaaaagttgtcctcaggcagaaggtaacgacatctggaggcaaggacagcgcacgttggccagggacctagttgcagagagatttctgaaatcttattcactctaccaaggcccccagaagaacagatgacccatttaacatggagtttaagggaggaagagcccatgaataaattctgccatagatgccacataacaacctcaactcaggaaatgaagcatgtcatttcatgaggcaatgaggtgtggaaatcaaaggtatgggccttagaactagtcagggatgggtttgaatcctgtgctatctgctctgccacttggcgggtctggggcctcgggcaaggtacttaatgtcgctgagcttctgttttctcttttgcaaaatggagctaataacagaaccttttcccttgaaattggggctgattaagttgcatagagagaggttagcagggtgggtgtacacagtaaacagattgtaaattgatatgtggaaacaattgttgctatctggactataaaataatctgtttcattagcagagccagaacctgcttagaggtgtcaaggatgctaagaagcagtcatcctgcattatttgcacaatgagcatagacttttggtactggtgtaggaatctggaaagagcagtttattggctagcattctctaaggttcttggtttacaaggctgagagaggaaatttctgggcttctggaatggctgcaatgattcagagaaaagtggagaaggtggaggcaccttaggcagaaagaagtaacaagcaaaatgaattttaaaagcaacctaaagctcaggaagatgtgtccccatggctgttccctgaggcttctttctctcctctgaggctgctgtagattattgttctctactaactgcatctcacagcatacacccctttctttcctcctcttctacctctcagccttgtcccttcacatgcacctctaccccttccttattttctactctctctcctcttatctctctcttcctttctctttctgactctgtcttggatctggcagggcctcctcaggcactagtcactggcagtacacagagaaaagtgatttcttaaccaagtacagcatgaacttggactctcccaaaagggctggcagtgatacagaggggcagattccaccctcagattcaagactatgctgagatgagtacatgcaatgaccctgacctgagaactggcaacatctctcaaatccagagtcaaccagaataactgttacccatcccctgtatgccttctagcctccctctgagtcctaacctccctgtatcattcccagagctgccaggacaagatgcgtgctagatctctgcccccacttcctccaaatacaaccctcactacatcaaaacaacaacaacaacaacaacaacaaaacacatttcaaactggtgggactttgagccagattccaatcccttgaaacatttcctggaacacatacccaaacaagcatgaccaccttcttccatgaattctttcctcaaatatagaaatattcctcaagcctaaaatgctattctttactaactaggctacccagaccctgtctatccattaaaacggggcttctattgtttaccatcatatctaggaacagacattgtgaggttggggcagaagctttatggtgttatctgagacccacgtttcttctctcttttttctctcctgccattaacatgttgcctcatggtctaagataactgctggggttctagccatttcatccctattccaagtagcgggaaggaaggaaaggagaatgcatgccaggatagacaacctacagtttctgccaccaataacttctgtgtttttctttatttttcatctattcagatgcccaagtctatgagaaattccttccttcttggtatctcataccaaatcatacatagcatgttccagtcattcatttcattaattaacacttattacatcctgtgatatttccccaccaccaagctcagtgtttggcataaagaagaacagcagaagatggcttctttcaggatcgagatagtcttgtacacacacaaataattatgatacagtgtaaaaagtgtcataaaagaagaggtgaagacatcagccatgggaacaaagaggaggatggttactttgagatgcaaaagggtattttaggtggcagaactctccatagagaacacttgagcagggtggtgaatgacatacaaaattctgccaagaagagaggaaggattttcaggacagagggaaccttgcatgcaaatgcagtgaaggtgaaagtccaacgcaccccctggactgtccagttcatccrtgtggcctgagttcgaatttcttcttgtattccggaaatagttggttattaattcacctaagatccactcagtgtactcatttaaaaagcacattttctggttccctctaccagaaatcctgattccatagcggtttcattttaacaagcatctccatgattcaggaattcccagaatggcagtttggcagccaggagccaygttaaatttaggcatatacatgagacgatcaggcttgggttttasagcagtcactctggtcgtggtgcagaggacgatattgcgggtaccaagagtggaggcagggagaactctcaggcaggtcttataatcattcagacaataggtgatatgggctcatgggcagtgacagtagaagagaaaggagtttagaggaacattggaagcccaagtggaagaacttggtgacactgattgtggtggattggaaaaaaaaaagttgaaaatagctcaggttttttagcttaggtgacctagcagatactgaggccattaaaaggttaaggaaaagaagggaaggagtaagtaagtttggaaaataaaataaagagttccatttgagagccaattaagttgaagatacctgagaggcaccccatattttttcttatcacatacacacacacaaacagacacacatgcaccaatctttctatattgcggactcttctagggcacagatctgaccttggcaattggcatatgccacaccttgcctggaatatagcctgttagaattgagggtgaggcagcagccctagaataagcatatgtccactcctcacctactacttcccaggagggaaaattactataatatggtgaaagatgaattcagcttctgaaatggcaaagcaagtcatgcttctatgtgttctatgaatccaaaagaaatgtcaaatttttgtgaaaaaagagaaaacatgatcactttggaaaacataaccaatcttgacattttgatgtcatccttgagaaaaaacagcatgctgttctgctgctatgctgccaggctgctcccatgaacttgcctaagtatgtccttgctgcacagttttgcatcacttagcatacatgttttatcttcccctttgtttatttgattggggccatggctggttatcttttactggaaaccacaattatttgaacaagataaacaaacaagtctttttaaaaattaactatatcaatttctcagaggctattctattccagcaattcccctccctcctttcctttcttatttcatccactcctcccccaagtctgaatgttctactaatgtctttactctcacctgctttaaactttctagaaaaaactggacaggaggtagtgttyctgttagcagaaacaacaattgccttagagaacagcgataattcaggaccaaggacaggagcacaattgtggtggggctcaagattacacataagagtggtggtttgcatatcacagctgttccataaagctgaaatctacttgaaaatatgagtaaaagggctaattaacatgcatttccctcaaattagtgtgatcctaccaatgtgaatttcatattagctctctcaactaactcttattttccctttggtataggtgatagaaaaaaatgtcgatcctgaaacaatgctgttgccttatttgaggaagaagcgtatccttttctttactttgactgtgtatgtgtgtgtgtatttgtataactccaatatcctcattaaatgatatttcaaatatacattagagacactgagacatattccctactatcatggttttatgctcatatttgagaaagtcctatcattttataggcagtgcacaaatgtggccgtcagaagaaccaattttcttctagtctctgtataaaatggggaaactagtaatggaaacttaatagacgttaaaaggacctaactaagcatcctttagaattagagtcacaatatttatactctgtccttaaggactaattattatgcccattaggaaaagagagcacagaagtcacctgaaatgaaagtaaaaggaaaacggaagaactaaacctgaaaatgttatcctagaaaaacttgccaaataaatgccatcaaaggaatgtatttttagcttgctatgcatgaactccagtgggctacccgacggtgaaagacactactgaattatatgcaaaattatgtttcaaagrgggtgtgtacatttttccccctggagagagtaaaattaccaaaagagtacataactccaaagcatcaataattatttttcagacacatgaatatgtttctgaaacatgctcatgaaagtcattcaagatctttagacataaaaaaacaatgaacatgactccctgattatccacagtacctatgtataatatttaaagtttggttcactatgagtgacagaaaactccacctcatggtaaacaagatagaaggtaggagtttctttctttctcattgtgttagttcaggttcttcaggatgtggacaccaaaaatgagattaaatgtgccaggattttattaggagaaatgcctgtgggaaaggaagtagggagtgaatcagaggagacttagggagccatttgatcaccgtgtaagtctgaccctggagataaggttgagtggaaggsccctagactgctggtcagtctaaggcatgttcttcagaaccactggggatggttgacaaggactccatgtctctccatagcactaagccattggtggagagcagtccatgggaagcatggtcttaatgaaaactggagtgatcagtattaaagtacagcaacagggtcccttggtcagttaccctctgtgttgaagggaggtctgtgaggcatgtttgcatggctatcacactcacataaaggaagcccacaggyaggtggatcagagctggtaaagcagtgtcacaatgttgttgaggaaccaagcagcaccttcctcagcacacagctttctccccaccatcagagatgactaatggaggcccagccctcatatctgaattccagcaaataggaagaagtaatgagcaaagaaagaagcacccctctccttttaaggacactcttctcctggaagtcatacacaacacttataattacatcctagtagccagcattgttaatgaccccacctagctgcagaggagtctgggaaagtctattttttactctgggaagccatgtgtgtggctaaaaatcagtgtttctatttctaaggaattatgagagaacagatattagggaacagatggcagcttttgcgactgaaaggcagagaaatacacaaacatggctaagatgacacaaatattccaagcattatctacaatttaatattttgctttgtgtcatcaaagacagagataaggatgagaataaatgtgcaatgtgttcataccttcaaatactcaagtgcttacayatatagactcttcttttttcagttcagccctatttttggcaacctgacgtccagttgttttcaaagggagaatgcaagatataacacacaaaaggaaatcaagaatttacaagattattatagcttctataatagtaattaagacataaacacattatttgatgaatatgtattgaacttaactaacatttaagagtctgtgatattactgtctcctagtggcagggctattctagaaagagaattacataacacatatgatctttaactatacctcttccagttcgactcacaggaactaagtatggctgtggaggaggaggctgtggtgcttgtacagtgatgatatcacgatacaaccccatcaccaagaggataaggtaccgtgcagcraagtccagatatggttgaatttttataattttgaactttgttatattccttcatttggtaaatatatattgagtacctaccatgtgaaaagaactggccacttggcgtacaatgatgaacaagacagacatggtcctaggaatatgaatgttttgggaaaaaaatgtagcatcaatgaggataacatacggtcaaagaattccccatcaaakccaggyacagtggcacacatttctagctacttgggaggctgtcaggaggattgcttgagtttgagtccagcctgggcaacacagcaagaccttgtctctaagaaaaaaaaaaatcccctgtcaaaacttgaatggctccctaactccctgtctggggaggaaaggcaaggctgaaattgcagtggaggataatgccatcatcacattcatatattactcttccagcccctaacttatctccttcctcccatctggtgcattctccatacatcagccagagtgacctgctttaattatcatcagatcaagtcattcccgtacttataagcccccaatggcttcccattatgtttaacatctgtttatgtttggtatttatccttcctcacatttgccaagtttcttggatctgtgtgttgatgtcttctggaaacttctcaaggcattatctcttcaaatatttactctgtgccacacactcttccctctgttcttctgggaatccaattatgctaatgttagacsattttacatcatttcacagatcgcacttgaaggctaaggatctgagcactggtgaggtttcagatatctgcctgtgttccacaccaaactacctgctgtctgaactctgagaggttcctccctgctttacggcctggctgtcagctttttagttcatgagggatttctctttgcttacctctctcaccttccatgctttgggagatctgtcgcagccatgttgctctgtctttagcctctagggagtggcgactaccctatgctctgtgaagtctgagtacctagggtttctctcagttctcctgtctctcccccagccttctttgtttaaggaccagtatgcttggaaagtttcttttagctctccttccctgcctattttggggaactacccccggcactcagtgatctctggtggggaagagattgaagataatgcatcccagctttgtatttgaatctgttgttatcagcccacatgcaaccattcaaaatttgttggaagttggtctggtttctccttattcctgtttaaggcaggttccttttcctccttcaatttcaggaagagaataattgtatctcagggatgagagcaactgtatcttctctcttatgaaggggttgtcacatcggagtttagtttatttatttattaagttttgctcataaagtttctttgtgtactcagcatctgatgagctttgaaaatgtgattatgttcctcgtatggtttactttggtttttagaatgggagtggcagtctcttacaactcttaatggcttgtttttaccttctggtctttgtactaaggcaccagtttctccagttctttaatgtttaacttatgcatccatcagcgtgacagtgaggtgttggtgaagtctggctgctctggttgctaatggagacctggcctgccataggtgcatggttacctgtgactagagaatgtcaacccctcattcaaragcaaaaaccatcaaagttgtgacagtttttgataagtggacaccattctggaattagaattaggaggcgtaattttaatcctgcctctgacactctggctgtgaccctgagtaaatcactctgatcctcagattccacttctctaaaatgggcctgtgcctgagctaaggaggaaatgtatgtgtaaaacctgggtacattatacaaaaacctgccacagtggagaagctcagtgaatgcctggcccctttcccactgtatgcgacataatttgtaatttgtgcttttcttttgcattctgaaggcatcacccagccaatgcctgtctgattcccatctgttctctgtatggtgctgccgtcaccacagtagaaggcataggaagcacccacaccagaattcatcctgttcaggtgaggatgtgcctcttccttataggctttctgtgctttagaaacctcatgacattgagtccctgagattaagagagcggassagcctggggcctgctggctcggccactccaacagatacaacctagytgggaacaagagtgaagcctggcatattgggatatgtgagtgtttctgactaacttgttggaaaaatgcttttggaaggctagaaaaccttttcttctctaagaatgccctgacatttgtgggtttgttttttgtgttctaattcgatgggacctatctatttgacatcttccaaactcataaagaaacaagagccaggtgcagtggctaacacctgtaatcccaacactttgggaggccaaggcaggtggattgcttgagcccaggagtttgagaccagcttaggcaacatggtgaaacatgtctctacaaaagtacaaaaattagtggggtgtggtggtgagcacctgtagtcctggctactcgggggtgctgaggtgagagaatcacttgagcctgggaggttgaggctgcagtaaaccatgattgcaccctgtacttcagcctgggtgactgagtgagaccctgttgtaagaaagagaaggagaaaaagagggagagaggagggaggaagggagggaaggaaggaaggaaagaaaagatgaaggaagaaagagaaagaagagccatgtgcattgagggatataattttatttttttttataaagtggaaaacaacatgatcttaaggctgagtgaaaatttcagctaccaaaaagctttgttatatttagagcttgtttggaagacagatgataggagttgtcaataagttttttggcttttctcctaaagaagcaccttgttagagttttagactcaagtaaaaaggcatcttcagacacctgagtctttatgtatatattgcccataagaatgccatttctaggccaggcgtggtagctcatacctataatcccagcactttgggaggcagaggtgggcagatcacgagctcaagagatcaagaccatcctggccaatgtagtgaaaccctgtctctactaaaactacaaaaattagctgggcatggtggtgcatacctgtagtcccaagctactcgggaggctgaagcaggaakaatcacttgaacctgggaggtggaggttgcagtgagccaagatcatgccactgcactccagcctggcaacagagcaagactctgtctcaaaaaaaaaaaaagccacttttcctcatttttattgaagttaatgaagatcaaatatgagaaaagatagaaggaaaagataggagcaacatagaaaatgacccaagttcaaattttctagatttgaaggaatcttggattctgtttatttgaaagatcattacccagagggagagaattttgcctggatcattatgacatatcattaactagagggagagaattctgcctggatgcccatgtgagacctggtcatacacaggcatacaataccctttcatttcttcattgatgcggaactcccattgttacaatgttgccagaagacagcttccaaaatcgacttgaaccttagaagttagactccaaagcaaaaatgctagggggagggaaacgtataaaagaaataaaagcattttattttttatttattttttttccacttctcaacttgagtgtaatttggtttatttctctgaaggatttcttttatctcagtaattcacaaccacaactgcacgttgaaaccaaccatgtgggaatctttaaaagatgtatgcccgtgccccattcccagagactctgtcagttggtttgtggtgctgtgtggggcttgaaatcttaacactstccgggtgattctcaagagtggtaaccactgccttaagtgaagctcaaaagcagataaggcccaacctcacaacaacccagccctggggagggaggtgcctgggatgagaagggctcccaggggcctctgctgcaatcttaacatgcagacaaatcacctggggatcttgctagaatgcaggctctaattcattaggcccgggatggggccccaaattctgcatttctaacctttctgtgcttccaggagaggattgccaagtgtcatggcacccagtgtggcttctgcacacctgggatggtgatgtccatctacacgctgctcaggaaccacccagagcccactctggatcagttaactgatgcccttggtggtaggttatatatgcatgcttttattttttaatttttatttatttatttattttttgagacggaatctcactctgttgcccgggctggagggcggcggcgcaatcttggccccactgtaacctccgcctcccaggttcaagcaattcttgtgcctcagcctcccctcatgcttttacttttaaacgatgatgatgataatgataacagctaatattggatacctttcatgtgccacacacatttaatagtattaaatactatttgaagattatctcatttgatcctcacaaaaaatttataagataggtactattgttatccccatttcataaatggagaaactgaggtttggggagagtgatttgttcaaagttacacccccaataagtggaagaattggtttgttcaaatcaggattcaaaccaacccacacattgcatttggctgatgtatttctgaagtctcttttgtttttataatcattaaaaagccagttattcatcagcccttgggaagagtcctgttatctccacatgctgctccctcaccactctccctactgggtggtgggtgctttcaggaccatattcaacatcagagggctgcgatggttacagcataaagtcagagactgagatcttatggtgaaacttgatacttattgcaaagaactgtctatccaccctagagcgtttttgtcaagttcaggagctcagtgtgtatgtggcggggggggacatcctcatcaacaagattctaaacacgtttttttaagtgataccctctcaagttctgtttctggtgaacttctccatggctccgtttgtctttgtctcaggcctcccgaagacctcatttctctgctagagaacatgagcctaaagctcatatgtacacttactctgcaaaaatgttccaaggaaaaccagaacaaatggatgtagaaaggagagacatcgctcataaactgtcttctgcctgatttccttcagatcttatcatgaatttgatttcatggctgtttatgatgtaaacaagtgataaggggttctcagatttcagggtacttaggtcatacatgggaatttgtgggtaatgaagattcctgggacccacccctagagagtttgactcagtaatattgttttttaaataagacttcagatttaggggtggaggaggaacaccggatcgcactgtgagagaaacgctggcctgatgatttattataaataaataatgtgccckactgctttcacagtttaataactacctttgctgctgtataataactttgatctttctgtcagctgaagcttagagtgcttttttttttttttttttgtcacagtaagtgttaagaatgaggggttttttccttaraaaaagaagtatagcttgctatttgcaacaacgtaaatgaacctggaggacattatgctgagtaaaataagccaggcacagaagaacaaatactacatgagcccacttatatgaggaatctaaagtagtcaaactcacagaagtagagaatagaatggtgattaccagggcctggggaacgggaaaacaaagatgtattcgtcaaaggtaaaaagtttcagttatgcaaaaggagtaagtccyagagatactgtatagcataatgcttatagttaacactgtattgtatactcaaacatttgctgaaagggcagatgttatagtaatcacaaaataaatgaataaataaataaatgatgggagggaagttagaggtaatagatatgtttataacattgaccgtggtgatggtttcatgggtgtaagacttatctccaaattcaccaagttgtacagctttttgcatgtcaataacagctcaataaaatggattttactttttaaaaaaaaaawtagtttggctgaacacagtggctcacgcctgtaatcccaacatttagggaggcctaggtgggtggatcacctgaggtcaggaattttgagaccagactggccaacatggtgaaatcccatctgtactaaaaatacaaaaattagcctgacctggtggtgcacacctgtagtcccagctactcggggggctgaggcaggagaattgcttgaacccggaaggtggaagttgcaatgagctgagactgcaccaccgcacctgcagcctgggcgacagaatgaaaccctgtctcaaaaataaaagtaaaaataagttgtttttaaaataaggcttagctcttgaatgtgactgtagagcaagtttttggcttgaaattattgtgttgtttgagcacctgtcacaagcagaaggcataactttacaggagaaagtacaaatacctgagcttttaaaatctgcctcaagattcttaatgaaatatcccaagttgctgttgaaaagatctgacttkgtagattaggtggactaaaatgtcaaacagatctttcctctatgatagggtcctcatttccatcacactcttggtagastgtgcctctatctgggtcacttggctaacagagctgggtttttctccttcaggtaacctgtgccgttgcactggatacaggcccataattgatgcatgcaagactttctgtaaagtaagtggaaaggaccacatgtttgagtatgttttccccagtgaaacgaaatggtaatggttgtcagtgattaggggggcagccatcttactaatacatggctacttcttatctccaggtttctagctgctgtttgttatttgatcttgagcagggcacttarcctcattcattgagcttgccttggtggtcgcataatgaacacctgagcattttgacactggctgtgtgtcattgcttccaagaggtctttcctgacctctttgcctgggtcaggtaccctggcctggtgttcctatagccctctgcgaacatgtgacgggcatacacatgtcccgtcacagctttggtcacaatgtggtgcaactgatcatttgctatcccatgtcttcaccagactgtgggctgcttcacagtagaggctgtatatctccgggtccagtcaccatatagtcattgagtagctactcaatatttgttgaatgaataaatgaacaaacaaagttgaaatgaaggatataagattgccctctggaagttaaacaatgaattcagtatatcatagataagaacagtgatgacaataacaatacctgttaatatttattattaatatttaaaatactaacaatattaacagttaatcattattaatatttactatttaatgctatgtgccacgcttagttataagatctttatgtcttttaacttatttagtaatcactgctattcaaaattttctgtaagctcaggtttttcattaatgttggtttggatatgtttaagtacaaatggctctctttcatggcatctaacgatattgattcagcattatgtttcaactggcattcacctgctttatttactagttagtagaatcagcaataaattcctagtgatttgttttttgtccactagacttcgggctgctgtcaaagtaaagaaaatggggtttgctgtttggatcaaggaatcaatggattgccagaatttgaggaaggaagtaaggtcagtgaaatgtaaagcttttataaggctttctcaggacatgaacaggagccaacatactcttaggaagaacaaatggctacccaagttgactaacttgaggtatgtcaacatgtgccctctcccattctcactccatctctctataaaaaaaaattatatcgcagcaactttgtcctcattccagatattattcccatttaaatacagttatctacaggagggaaaacacattggttccttagtgtctcttagcttttaaaagcattttttcaagttatttttcaagggccagaagtaaagtggagatgtcatgaaaataaaagaacaggtagaacaagtagagacaggagaggttcagggagccgttcttgttccagctgtgtctgcggctgctgcctcctcttctactgtccccagactccaaagagaaggyacagggagttgaggcctccagaggcccattggcatcagcactgagttgctgatgacaaggtttgtgttagagcccttggtttggagcgcggggattgtggctggccagtggacttttttgtcggtttgctgtatctgactgtgtatctatatcttttgaccttattccacaaaggattttaaagttgctcgataacagtaatttctgatatgttctstttttagacaagtccaaaactcttcgcagaagaggagtttctgccattggatccaacccaggaactgatatttcctcctgagctaatggtgagtaaagcaatgttgagctcatcctagaagaattcatggtgaaatatcaggaagggtatttgtttatgggttctctcaaaagctgattggcaaataggtgaggcctctctgtcatccttagctcaaggtctaaagagtatggactaaggaagaggaggaggaatgggggtggggtccccatgggggacagctgagttgactgtaagaagcagcagatagcwtctataaaatcgtgaaatcacagtgtttgtaggtatagacatgtktcctactttcacttttgctgaagtttattcctccatagaatgatttaacaagattcagcrtgttactatatttgctaacattaaaatgatgttctttgagacaagagcaccaaagggagacagaccaagcagttcccaggagtaaagaaccatcgtgcttttattctgaattctaattccttgtaaagctctacttttaggtcactttgtactttattttttagaagatatgtattttctcattctgtatctacagtgctaatgattgagtggaaacaggtggagatggcatcattgggtaccttgaatccctattgctttttcaatagataatggctgagaaacagtcrcaaaggaccagggtgtttggcagtgagagaatgatgtggttttcccccgtgaccctgaaggaactgctggaatttaaattcaagtatccccaggctcctgttatcatgggaaacacctctgtgggtatgtagaaccccagggattttttatagggaaattgagaaaaagggcttgggatggggccrgggtgggctggggaaacttcatatacatgtgttctcaggaaaagcagtctgaaatagcatttttaatcatttgagctagacttcctgagcattgctcaagagactttctaactgttattaagtagattyctcttgcctcttattggagcagtgtcaagagttgtascgaaggggcttgctccatagcaaaccagcagcaggagcttcagtgacagctgtcctgtctttccttttggggactaatctgggcctcaaatttcaaattgctctttgtttcctctctcagggtgtctcaataggtatatgttttacttaaacaaccgctacagggtcttcctgttgcatccagtgtgtgctcagcttgaggagcagcccctagagtcttcccagagagaattttgaacatgccatatggcccaagtttcaaggttgacaattccagagtcttccaagtttgatgaaaatctatccagccattctctctgtatgtgatttggcaataaacagatgaatagaaagatacaatatttttagatatttaaagatattagtttaataataatttcaaatttaaaaggcagttagttcctttattctagtcttattgattttttttttttgatcctttagggcctgaagtgaaatttaaaggcgtctttcacccagttataatttctcctgatagaattgaagaactgagtgttgtaaaccatgcatataatggtgagttctcaagtccctgttttcttagttaagatgcattaatcaatttatttaccttgcccagcagacaagcagaaaaagaatgattcctaattataatacacacagagattctcttcttataagaatgatatgtttgttggccacataaatgtcttcttttgaggagtgtctgttcatatcctttgcccattttttgatggggttgctttttccttataaatttatttaagttccttgcagattctggatattagacctttgtcagtgggtagattgcaaaacttttctcgcattctgtaggttgcctgttcactctgacactaatttcttttgctaggcataaactctttagtttaattagatcccatttgtcaattttggcttttgctgcaattgcttttagtgttttagtcatgaagtctttgcccatgcctatgtcctgaatggtattgcctaggttttcttttagggtatttatggttttgggttttacatttaagtcttcaatccatcttgagttaatttttgtataaggtgtaaggaaggggtccaatttcgttttctgcatatggctagccagttttcccagcaccatttattaaatagggaattctttccccattgcttgtttttgtcaagtttgtcaaagatcagatggttgtggatgtgtggttttatttctaaggtctctgttctgttccactggtctatatatctgttttggtgccagtaccatgctgttttggttactgtagtcttgtagtatagtttgaagtcagatagtgtgacgcctccagctttgttctttttgcttaggattgtcttggctatacaggctctttttggttccttatgaaatttaaagtagtttttctaattctgtgaagaaagtcaatggtagcttgatggggatagcattgaatctgtaaattactttgggcagtatggccattttcatggtattgattcttcctatccatgagcatggaatgtttctccatttgtttgtgtcctctcttatttccttaagcagtggttggtagttcttcctgaagaggtccttaacatcccttgtaaattgtattcctaggtattttcttctctttgtagcaattgtgaatgggagttcattcatgatttggctctctgcttgtctattgttggtgtattggaatgcttgtgatttttgcacaytgattttgtatcctgagactttgctgaatttgcatatcagcttaaggagtttttgggctgagacgatggggttttctaagtacacaatcatgtcatctgcaaacagaggcaatttgactccctgtcttcctatttgaatacctgtatttctttctcttgcctgattgcactgggcataacttccaatactacgttgaatagtagtggtgagagagggcatccttatcttgtgccagttttcaaagggaatccttccagcttttgcccattcagtatgatattggctataggtttgtcacaaatagctcttattattttgagatatgrtccatcaatacctagtttattgaaagtttttaacatgaggagatgttgaattttatcaaaggccttttctgcatctatagagataatcatgtggttttcgtcactggttctgtttatgtgagggattacatttattgatttgcatatattgaaccagccttgcatccctgggatgaagccaacttgatcgtggtggataagcttttcgatgtgctgctcatcatcactgatcattagggaaatgcaaatcaaaaccacactgagataccatctcatgccagtcagaatggtgattattaaaaagtcaggaaacaataaatgctggcaaggctgtggagaaatagtaatgcttttacactgttggtaggggtgtaaattaattcaaccgttgtggaagacagtgtggtgattcctcagggatctagaaccagaaataccatttgacccagtaatcccattactgagtatatacccaaaggattataaatcattccactataaagacacatgcacacttaggtatattgcagcactatttacaatagcaaagacttggaaccaacccaaatgcacatcaatgatagactggataaagaaactgtgacagatacacaccatggaatactatgcagccataaaaaagaatgagatcatgtcctttgcagggacatggatgaagctggaagccatcattctcagcaaactaacacaggaacagaaaaccaaacaccacatgctcttactcataagtgggagttgaacaatgagaacacatggacacaggaaggggaacaacacataccggggcctgttggcgggtggggagcaagggaagggagagcattaggacaaatacctaatgcatgcaaggcttaaaacctagatgacaggttgataggtgcagcaaaccaccatagcacatgtatacctatgtaacaaacctgcacattctgtacatgtatcctagaacttaaagtaaaataaaagaaaaagaaaatggggacagaaagcataaaaaaaaagaatgataacattctggaggaagactgagggaagaattctctaaagttaatctaaatactaattgtctgaatagttcagtttttactgaagaacttcttctgtctgcaatatcagagaaatgtaacaactattcaatgaaggatacggtgctaagtgctggacagaagataaagatgaatataacacagtctttgctctttaaaaccacagtagcgagtttatgtattcaacagcttacagactggtttttctactcctgtagaggaaattgatataatggcaatgataagaagcaatagaaatgtgggtttgcagtacagcctctgaaatctaactcttgacaatggcatatattagctgtcagatcttaggcaagttactcaactctcagtttcttcatctgtgaaatggggctattaatatctcataggtatgttcagatttaaggagattatctaaagcattcaacataatactcaatagagtgagtgttcaaagaattcagccttcattacctccatcaacaccacttacatcactaccaccacctctatcattacccccaccttcatcaccaccaccacaccaccccctcaactgctatccctaccaccatcgcctcaccaccactttcattactaccattaccttcatcaccatcaccaccatcactgcccatcaccaccatcaccaataagcagggcagcatgtatccagtataaagattctatgtctgtagctttggtctaatggacattttcagatcagcagtgatcrcactgtgttatttacaaatgacttcatttcaggactcacccttggtgctggtctcagcctagcccaggtgaaggacattttggctgatgtagtccagaagcttccagaggagaagacacagatgtaccatgctctcctgaagcatttgggaactctggctgggtcccagatcaggaacatggctgtatgtatctgatgacagtaaactctggtatgcatcccttgggtgactctccctgatgaatcatgacattttcattcttttggaacagacaaaaaaaatagttctccaaagccttgcttaatccttattttagcacttgcttttttatgattacataaatgaaaataactcattatttttaaaagtctttagggggacacatcattagcaggcatccagattcagatctgaatcccatcctggctgtgggtaactgtaccctcaacttgctatcaaaaggtaagtgacagcccctacttggagattattaagctgtttctytacccctttttctctctggggaggcaggaaatccagtcttgaaaatgacttttcyctrtaatatcaatacatttctctgcttttctggatactggaaattttgtgagtcttgtcttaatagcacaggctttcttcccctgtgtctttctggttttttgtttgtttgtttgtttttcctcatactggtcaccctacactggacatgtttgtgttggttaatgtccggatgtgatctgattattgctgggaactacatgctattgagaactattgggtccctttgttgaagacattctccaggtggtacaggagtgttgtggcacccacatcgtgctttgagctcacacttaatttatcattgatggaaacrtacaggtctttttcaggtgaaaaatgattgggcctcattctatatttatttacttgatttttgttattaaaactaagtccacaacatctratttatcrcttcttccaacttgcttgaaaattattaggaagttctaattggtcctctgtaaatttgtggggttttttttcgttaaaaaatatggactagttttctatcatctgcattgttaaatacttactcttcataccatttaaaccataaaactatcttttttttttttttgaaatggagtctcgctctgtcacccagtctggagtgcagtggcacaatctcagctcactgcaacctctacctcctgggttcaagcgattctcctgccttggcctcctgagtagctaggactgcaggcatgtgccaccatgcccagctaatttttgtatttttaatagagatgtggtttcactatgttggccaggctggtctcgaactcctgacctcgggtgatccacccgcctctgcctcccaaagtgttgggattacaggcatgagccacagtgcttggtcacaaaactatcttaaagaggaagatttgcattcagggttttcaatttgagtaacatcccctaaaagtcatactatgagaaacaggtttgtgatgtgaatatagacatcaaaagcttcttagctttcagtattttgttatagttttaaactgttcctcttccttatatattaattaaagaactaaaattcttcaggtgttggaacaagatataaaaaagtaagataacatctcagtagtatacaaatttattaaagataatttcttattcatgactgtatctagtggggttcctggttataaacaataaatatttgttggctgacttgatcagaatatcaaaagagatattaatatttactccctacttgtaaagttttaagtgaattgtgttgtcaggaagaggactgctaaggttctattctacctgaaactctgggctactctgtgagatcttttcatctattttttaaatctattttttatttttaaaaaaattttttagatggagtctcactttgtcatccaggctggagtgcagtggcatgatctcagctcactgcaacctctccctcccgggttcaagtgattttcctgcctcagcttcctgagtagctgggactacaggtgcgcacaaccatgcccagctaatttttttgtatttttagcagagagaggtttcaccatgttggccaggccggtctcaaactcctaacctcaaatgatccacctgccttggcctcccaaaacactaggattacaggtgtgaaccaccacgcccggtcgatgtttttatcgatgagaaagcaaggaaaacaaaaagagatggggcctagactagaagaaacattgcaagacgcattatagggtaaaagatttgcgaagcataggaagagcacctgtttccctgaacaaccggtttcctcaggtatttggtagaattacttcctaagttttggaagtttatttaacagaccaaacagatcccagggaaagtgtcatttctttccacagaaggaaaacgacagattcctttaaatgagcaattcctcagcaagtgccctaatgcagatcttaagcctcaagaaatcttggtctcagtgaacatcccctactcaaggaaggtgagaacatcccactgtcaatttcycagttgcacctgtgatgctatggcttgtttattccagtatatggtggaataagaaaaagggtgaagtgtttatgtgggagataaaggctcaacttcaggaagtggtatgaggtcattattttaagacttgtgaatagttgccttttccttgtattacgcatgcccctatcattcctcgaattaggagattttttttttttttttgagatcgagtctcactcttttgcccacactggagtgcagtggcatgatctgggctcactgcaatctctgcctcccaggttcaagcgatcctcctgcctcagcctcccgagtagctgggattacaggtgcgcaccaccatgcccagctaatttttgcatttttagtagagacggggtttcgccaagttggccaagctggtctggaattcctgacctcaggtgattcacctgcctcggcctcccaaagtactgggattacaggtgtgagccaccactcccagacttatctctgccattctcgctctttctccccctaccccaagctctaaagtaactttctaaaaggtttttgtcccataagcctttctccctaaatatgacatgaagagtatgcctctacctatatcttgggttttgaaaaaagcctaaaaatacatttgcaatagaacttattggaaaaaacatgaggctttgcatgagatagagtcaggtttgaatcctggtttcaaggcctgaactaattactgaatccttctgcgccttggattcctcatctgtaaaatgggaataatcaagcctgcctcagaggatgtattagtttgctagggctaccataacaaagaaccacacactgggtggcctcaacaacggagaatgattttctggagatgctgggggctgcatatctgatatcaatgtgatactcaacatacacataccgtccagcacgtaggtgatgctcaacacacacacactacctggtgtgtaggtgacactcaacacacacagactgcccggtgtgtaggtgatactcaagacacacagactgcccagtgcataggtgatgctcagtgtttctacatgtgccacttaactgtttctttcagtgggaatttgtgtcagccttccgacaagcccagcgacaggagaatgcgctagcgatagtcaattcaggaatgagagtcttttttggagaaggggatggcattattagagagttatgcatctcatatggaggcgttggtccagccaccatctgtgccaagaattcctgccagaaactcattggaaggtaaggcattagaagtaagggctcctctaatacttgtccttagactccaagtattagaggagccctttttgtggtgagatgtgattacaagaagaaaagtgttccatacctttctatttaatggctgggaattccaataagattttgttattatttccatatgtcttgatgttagtgaattctgaagtgggaattatatactctgtgtgcgtgtgtgtgtgtgtgtgtgtgtgtgtgtgtgwgagagagagagagagagacagacagacagagaagccctccctcaacagtgcaaatttgtattctttattttgggagaataatttgccatgatgaaaaaccaattatgtgagtttgttctataataaattgttaaaggcatttgcttacctgacttcctatatctaaagatgacactaatagctaatatttcttgagcattacttggtatcagctgccataacaaagcatagtgattaaaagcatgagctttaaaacttgagaaaggcagactggccaaaatctcagtttaccctctgttaactcctccatgctctcagtcagcttacttaattatattggtactttggttccctagctgtcaaagatgggtgatcatacctacctcacagggcagttgagaggattaaatgagtgaatacatataaggtgctaaaagcagatcttggcatgcaataaatgtcctagtgaggacatttrttagtgagtaaatgagggtcagttactcctggactrtggattttatatgagttgtcayttatttctctagatcattctgtgagttgggttctaatattccccttttacaggtgaggacatggcgagacccaggctagccaccttgagaatggtgggccaatttgaactcgggctgcctgatccagagcttgtactcttatttcctgtattaaactatggctatttgtcttacccattagatgaagatatggggtaataaaccctgtcaggctaggagtcttctctttggactttccaggcactggaacgaacagatgctggatatagcctgcaggcttattctgaatgaagtctcccttttgggctcggcgccaggtgggaaagtggagttcaagaggactctcatcatcagcttcctcttcaagttctacctggaagtgtcacagattttgaaaaagatggtaaacaactgtttacacattaacttccccagtactgggagctatgatgacaccaaaagtagaggcaatgactccctaccaaatagctgtagaataaaaaagacaatccacattagaaacacacgtacttgctgaacatccctcagcctgtctgtgggtgggtawgagtttagggaagaattgaaagtagagccaagagttgatcargcttttatttaacaccactcaattatttggtttctgactgktagtttttccagatcatgttcagaaaacttgctaatgatttgggtatgttttccctctgtatgtcatttctttctcttgagctattaccttcacgttgaggttgacttcatgtgtttggtgttcttttccagattcagcttcatttccctagcccrtaaggtggccatgatggcagccactgcacaagatgactgtgaaatgcgtcattgtaggaaaagggcttcatatggtccctagtgcttcagaggaaatctgtagtagtagtcataataatagtagtgacaatccatgcattcttttgcctggtctctcttagggcaaacaattaaagctacaagattcttggctggggaggacacaactaaaaaaaattctctgaataaatccattagacccaaaggagacttgagcctcattggcctcacaaaccccatgctataaccagctgaccaaaacagactggaagccaagaacagtcttcctgtggtatagaagttagtatggtcactttaaatagsagacacaaagtcctctcttatccttgcttttgagggtatcttctcagtgtaggtgggagcaactaggaaccagaagggtagtatcacattattaagaatgaaaatttgaaatcatagataagtgacatattgtcaccaggtaaccaattatagactcctccaattagtagcaaactaatataatttctgggtgactcaagcgatgtaatttaaaacttttgccttgtagtcttatacccctcctctctttaaaaataatagcttttgttggttttatttaattttttttttgagacagggtctctgtcacccatgctggaatacagtggtgtgatatcatagctcagtgcagcctcaacttcctggactcaagcaattctcccacctcagcctcccaaatagctgagaccacaggcatgcaccaccatgcccagctaatttctttatttttttggagagacagagtcttaccatgttgctcaagctggtcttgaactcctggactcaagcaatcctgctgccttggcttcccaaaatgctggaattacaggcatgagccatgacacctagctggttttattttctattaaaattatgtaaattagaaaaaataaccaccatgtgtattgttgaaagcctttccccccatccrgctctaggctgtgcaatgttcagtcttgtgtaaagaaccraatgactcacttccctcagtcctgaggaatgttcttgctggggaccagaatccttcccctgtagggcagcgacagggatgcagcctgtgtccccctttctacacagctggcaggcaacatggaacctttatgcttatttgcaatggtgtactttgactctgatgttttcctggcttaagtattttcttcctttctattttatttacttagcttctatcttcttgttggatcagtttgtaagtcctcatatcatttaggagagtatatgagagaatcataagaaacatagagctggtggaagccagttacctaccgtattcatctggctattcataatatgaggaaatatgtatgcacctttcagagtatatgtccttgagtcagggagctgcttgtatttctggggttctgaatagggtgagtgcttaatatacgtgagacttcagagtagagatgcttgctaagactcatgctagcctcacttccaaaatcattctggtgcattcaaactatttaaaatatctgcaatggttctacttttcaggatccagttcactatcctagccttgcagacaagtatgaaagtgctttagaagatcttcattccaaacatcactgcagtacattaaagtaccaggtgagcggtatttcttgtttttaaaaattcacaatctgggctatagtgatttgacctggacattcccactgtctctccgtgaaactcaagctctgtaagtccaagctccacttctggtaaactcacagcctctttatgggtaactaaaattccaaaatcaatgaagaatttgattaaagacaaatctagcagtggtaatattaaagaagaatgttgatttgggtcttaaaggttacgtgctttgcactgtggccttgtaccacagacacgcatgagatggccaccttgtcacgtgttttctgccctgggcactgcaggcatcagagtccaataaagccacgctctgcggcaaggccatgggctgctttgctttcattttcagaggaaaagacacagcccctagaggttgatgaaaattcaataatgcttttaaaaagaactgctgatttgtttagcttgaatgttaagatattttactcccttagtctctattcttctagtgatttttctgtgagttacattttagagttgaatcaaacgtaagtactaagagctttttgtgctctcgtaatgaaggctattagaaaacaggattcctaactctcaaatggaattttctgccacatcataaaaatatgcctgaagtcacmctgttggtaaagtggatacagtttggtgggtttttccttgaaattattatcaggaaacttgacctcgagagttttrgtaagtcaagaacatgaaaaggctttttaaagcatttgttcactgaaactattgttggatttggttgtgaaagcttatagtatgtcgtaatgaacattgacgttggtgtgtattccttgaggttttaggttcaatatgtttaaaaattaaaatgcaccaaactccattgaaaatgattgttttgaaagttaaaaacagctgccatctccccggtgttcttttcaaatatgatagttgaaccctttggcttataaataccctaatatttcttagacaatggaataaacttcagaaagaaacaacaacaaattaatggatattgaaatcatccaaagaaaaaggaaaatcttcacatagtgcatgatcttgaatgagagtttatcattgattgcaaaacaaagttttagatgcaatatgtctgccacatagatgagttttgtttttgttttgcccgtggtttttcacacacacatacaaacatccacattgctagagcaacgtcagcactcacgaagagcatttttcccctaaatcagttcatttgctttgaaaatattttgacacagcttcaaaagatcaccagtttgaggagacagcattcttccttccatagtatctttagccaaatactaagcagaagcaggtaattgaggacagcttctttcaccagtagatttatcacaactaactgcmaaaaaaaaaaaaaaaaaaaaaaaatgtatgatatctttgacggtaggacaaagacattttttggaatttttcctcagttttttggcaggcctcacacaacatggtttcaaaagactttttttcaatgtgatgaagtgttttgtttgttacagtgaaatgtgttatgtcagttaactcccagacccattachgatacctatgaatgtctttccttaatgtctgagcttatgaattatctggaattttgcttttcaggatgaaaaaacttcttagggttttaaaaagaagatgtgggtgattttttttcactcaaatgtggttcaggttgagagcccaagcagcatcacagctcagcactttgggggatattttgcagaggaagtcaattcctaccatctgcaacatatgaaaaaccacacctggtagaacctcattgttggtttttccttttcatcactatctcagctcctcgaagcagagggggaagaggagaactgaggggattcctttgccatggggacagggcagtgtgagctacgtcaatagagctggagtgttgggactgtctccaatctgtgctcatgcctgaaccccaataagtaaacttttctctcattttccctagtcccctacattcgtggcctaatatctacctttattkaatggagccctgggccaaggtctaaattatttttctcgatagtctcctgctttctagctgataaagtcaggatgactcaacaataactgaaaatgaaaaaacaaaaacttagtcaatactccgttttttgttcactgtattatactaactacaaaactgaagtttacatttaagtaaaagaaatatgaaattagaacaataaatgcttatcaacagtgtttattttgcagcaaaacagtaaattttatataaaataggaataaatgcatcctacacacatgtcttataccaagttaattgtagaaattacactactttctgtgcatagttgtcagccacaatttggttgacattttacttcttgtcatttatgttatgaaaataatatggtttttttattttcaaatcaatgttgaacatgttctgaaataacacatgccactctgccgttctctcctgatattccagccctgccacctgcctggagaatctctgatctctatctccagccagaggttttttgtttttttgaggcccttaagtagttgggtagtgagtggggagcactcttctcgagttcctggagcagcagagggcactggagaactgtacatttcacagctgtcttaagtaaagctctcattataaccagaggtctcctccatttgtgggattagatgaattaaatccaaatgttcagaaaggaaagcaaaacatctgcatgaaaaggaaatgtgttaatcggggggatccagacagcttgtcttcagttccatagagcaagagccttggagcactttcactggaccagggcrgactttgaaacaggaaaccctgcagtgaagagtgagatgaaataccattttagatggattcaagtatctaacttattgttcatatgtgctgaataggctttctcaaactgcacattctggtaatcaaatacaaaagaatttagcttttctccccgctcagatgccttaaaggatgctatgttggaaataggcctgtttcttcttttttctcccagtaaagatttttaaccagtatgtgttggcgacttgttctctcttccctcctgccatatgatgtgtagcctggcattgtaaggctcatctaaaaggaagatccagggctcagggtgatcctgtgagctgcaggatgggaaggggaggtgtccatagcttttctctgacctcaacctggccaacatgactgcatgcccctcacccccaggtcttccagagaaagcctctgggagtctggcctcagtcccagtaccgagtgcaatgttgacacagtgagttacagatgggggtacccaccagggcttagcaggccactcctcagccacagccttcaccctggccttatgtctgtctcttcacctgctctccttctttcttcatatcttcagttcttttcacaatacacacccgactgggaaagccataaattcccatatttgaaacaccagggcagacattgtgctgattaatgtctgctttgattaatgaaacacatttaaggtatttacagagccaacagcaagatattctgctccatggggctctaagaaagagcaacattagtggatcattactccaattgcaggtccctttggcttcattctctatcaggattgtctaagttaagagttttgccaattatttcttatatttcctcactcaaaattgaaaaaaagaaggctattctggttgaagtaataccctcagtattttctacaaacatagtcacgatatcatcatactcttctgtaaaatattatatgtatcgtgcttatatagaaacagtaaagtcattttgataataaaatttaaagagatacataagcattagcaagaggacataattttgtattgtcaagaagaaagatttaaatttgtttacttacacaaatggaatttccatttgagatgtttggggtctacattcaaaaaaagtgaaaaataagaacaacatcatggattgacataccagttggcttattgaattactgtagtaggtttattgtcttggtgttattaatagtgacttttttttttttttttttgatggcgtcttgctctgtctcccaggccggggtgcagtgctgtgatcttggctcgctgcaacctctgcctcccaggttccagcgattctgtagcctcagcctcccgagtagctgggattacaggcatgtgccaccgtacctggctattttgttttgttttgtttttttttagtagagacggggttttactatgttggccaggctggtctcgaactcctgacctcaagtgatctgcccaccttagcctcccaaagtgctgggattataggcatgagccactgtgcccagcccaatagtgctttttcatatgcaaaagtattctggtttgagtctaaattatatagctaccttcttatgggaaatgtgcataataataattcctactttctctatagaaatgtaaaagtatattttggttatttattaaacagaatataggcccaaagcagcatcctgaagacccaattggccaccccatcatgcatctgtctggtgtgaagcatgccacgggggaggccatctactgtgatgacatgcctctggtggaccaggaacttttcttgacttttgtgactagttcaagagctcatgctaagattgtgtaagtggtaaaattcttactcaatgggcrtaaatgattgtcttttcatctaagtcacactagtgaaaagtaatggtgtgaagaaataggctatttgttggtgatakccaatgcagaccagaggtgaaacaggatcgaaatgtaggatttactacaacttcgttgtcccaagaattttttcccaattgtctggcagagactgttkgacagttcttacctctctcatatcttattatccaattaaccatgttcttggcctctatggccactctaaggagctctgctgtrtatatcatctaggtctattgatctgtcagaagctctcagcatgcccggtgtggtggacatcatgacagcagaacatcttagtgacgtcaactccttctgcttttttactgaagctgagaaatttctggcgacagataaggtactgcatttttgctttctatttgaaaaataactttctcagttaacggtgcttcatattttcttaaagataccatctactttggcacaccatgaaagactccagtattcttagaatgcttattataaaagtatattctaatattgaatgaattcaaatatattcattttctgtacaagtaaagacattaactagttatataaaagattatttgrtgttttacattttctaatagtgagatggcatactgctaatggtataaatgagtaaatgaagatggaataatggtaaattttatatggaaatcccttccctgagaagcccttattattgtcccagtctcagtatggtcaaagttcaactacaagttcaagtggtatctgcaccatgaagccttttttctcattcttcaatccagaagttcattcattctctctctctctctctctctctctctcaatttattctgatttatttatatttccatgtgttaaatgcgctttttattttttattttattttattttattttgaaatggagtttctgtttgtcacccaggctggagtgcagtggcatgatcttggctcactgcaacatccacctcctgggttcaagcgattctcctgcctcagcttcctgagtagctgggattacaggcacaaatcaccatgctcggctaatttttgtgtttttagtagacagcatttttgccatgttggccaggctggtctcgaactccttacctcaggtgatctgccygcctgggcctcccaaagtgctgggattgcaggcatgagccaccacgcccggcttaaatgggatttttaaaagtgagcatctatgatgtctggtcaccatagctgaacaagatatgtatgatctctactctcatggagcttaaagtctagaggagaaaacaaagtgacctttatgtactttctaccttgtgttaagcttgtttattttgatgtcttatatatttcttccacctagtataaattccttgagtgaggacccatgtctgattcatctgtgtattccacacactgcttctcacattgcagggtgaatgagtagaggtatagtgataacattgttgccttgtgaaaattacaaatgattaaaactttggctacagcaagaacagcagtcarcaggttttctgcataattcggactgctcagttcagtgtttacccaaaagggcttcataatttgaaacagtcccttcctctggctctccttggaagatactcccttgaagatattatctgtagaaatgaaagcttgatgactgagagtttgaactcaaggttgaaactcccccaaagcagggctgtgtagcactggcagagacggtgagaatttaagccctttgcataaatgtttactaaacaagtgaaactgatcttggctgcatgatagtacctgctctttgaggtgtgcttatgaagatcataagcatctcaggggccacatctatgtgccaggtcacaggagcaaaatcaggagtctttggagtgccattgtgaatgattgcctttgttggtttaatgctttttaaaacattcatttatggcacttaatggcttttaaaagtcttttcattgtagaaattgtaagcatacacaaaaatgggaaagtattatacaatgaaccccatagatccatcacccagcttcaacagttatcaacacgttaccattcttgtttcatttttctctccttcactgsccctaccccaaacaaacacactttttttgtgttcatgctagattttatgtttttaatgcctttttttcgatgataaaactactttatgttcattgtggaaaagacataatagttcaaagtcaatttttaaaatgagtgattacattgaaattgtgaatcacagcataaagtaggagagagaactcagcaatgatggtgacttcttccagtccagactgtttttacctttctcaagtcttaaggtttcttttccccatctaaatttctgctgtggtccctgtgtgaactcctgagyctagctgccccacctgcaggcgaataatcctagctgtcaacccccccaggaaggggatgctgtctgcttggtcacgtcttggctaggacatcttttcatgaaaagacagtttgtgaggagagatgtgctcaccatcagggttctgttatcacaggggactccccttcccaggtcaycccctttttctctctggttgagatgatctgtgacttcctggtcctccctgtccgtgcaggcagaggctgcctctctcagaacagctctgattgtcgtgtgacagccaaacatcaagccatgggacaggctggccctcacacagcctcataggcttggcctggagcctgagcctgctgtcctcaagacagcatcactcctgctcctctgatacagcacaaggatctaaacttcccccagtgcctcggrtcaggaggccagctgtggttayagtcatggacagatgtggaggggtcacacctgtgtgtatctagccctagccctactgtaatcgagtactaggagggaggaagaaaatgaataaaagagaggacctgatgcctgccctccttgacaacaaaggtctttctgtgtcgtaggtgttctgtgtgggtcagcttgtctgtgctgtgcttgccgattctgaggttcaggcaaagcgagctgctaagcgagtgaagattgtctatcaagacttggagccgctgatactaacaattgaggtaatgagttctgtggaatggtggtgccagttgggagccagaacaaatatcrgttaaaatgcttttggctactgtaacaggaaaatgtggctcaaagtggcctccaaagcacacggactttattaacctctaaccagtctcagtattaacaatttccccaaggacatggcttctttttgccactcttctctgctgcccacaatacaagctcaattcctgtggtcacacagatggccgccaggacaacctggacttccttgttcatgttcaaggagtaagaggaaccctattgccccagcattctaagcacaaatcctgagatccagcctaattaagccacttaggtcacatatccatctccaaattaatgactggcagaggaatggaggagctgttggttacttctaggggtaggagttggggtcaggtttctctgaagtaagygggctatgtaggggagtgtaggaaactgaaacaaatctgagccctgtttggaaagggaaaggggaggggatgctagatgggaaacagtgatgtccaggaaagtggatccactctatgactttttacccaccttcacccaggcacatggtgaggaccaacaggatgttccatgaagtgagtgtcagagacacgatttttagatttttcaagagataagtcgtatgatgcctacaggtattttggcaacttaaactggagaattgcattttctatcctgatttttagaaaggagttgaaaatttataaaggctataagactcatctccatgaaatgataggrtgttctcttgtgtgcattccattggttcttataatttcctggatgatgaaagaatgaacackggggaggcagtgtaaatagatgagactcagtccatacaggccgcatgtgctctgggacacaatattagcttcacagcataatgaacatgttgttctctgggtgaccggcatggcctgaggcagaattgaggaaacaacctgggcacgatcagtgtctccaggagaactgggtgttgggggtgcttcttgccatgctgcttgatgcttaggaacatggagtttgtctctgggaatttttcttacattttaaaataaaaataaaatcatgtcaaatagacaaaaaygtagaagtctaattggagtcgaagtgtgattaggcctcccaaattttcctggccagtttcaaattcaaacactctgttcccttctcaggcccttttcatttacatgttgcatgctgctcttgcttcatatattctgtcccctgaagtttgctggagagttagaattacttattagaaattatttacgtaacacttcatcaatattttgtttataaatctttgcccaatatcaggggctaaatatctactctccactccccctaccttccagccaaataaaagccccaataagcaaatataatagatgccactccccccaccctcaccacttcaaccagcagactcgtgattgtctgccagagaatcccagcatcagatacaagctctggctttgtggaaaagagttgcctcacattgtgttcagagattaagctctcaaagtctaaagatcatcaactggatcagagcaaatttaatcaaagtttagagcagggaaatatgcccctctccctrtacattacagttcttttatcactttcctgactaagaaaaattcagaaaattggctcaaagttattcaaagagcaagcagccagtgaagttgaaaaagatgaaacttttaaaaataggatttataaaacctagcttttttttcaacctggaatctctttaatcttagattaataagaaaagcacatgaacagattccaataggaagtgtgttatcaatcaaaatagaacaaaaacaaatatatctctgtcactatcacaaagatttaatctggcacatgcttttcgagtttttagtagattgaatggggcaacgatcaaaactcttgaatcaaggggtaaggctgatgaccataatggaaaaaaatgtgttccctaccggaatctgtcctgaataataatcatcaacaacaacatgagcatagctaggacctatacagagctcactgtgtggtcaacatggttctaggtcagtttcacacattaacttactaaatgctcaccacaatcctatgaggcaaaaactatttttatccccattctgatggggaaactaaaagrcagggttacccaaggttacatagctagtcagtaacaaaaacaatcaacaaacactctgtcaaagaacctgggccccaccggtgctataaacaaaccaacccagtttttgaatgggggaaatggcagaatcacaatagcccatccctctaaggggtgttgtctagacacctactggtggccagaaggaaacagagataagagaatccccaactaccaacagaatggaatttcatggatggacaataacccacagtagataatgccagcaggagctggcacaccacatttgccagtggacacatggattactgcaagataaattctcagggatagctaaaaaccaacctatgttattgtaactacatctctggttwtgtgcaccactgtacccttttactgggcacccagggagagccaataggagctagtgtataaatggatttgtacacccagctcccagacagggcttgtctgaaatcttacttccagagctggaggtcccaggtgctctactgccctgtgcaaatgaaatgctcatccccrcaaagaaggaatatggggctggcaggcagagccaccatgatcccaatcactagagtcttttcaactagcaattattgagtgtttactatatgcaatataagctcttcacrtcttatttcattttatcttcaccaaccacgatcctattggagctatatgcacacctgttacttccattttacagacaatgataagagaggtgaagtgataggcccacagtcaaagctggtaagtgggaaaaatgtgtgcacaatgctgactgggtctagagcccaggctctgaagccctgtgctgtatggccttggctacatgaaatggattgtggtgtgcagacaataacctgcctggaaaatactagtttcattctgggatcacttagatgccagtttttttctgtgcatattatttcttcagactcagtaggcacatttacatttcctcactggggagtctctctgcagttggattcttagcttggctcaccagggtcatggtgaaagtgcacggaaccacaaggtgaagggagaaacaacccctgctcagaggatgtgcagtggggtgtgtctgctgccctagggcagggtctcttgcccaagctgcctcattcctctgttctctttctaggaaagtatacaacacaactcctccttcaagccagaaaggaaactggaatatggaaatgttgacgaagcatttaaagtggttgatcarattcttgaaggtaaaaagtaatggaagagtaaacaaccctggaagtcttctaagcatgtcagtttaaggcttcctttgtcttctggaaatcatcgggcagcctaggggggtgttgctcctcaggaacaggcagaacaggcacctcattcacaaatgtgtttccctccgtctctggggtaggccaagagccaatggggaggcaaaagaggaggcaagaccctgcccctcttccctgaccccccttccctcatcaaggctccagttgttagagatgtcattttctttcctgttcacaaccaccctgcaagagggtattattatctcaatcttataggctggaaaatggaggctcagcgtaattatggagtgtgaccaaggtcacacaacaactactaaataacagagttggccattgaattgataggctttattaggatttccaaagcccatgtttcttcttcatcctttctctctctgattctccctctcttcctttcttccttctctgctttttcttcccttcctcttcccttccctttctcctttctctttcttccagacttctttgctgtatgtatgtatgtaattaaaattaaatttgcctcttagaaaatagttaattatagctttccagtacaattccttaacttttggctttgaaatattttaaaacttacataaaagttgcagaaacattaaagaaactcccaaatatttttcactcagattccccaattatacacacacacatacacacacacacacttctgagccatttgagagtaaattgtaaacatgatgtatgtctctttacccctaaatagtcagcatttgtttcctaaaaacaggatgttgtctaacataaacatagttatcaaaatcagaatattaacacatattctattaatctacacagtttattcaaatttcgctagttgtctcaataatgtcctttatagcagaaaaaagaggttcatcataagtcttaaataacccrtgctttccccgccacactctgctgtcattgctgctgtgaaagctgtcctaatgcctgcctcacaagatctctgatttacagacatgctattgggtgggtatgggcagtctgtgccacatctcagagcagagaaatcatccggcattatctgtctttaagtgaatttccagggcattggcctctagtgcatgttaaaaactcccatcttctgggctgggcatggtgactcatgcctataatcccagcactttgggaggccgaggtgagtggatcacttgaggccaggaattcaagaccagcctggccaaaatggcaaaaacccctctctactaaaaatacaaaaattccaggcgtggtggtgggagcctgtaatcccagctactgaggaggctgaggcacaagaatcgcttgaaccctggaggcagaggttgcagtgagccgagattgcaccactgcactccagcctgggtgacagaaggagactccatctcaaacaaacaaacaaacaaacaaacaaaaaacacaactcccatcttcttaatttttctcaccaaccttgatcacaagaataggaagagtcctaagacacatcccatcctgagtgcacagccagagctgtgtaatatgtcaccagtcagcccagcttcttaagttccaagcccatcatgtctcaactctataggtgcattaaacttgaagcgtgtcaggggctgactggaaatgtcacctgaaagctgtaggaaagacacctggaactgtcacctaccagttttccttggcattgtgtcttattagctgtgtaacctggcagggcacttctcagggctcagtctccctgttttaatattacatggataaagtaaaaacaatttcaaatgtgaattataaagattataagagataatcatgtgttcttggcatatagtaacaaatcaataactgtgagcaatgattattagatttagatgtttttgttgttttcctgaaaatgttgtctattagtgagatacgttggcaggtgttcatttatcaaacccagtgtttccaagattttctccttataggaatcactgaggatatttatgagacctagagatccctgtgcccttttttagaattgtagaggatccaaaacagcccaggaactggtcttaacaagttttccaggtaattcttagggctagtaaaatgtggaaaatactggaaaagtgagtttgatttatgggaatgaagagaaaaagagggtacatttctatcatagagcgttcccggcatgagcatgttggaaatatcaatatttaggggggttccttgtytcatgtttgtttcctgacataatgagtatttgtgcaagaattccattgttgtatttttccttgacatcttctttaattatctaattcaattaggtgattgatttagtctgcctcttacttgaatttttgttattgctgcataccccattgataagtataaaaatgatacgggaatattaaaaaggacatttatactacttttcagtataaacgccagctgcagtagctcacgtctataatcccagcactttgggaggccaaggcaggacatttgaggccaggagtttgacaccaacctggtcaacgtagcaagataccttctattaaaaaagaaaaaggaagccgggcatggtggctcatgcctgtaatcccagcactttgtgaggctgaagcaggcagattgcttgaggccaggagtttgagaccagcccggtcaaygtagcaagactccttctatttaaaaaaaaaaaaaaaaaaaaaaaaaggaagctgggcacggtggctcttgcctgtaatcccagaattttgtgaggctgaagcaggcagatagcttcaggccaggagtttgagtccagcctgggcaatatggcaaaaccctgtctccaataaaaatacaaaaattagccaggtgtggtgacaaacacctgtaatcccagctactcggaaggctgaggcaccagaatggcttgaacccggtaggcggagattgcagtgagacaagatcaggccactgtactccagcctgagcaacagtgagactgtcaaaaaaaaaagatggatggatggaaggaagggaggaaggaaggaaggaaggaagggaaggaaggaaggaaggaaggaaggaggggaagaaaagaaaaggaaagacaagggaagggaaagacaagggaaggcaaaagaaaaccaattttcatcctcttgactcacaagtttgagtctagcttttccctttgtctgctatcgtcttttggattatgagtttctcctaatatctcatgatatttcaatgcgaggtaattgcaattaattatcatagcaacactttatctgtcttctaagaaaataagtgtcccacactggggcctgtaggagtgggggtaaggggagggagagcatcaggaagaatagctaatgcatgctaggtttaatacctaagtgatgggttcatctgtgcagtaaaccaccatggcacacgtttacctatgaagcaaacctgcacatcctgcacatgtaccccagaacttaaaagttgaaggaaaaaaagaaagaagataggtgttccaagaaaaaaaatatttaaaagataaaatatgtggagcattacatcaggtcttagaatgcgttcttggagggagaactattattgtttgcacttatctgctgcgaagatatatttcaactctatctaatcccggtgtcacagcaccagaggatgctaaagattaccattttcaaatgagccagctgaggctagagaggctacctgattgaccaggatgaaatctaagagttttcccaactccaaagttagtattctttcctctacattatcctgcttctcatttatctcattaaaattctgttagctgggatgtgctttatactggagagcacagagaacaatctgtataraaggatttgcaagagacccagggagccctgaaactgagatgattttccccacaacctatcctgctgggcatggtacagatagacacattcacatcttagcagatttgggactttaagggcctcttattaaaatgtaaatatgcctggaggaatcactcctaaacccatactgggataacattttatctcagggattagttgatcaaattggtttccaacctagagagttgacagcaataccctaaggtgaagagggggcactacgggtgggggctgtcagggtaggcagtgcaatataacaggtttctaaaactttcccttctttacagatttaaacaggaacagctctgtctmatttttttagctctgaatattttaaataaagtgactacttaacaaaataaattctgagtggataggcagaatcaataatactgcaagcttgaatgtaagcctagtgacaatgacatgggtctttagactatttgataagagcttaaattgaagttaagatctgagcttgtgaaattttaatgtttatatattataagtgaagcagaatctattcatttttctgtgctctttttttaaactcagattttcgataagataggaagtccagattgcaatttaaaacatctcattttttatgcaaatwgagggaatcctcaatttgcaaatcactattgctgagtaaatttttaatttttaaaagttctgccttccattaacatgatcgtcagtaataattgtattctgtttgttccctctgctttttattcttttccccaccttcctgtgggttgcctgaatatttgcttagaatttcattttgattaatctatagtattttttagtatacctccttgtacagattttttttagtggtagctctagatagtttacacatatacatatacacatcatatataaaataaaatttatatacatataaaatatttacatatataaaatatcacagtctggtttcaacattttacaagttcaagtcaagtgtagaagctttacctccctttacatccctctccctttttataatataattgataattctatttatttattctacatacattgataatcacatgaagcaatgttataattttgcttcaaacacaatttaggaaacccaagaggagaaagaaagtctattgtatatactggtatttttattatttctgttgttctttcttccttcctgatattttaagatttcttcatttaaaaaaaaaaatcattttctgtctgttttaaaaacttccctcagccattatttcagggtaaatccgtttaaaacaaactcttagttttccttcatctgaaaatgtcctcatttccctttcattgttgaaagatatttttgctggctatagaactctgagttgacaggtattttcacactagaaaaattttaccacttcttctggcctccatggttcctgaagagaaatctactgtctttaaaagtgctttttttttctttctttctttcttttttttttttcagatggaatctcactctgtcgcccaggctggagtgcagtggtgtgatatcagctcactgcaacctctgactcccaggttcaagctactctcctgtctcagcctcctgagtagctgggattacaggcatccaccaccatgcctagctaatttttgtatttttagtagagacagggtttcaccacgaaagtacttttctcctatagatgaagtagtgtttctttctcatagctttcaacatggtgcttttgtccttagttttctgaagtttgactatgaggtatcttggagtgtatttctttgaatttattctatttgggatcactcagcttcttgaatctgtagattagtgtcgtttgtgaatttggggacatttttagccattatttttcaaataatggcttgacttcaatggcacaaatattagatcttttgttatagccaatgggttcctgaggtgctgttcattttttttccagtctatttttttctgcttttcagattggccaatttctattgttctatattcttgtacattaatcatttcctctgttctccctattctgttgctgagcccatcccttgaactttttaaatttttgctgtatttcttaattctaaaatttctatttcttttttctttttataytttctatttctttgctgaggtttctattttttcatttgtttcaagtgtttgtgtaattgcttattaaagcatttttattacagctgctttaaaatccttgtcagataattctaacatctgtgtcatctcagtgttggcatctgttgattgtcttttctcattgaagttgggattttcttggttcctggtatgaatgatatttgattgtatcctagacattttagatattatgtaatgagactttagatcttatttgaatcttctattttattagaatattctgtttcactagagtactttaaccttttactgatggagaagaagggggtgatgccttgttactgctaggtaggggttgtaagtccaggttccccatgtggcatccactgacagcaccccaatagagaggctgggacacctcattgcagcctgatgagggtggaactatagatttcctactcaaccttcacagtaggggtggggctgcagtttttttcatggtgtttgcctggagtagagtgcttattgtcttaatttttttgtctttctagtcttccacttttctggtcctttggctagggagagtgggcttttcttgaggatttttttttttttttttttttttttgtctttgcctgttggagtttttagattgctggcttctccggaactaagtctgggatatctgaggcaaacaacaacaacaacaaaaaaacccactgaactcactgctgtgtcttttcttaggtcctgaagtccctagctggtctgccttctctccacctttcagagtcttcttatgtttgttttataaataatgctcagggttgttatctgtacttaacaggagggacagggagcagtacatctactcctgctggtcctagagctggaagcctccgcattctcacattcctacgcctctgctaacagcgctggctccttatgacctactgaatcaagacccctctgcttttggctctagaaagtcatacacctttctctaggactctgtgacctagatattggcagacacaaaagattctcctatagaactttacttcaaatctgcaagtagactgaaagctaaacattgttgtttgttatacttcactgtgcccagcagaagtactattagtggaatttctgcataacgggataatacctgggggacgctacctgttgcttctgactgcttccttgacttttatgtattttcctgtaacaggtgaaatacatatgggaggtcaagaacatttttatatggaaacccaaagcatgcttgtcgttcccaagggagaggatcaagaaatggatgtctacgtgtccacacagtttcccaaatatatacaggtaacatggggccattgtggagaggacatggctaaatgatttctggccagtgaaatatatcaagagcaattagaggtaaaagtatatttgggaatttgaggtggggggattgcttgaacccaggagctcaaggcttcagtgatctatgatcacaccactgcactccagcctgggagatagagtgagaccctgtctctaacacaaaacaaacaaaacaaaaccaataatgttatttcttcagggactgaagaaatattgagtattaatagccatattgatttcagtattaatagccatataagttcagtgcttttaaragagtgttattaaagtgggagccttttgtttgtggattgtagctttaaaaccagttatggaatcagcagatctcttgctcagctcttggcaccactgttaggaacacaagagaagaaagaggaagacctgctctccaaagcctatggtgcctaactcacaggaaacagttaagaaacaatattgaaaattatgcaaccaggtgctaaatcagcaaaggcaaaatttaygtgggtgragaaattaggaaagagtttgctgagggctagaatcatccaggaagtcccacaaagaagtcttaagtttggattcagaatgagagtgaggtttgtctagatggtaagacaagagaggtcacttccaggcaattccacagcaagatcaaatgacacccattcatttattttctcacctcttctgcaaacatttgttgcctgtgtcctgtaccctacgcagcatgcatggaaggaaggaggaatagcacaatgaccgccccagctggaatgaaggggtgcctttaggaaagctaggtttaagcatcagggtgagagtaagggaaatgaggcagggggtcttgattctggtcataaggagccagtgctcttagcagaggagtaggaatgtgagactatggagaatgaggcctcgtaaaaggcaggatcctaaagagggtcagaygaactccattccaggcctgcttttctcttcactctccgtgggatgttgggtccataacctcatccgtctcaggcttcccatctgtaagaatcaattgttaagactaaatgacccctaatcattaggatggcagaaaagagtgagatctgcatctaggaaagaccaactggtcatctttagcagcaatccaagcaagaagtgagaagtgctttttttttttttttttttttttttttttgagacagagtctcgcttggtcacccaggctggagtgcagtggtgccgtctcagctcactgcaacctctgcctttcaggttcaagcgattctccggcctcagcctcctgagcagctgggattataggcacgcaccaccatgcccaactactttttgtatttttagtagagatggggtttcatcatgttggccaggctggtctcgaactcctgacctcaggtgatctgcctgacttggactcccaaagtgctgggattacaggcatgagccaccacatctggctgagaagtgcttattttccagtagagacagtagaatgcagggaaaagacccatgctgagtgaggcttagaagactgcaaaatcccacagctttgggaaacgtatgcctagggattagtgtgaatagaatactttaggagtggttcctggggaaaatacaaaaaagtatgagtacaaaaatatctcactggtaatgaaaacactactaattagttttggcaatgtcattatagccaagtattgctgagatcagttggggctgtgggccagggttgttggacattatcccattatttagcataaccacacagtatgggtatcatgtgcaacattaaagaatcaaaacatctagtgactgtcacagtccatttcaggggacaggttttttgttgttgttgttaaaatcatagatgtgacartgacagtcacaattaagtccttgctgaagatggatcagattaatcagaactattattgttcacaggacattgttgcctcaaccttgaagctcccagctaacaaggtcatgtgccatgtaaggcgtgttggtggagcgtttggagggaaggtgttaaaaaccggaatcattgcagccgtcactgcatttgccgcaaacaagtaagtggagaaaatctgctaaaaataaagtgaagtcacactgaaagttctcactgtcagaatcaatgaggaagaacctgggccaagattatttaatatcacatatacgatacaaacacacaaacaagctgccagcttattacacttacttgtcttatattgtcctatagcaaccaaaataagagtcaattactgaaaataataaaagccacagaaaaaatataatacctagaaagtgggcagaaacaggtcctgaatgggtgggagttacttgtcctcagcacctgctggactgagctatatatgtagaggtcatatatatggctttttgaacaatgtacctatatatacatacacacatatatatttatatacatataaaccatgtacctatatatacatacacacatatatgtttataaacgtatatgtatgtttgtgtgtatatatgtacattcttcaatatatcaaagatatttttgtaaaatggggtcccatatacacacatacatatatacatatatgtacatatacatacacatatatacatatacgtgtatgtatatatgtgtatatatgtatatgtgtgtatatgtatattttcttgatttaaatatagactttgctyttgttatgcttacattcatttgtatcgccattttcctttgaggatctcaaaaaattctcatgtaaaattgtctctggagcaggcacacctagaaggcttaatttgtttgctgagtaatatgggtcagttcctccatcccaggaagcaaaaataccttgattccagatctctcctatcagggagcacttggtagttagatctgcattcttccatttgtggccagtctaaagaccttgggacgatttgcctataataaaggttgttattacaatgggaaatgcccccaaagcaatgtcctggagcccctggcacccaagagcctctgtcccacaagttgcaaatgcctggcattattccctgacctaacgggaggaaagcccacggtgtatgcctgagatcagcagaggayaggcatgcgaaatagttgtgttgttctgtgaggcgtgtaggctccactcaggctcttgccaggagttatataaaccccagagaatgcctgctargtaaaagaggttacctcacttactttttttctgttttagacatggccgtgcagttcgctgtgttctggaacgaggagaagacatgttaataactggaggccgccatccttaccttggaaagtacaaagtgagtacaagagggcatggaggaaggatttatgttgtagatacaacatcctatcagtgcgcagggcagtctttggctactctctagtggggagtaacaatgagcaaatcaaaaacagagcatctatttaactttctattggttgcactgrcttttaattactagctggttcaatggaggcttttctgcttagctcaaagatgtcagtttcagaaataaaacactaagtgctagctggtattggctgtacagagcaaataactagaaaacgtgagtgtgtacgccattaaastagatctgattaccatacttcttcccacatataaaagrggtaaaagtagaataattctcataacagtagtgttatgtgaaattgcaattatttgtaaatgggttcctcattcttcaatatatcaaggatatttttgtaaaatgaggttccagaaattcatagaaaaaaatttgtagtagaaaatagtgattcttttgctttataagaaaaattttacttctcagagtgggctaacttctctaagaaacaacttaaaagctcttaaactttcattacgtcatttcttgctcaagtaacagctcaatataatcattgaggggggaaaggggaggattctgctttataaaatcattcagggactggagctgtttccatttattggtgccactgtgccctcagactgcatcatccaatatagtggtcactaggagcatatggctatttaaatttaaattacccaaattaaatacaattagaaatttagctccatagtcgtattagctatattccaagtgctcagtaggcacatgtggttagtgtctgccatattggacagtgcagacgcagaacattgccatcatcacagaaagttttattgggtatcactgccctacaaactctgagtcttccaggggatcttttgctgagggcagcagacagggaagcgagagagaagagagcatggagtgtcacctggtaggtgttttaggttttaggcaccggacctgtaagttgtggatctcacttgtatccagatgtcattggcgagacctctgtcacctaactgtaagggaggctgggaaatgtcatcttcctgtgtgcccagaatgaaatacaataggatttgttaaatgcatagcactgtctccatcgcaaaactgcataactaatacatgttttttaggagataatgaatgtttccatttcaaaccacactcactctaaactgtattttgaatttgatttagctcagaaagatttgttacagtaaacttcatcctgaaggagattttttttaataagacatatatgaagtcattatgaaaatataacaatctcaggttaaaagatggaragatgaatatgaattggaatatatataggcactttgttaaagaaggtaaaagataggtcttcaagaatggaggccaggcacggtggctcaggcctgtaatcctagcactttgggaggctgaggcgggtgaattgcctgagctcaggagttagagaccagcctgggcaacacggtgaaaccctgtctctaataaaaatacaaaaaaattagccgggcatggtggcaggcacctgtaatcccagctacttgggaggctgaggcaggagaatcgcttgaacctgggaggcagaggttgcagtgagccaaaatcgcgccactgcactccagcccgggtgacagagcgagactccatctcaaaaaaaaaaaaaaaaaagaatggataggcagaaggaaggcatgccaggtgtgggaatagtaagagcaaaactacagaggtgtaataaacatggcatgtttgatagaggcaagagtaaggggagagggagaattagaacacagagcacttcctggaaggtagtaaaaaataggattgatgggtttaggtgatgcctgactgagaggggcctacagtcccagagtgggaagtttaaacttgatcttaaaagaaacagtgagactgagtggatccttgaatggctcagtgccgtaattaaacacagatgctttggggagggtaacaggatagtctggggaggagagaggatggaagctggtagacagcgggaggcagctgatgcattcagacatgaagcacatggggtctgagatatgacagtaagttgtagaagagatgggtccaagagccattatagtgtaaaataaaagagaattggtgaaaatcttggcaaaatgctatgaagaatamaaccgcaaacatgacttggagggttttagaagaaagcgacaagttggaaggaggaaccgatctggaagaacgatgaagagcttgtttgtgtaaatgctgggggtagaagtgacaacaggaccctgaagcagaaatgtcctttaccaccatgggactttgctgaaaggactggattatagtgacagaagccattgtcataatggtgactaaaactatgagaaaataatgttttctgatggagagtagtgtgaggaaaggtgatatgaatactacttacgatactattattaattatatttagagtacttgctatgtttcaggcacttgcctataattttctatgtgttgccttatttacttccatttcacagatagtctgagtggttacacagcttgcctaagatcacagagctagttatatactatccgagaaatcactgccaaatccaatgtcatgacgcttttcccctatgtgtggagggtttgcaaatgacaaaatttggagagacttggcccctgttccagcattcgatatcggttctcttccccaggctggattcatgaacgatggcagaatcttggccctggacatggagcattacagcaatgcaggcgcctccttggatgaatcattattcgtaagtgttttaaggagcaagttcacattcctgaaaagagtgttayataaaataatttaacttagaaaatgcccaatagttaagtaatatttgattataaaggtataatgaccatccttgcagggatagccatgtgttacttcctggtgcccaaagtgtgagcccagagatgctggctaagttgcatctgtgtgttaccccccggcttcccatacttagagctcttttcctagatgcacacatgagaccaagctttctcagttttggccctattgacattttggagtgtgtagctctttatggtggggactatcctgctcattgtaccatctttggcctctacttagtaggtgtcagtggcattaccaccctgtagtctttttttatttttattttttgagacagagactcactctgtgcccaggctgtagtgcggtggctcaagcgatcctcccacctcagcctcccaggtagctgggactgcaggtacatgccaccatgcctagctaatttttttttattattattttgtagagatgggttctcactatgttgccagagctgatctcaaactactaggctcaagcaatcctcccatcttagcctcccaaagtgctaagattacaggcgtgagccactgtgtccagcccaaccccaaacaaaaatgtttcaaccaggccagacgcagtggctcacacctgtaatcccagcactttgggaggctgaggtgggtggatcacttgaggccaggagttcaagaccagcctgaccacatggtgaaatcctgtttctactaaagccgggtatggtggcacacacctgtaatcccagctatttgggaggctgaggcaggagaatcacttgaaccccggaggcagaggttgcagtgagccgagatttcaccattacactccagcctgggcaacaaaagtgaaactctgtctaaaaaaaaaagagtttcaaccaaaatgttaacaatgaaaaatgtctccagacattgccagacgtccccaggagcagggaaaggattgctccccattgagaaccaatacattagacccaatgccaaaacatttttttctgttttcactgtcttccaggatattatattcattacattctatagacccagtgctcagggcctgtgaacatatcaaaggcctttgtatatatttgaaatcttaaaaaatgcattaactccaaaatacaaaaataaaaaataatgctctcaaaggaaaaattattcwaatacttaaaaattattttacagcaaaaaatgtgtttaattgggggcatgggaatattttagcatgttagatgagatgaaaagagagctgccattttcggcctggttttggtctgaggtcgtaggatggtgaaacaggttcagaagatcttaatcacatcaactctggatttctccaggtgatagaaatgggacttctgaaaatggacaatgcttacaagtttcccaatctccgctgccggggttgggcatgcagaaccaaccttccatccaacacagcttttcgtgggtttggctttcctcaggcagcgctgatcaccgaatcttgtatcacggaagttgcagccaaatgtggactatcccctgagaaggtaatactaaatcagcttcacagacaaaacatgtggaatgtcagagacggtagggcctttgggggccattcaggttgaggaatttgagacccagaggrgcaaatgatttgtgccaagtcccccagctaactgrttaatgcggagcccagactscaaagttcagcaatactcaccttactcagactcctgctccaaaatcctgaagcagaagatcctgaggactgagcactgcattctcccctggctggtgagaagcttccattggctgggggtataactgctacccacaattccatcaaggccctcattccccgcttcctgaacatctcagccagctgtcaaaaagttggtcatttcagttgctaaactgatctccttttggttcttttttttttttttgtaacattaataggttggtttttatttttatttatttatttccataagttattggggtacaggtagtatttggttacatgagtaagttctttagtggtgaattgtgagattttggtgcacccatcacccgatgggtgtatgtatatacatatacacacgcacacatatatatgtgtatatatatatacacacacacacacatatatatatatatwyatacatacatacacacaccacagtttctttatccactcattgattggtgggcatttgggttggttccaagattttgttattgtgaattgtgctactataaacatgcaggtgcaagtatctttttcgaataacaacttkttttcctctgggtagacacccagtagtgggattgctgggtcaaatggtacttctacttttagttctttaaggaatctccacactgtcttccatagtggctgtactagtttacattcccaccagcagtgtagatgtgttccctgttcaccacatccacrccaacatgtactgttttttgattgtttgattatggccattcttgcaagagtaaggtggtgtagcattgtggtttcagtttgcatttccctgatcattagtgatgttgaacattttttcatatttttgttggccatttctatatcttgttttgtgaattgtctattcatgtccttagcccactttttgatggggtcgtttgtttttttcttactgatttgtttgagtttcttgtaggttatggatattagtcctttgtcagatgtatagattgtgaggattttctcccactctgtgggatgtctgtttactctgctggctgactgttccttttgccatgcaaaagctctttagtttaattagctcccagctatttatctttgtttttatcgcatttgcttttgagttcttggtcatgaaatccttgcctaagccaatatctagaagggattttccaatgttatcttctagaattttaatagtttcaggtcttaggtttaagtccttaatccatcttgagttaatttttgtataaggtcagagatgaggatccagtttcattctcattacatgtggctagccatcctagcaccatttgttgaaaaggatgtcctttccccactttacgtttttgttcgctttgtcaaagatcagttgggtgtaagtatttgggttctctattctgttccactggtttctatgtgcctatttttatacactactacaccattttgttgactatggccttatagtatagtttgaaatcaggtagtgtgatgcctccagatttgttctctttgcttactcttgctttggctatgcgggctcttttttggtatcatgtgaactttagaattgttttttctaattctgtgaagaacaatggtggtattttgatggggattgcactgaatttgtagattgcttttggcagtatagccattttcacaatgttgattctacccatccatgagcatgggatgtgtttccatttgtttgtgtcatccagtgttttgtagttttccttgtagaggtctttcaactccttgattaggtatattcctaagtgttttattattatcattattatttgcaactattgtaaaaggggttgagttcttgatttgattctctgcttggtcgccattggtgtatagaagaactactgatttgtgtacattagtcttgtatccggaaactttgctgaattcttttatcagttctaggagctttgtgaaggagtccttagggttttcaaggtaaatgattatatcgtcagcaaacagtgacggtttgacttctctttaccgatttggatgccctttatttctttctgttgtctgattgctctagctaggatttccagtaccatattgaagaagagtggtgagagtgggcctccttgtcttgttcccgttgaatgccttcaactttttcccattcaatattatgttgaatgtctttaacttttccccattcagtattatgttggctgtgtgtttgtcatagatggcttttattacattaaggtatgtcctttgtatgctgattttgctgagagttttaatcataaagagatgctggattttgtcaaatgctttttctgcattgagatgatcatgtgatatttgtttttaactctgtttatgtagtgtatcaaatttattgacttgtgtgtgttaaaccatccctgtatccctggtatgaatccctcttgataatggtggattatgtttttcatatgttgttggagttggttagctagtattttgttaaagattttagcatcaatgttcatcaaggatattggtctgtagttttcttttttggttatgtcctttcctggttttgttattagggtgatgctggcttcattaaatgaatttacttaaggttccttctttctctatcttgtggaatagtatcaaaaggattggtaccaattcttctttgaatgtctggtggaattctgctgtgaatccttctgrtcctggactttttattgttggtaatttttaaattaccatttcaatctcgctcttgttattggtctgttaagggtatctaattcttcctgatttaatctgggagggtgtatttttccaggaatttatccatctcttctaggttttctagtttatgtgcacaaagttgctcatagtagctgtgaatgatcttttgtatttcagtgttgtcagttgtaatatctcctgtttcgtttcttagtgaggttatttggatttttactcttcttttcttaatcttyctaacggtctatcaattttatttatcttttcaaagaaccagctttttgtttcatttatcttttgtactttttttccagtttcatttagttctgctctgatcttggtaatttcctttcttctgctaggtttgggtttggtttgctcttatttctttagttccttgaggtgtgaccttagaatgtcagtctgtgcactgtcagtctttttgatgtaggcacttagggctatgaactttcctcttagcaccgcgtttgctgtatcccagagattttgacaggttgtgtcattattgtcattcagttcaaagaatattttaatttccatttgatttcatttttgacccaatgctcattcaggagcaggttatttaatttccatgtatttgcatggttctgaaggttccttttggaactgatttccagttttattccactgtggtctgagagagtgcttgatataatttcaattttcttaaatgtattgagcttgttttatggcctatcatatgatctatcttggagaaagttccatgtgccgttgaatagaatgtgtattttgcagttgttagataaaatgttctgtatatatctgtttagtccatttgttccaaggtatagtttaaatccattgtttctttgttgactttctgtcttgatgacctatctagtcctgtcagtggagtactgaagttccctactattgtgttgctgtctatctcatttcttaggtctattagtaattgttttataaatttgggagctccagtgttaggtgtgtatatgtttaagattgtgatattttccagttgtacaaggccttttaccattatataatgcacctctttgtctcttttaactctgttgctttaaaattggttttgtctgatttatatcagacagaatagctactcctgctcgcttttggtgtccatgtgcacgaattgcctttttccacttctttactttaagtttatatgagtccttatgtgttaggtgagtcttctgaagggaacagatagttggttggtgagttcttatctattctgtggttctgtatcttttaagtggagaatttagaccatttatattcaatgttagtattgaaatgtgaggtaccattgcatttgccatgctttttgttgcctgtgtactttgttttttrttttttgtttgtttttgctttttaacatgtatttatgttttataggtcctatgtgacttatgctttaaagaagttctgttttgatgtgtttccaggatttgtttcaagatttagagctgcttttagcagttcttgtagtggtggcttggtaatggtgaattctctcagcatttgtttatctgaaagcaactgtatctttccttcatatgtgatgcttagtttcactggatacaaaattcttggctgataattgttttgtttgaggagcctgaagatagggaacaatcctttctagsttgtagggtttctgctgagaaatctgctgttaatcatgtaagttttcctttataagttacctggtgcttctgtctcacagctcttaagattctttccttcatcttaactttggataacctgatgacaatgtgcctacgtgaagatctttttgcaatgaattttccaggtgttctttgtgcttcttgtatttgatgtctaggtctctagcaaggctggggaagttttccttgattatccccctgaatatgttttccaagcttttagaattatcttcttcctcagcaacactgattattcttaagtttggttgtttaacataatcccagacttcttggagattttgttcctattttctattcttttctccttgtctttgttggattgggttaattcaaagaccttgtcttcgagctctgaatttctttcttctacttgtttaattctactactgagactttccagagcattttgcatttctaaaagtgtatccaaagtttcctgaatttttttattgtttttttctttaagctatccatttccttgaatatttctccctaacttcttgtaactttttwaaaatttctttgaattgggctttgcctttctcttgttcctccctgattagtttaataactaacctcctgaattctttttcaggtaaatcagagatttcttcttggtttggatccattgctggtgaactagtgtgattttttgggggtgttgaagagccttgttttgtcatgttaccagggttgcttttctggttccgtctcatttgggtaggctctgtcagaaggaaagtttggggctgaaggctgttgttcagtttcttttgtcccatggaatgttcccttgatgtagtactctccccctttccctatggatgtggcttcctgtgagctgaactgcagtgattgttgtctttcttctgggtctagccacccagcaagtctacccagctcccggctggtactgagggttgtctgcacagagtcctgtgatgtgaaccgtctatgggtctctcagctatggataccagtgcctgttccggtggaggtgatggagggtgcagtggactccatgagggtccttagctttggtggtttatgctctatttttgtgctggttggcctcctaccaggaggtggcactttccagaaagcatcagctgtagtaatgtggagagggattggcggtgggcagggccctagaactcccaagattaaatgtcctttgtcttccactaccagagtgaatagggaaggaccatcaggtgggggcagggctaggcatgtctgagctcagactgtccttgggtgggtcttgctgtggctgctgtgggggatgggtgtgagattcccaggtcactggagttgtgtacctaggaggattatggctgcctctgctgagtcatgcaggttgttagggaagtaggggaaagccagcagtcacaggcctcacccagctcccatacaagcagaagggttggtctcactcccaatgtgtaccccccaacagccctgagtttgtttgcaggcagasagtgtgatgggcttgaamacttgccctgtgctgcacccctagctgagagagaaaagggcttggtttctccccctgcctgtggagtctgcacaccagatttgtgccctcccactgagctctgaccaggaggcttcttgccccattcaaattgttacaaagttcagctagagatttctttctccctgtggagtttcaccccctacttctctggtcccccgccccctccgcccccaccatggatccctgtgttgttaggcaggaatggcctggcctgctaggggacacagcaagctcctagggcctttctgctgcttcctctacccctgcattttgcttggctctctaaattgtctcagcttcaggtaaagtcggaatcttctcctgcaaacagaatttcagcttctcccgtgggggtgtgtgtctgggagaggaggatctcccttccccctcacagctggggcactcacggtatttggggtatctcctgggtcctgcaggagtagtccacttccttcagagggtttgtgggtcctctcaggattattgctttgttcttgcagtcgatctagagctaaaattcggcgaacttccacargctgctctgtccagagctgcaatctagtcctgcctcccgtccgccatgatgatccaatttctccttttggttctttcagtctcagccccaactttgtttattgacaacgaccttccccttcctggctcctcctcccagatcctggaatggaattagtgtggggagatggggtgagctctctctcagccccttctcctcccctgtgccttctgctgtgatgctggtgcaaggaggaagagaagaaggaccaggaaaacagtcagtttctccctgtgtgacttctcccggcaagctcacagtcctctctttggacagatgtcacttttcaagtacattgtctatggctccatttctgccagctcttccagaaattggcagtccttggaccttcagcgggcagctggcacagcattccactggtgaccacacctctctgctcatgccccagcagtctttagaaggccccaggtcccaattcatctaccagctttcacccaacagtagccactttctttgcttctcttgaacgtgtgggaggccttgcccctcccttcctggccatcccactaaactctctcctgatgtcctgccacatttggtagcactaaggaggagaattacatccttcccttcattcccagggaagttagagcagggaacagcctcttaaaaacaccactttcccccaaatgagatggcttactaatttccagtgtttctcttacaatgatctgawaatttgcttcggagggtggggagagtgtgtctgtgatggctctgtcagcttagggagggggctggccacaagtgctatgagttttctcagctgagaatgtgacatacttggcaccttttattctcagcttagggtcttagtcaccaattctgggaatacaggaagaattctactcagtgcttcagacatcctgggatagaatcttttaatttgttcttcatcctagatattggttatatttaaacgaactttcatgcttgcctgttttggaggtgrgtagtcttatcttgcaacatagcatgggagtaatccaaatcatgtggcctagatgatctttcagcagatacccaaatgcaactagaattaagagtctacagtgtacatggactgtgttgagttatattggaacataaggtaaaggttccatcctttaaagttgcacaagagtagcatagaaagcacataagtaattgctagcacgtttgatagaagctctgagtagaggaagaggacaatgttgtgcattaggaaaggcttccacaaggactcagtagaacttggcttggaccttacaggatgggcagaatttgaccaggaggatggtgaatggatgagcctatgtctgctgggtttcccctcccagctttaatctccttttctttcataggtgcgaatcataaacatgtacaaggaaattgatcaaacaccctacaaacaagagatcaatgccaagaacctaatccagtgttggagagaatgtatggccatgtcttcctactccttgaggaaagttgctgtggaaaagttcaatgcagagaattattggaagaagaaaggactggccatggtccccctgaagtttcctgttggccttggctcacgtgctgctggtcaggtgagttctccaaaygcacatgaggatgctgcctggaagcagccctgacaaagcaagaggtgttgagraaacttctccttaagtcatattagccatatggttkcaatgcccaattgttaaatttcacaaaagccaccaaagtcaaagtaattaagctagctttactccagaggagaccagagctcctctgctcacatgcccatggttggtcaaaaacattcttgctggaaattgggagactgaggtttactcctggccctggcaacaggagttggcaaatggcagctgagtccatttgctctgggctcagactgctcatgtggaaagcaggagggtgggactgatgacctccaagactcctcttccagtgtccgcaattcggtgtcgctggaccatgaaatagaaatgaggagctgcaaggttttgggtgctccactccttctgggtgggttggaataaattaaattcagaaaaataaatcactttttaaatagaatttttgaagtttattcaccttgtaccttttaaaactgtgaaaggggggactgggaatctgctcttgcagtttaatttctttcattgattaaagaaatccccttgcttggttgcagtttccacctcttcattcttgacttcattcattcttaagaatgaataaaacttacccctaacggctggtgaaggactgcaacattctagctcattgkatggcagccgggaacccctattatctattttattacatacacacatccatgtayatacagataagctgggaggaccctcacaattgtcactcctctttgcagaattcactccttggttggagtcatgaagaaggcatggcagctgtgctgagcgatcacaaaataggaayaaatggcagggtaggggagcttcgagaggggcgttagtgtggatgttgtgtgttaagggatcagaagaggccaggaaaagtgggtaggaaggtcctttcctccatcccatatccatccattcacctaactgtcctagttgagctttggtgccatcctgagaacatttgcatgcagctttgattgtaggcaggtggtaggtcagagaagtgttataacaaatgatgatcttattgcagtcttctcattccttgcctgtttgtgatggcaaaaaataacacagagccatgtagtcatctgcatrcagtttactcaaatgtgggagacagtcaagatactgtggttgagaaataaaagcaaaaacgaggttattacaaaagaagagagaaagaaactaccactgggaaaagggtttgtaagcattgagtcttggtatagaattttggggtaaactgattagctggcagctaccaaagaggtcagctggggctgtctgtccttgtgcagactagtcaggatcatcaggaaaaacagcctccattgttcatggatcctctggaaatcctctcacgtttggccgtgggtaaacatggcgcactgcctctatttgatggctgccattactttatatctggcctccaccatagaccaggtctcacccattttcctcatcagaattttctcaaaaagtagatttgaaaaatatggtgaggtgcagtggctcacgcctgtaatcccaacactttgggaggccaagacrggagaattgcttgaggccagaagtttgaaaccagcctgagcaacatagtgaggccccatctctacaaaaaagaaaaaataataatagtgacaattactgagcactacgatgttgtaagtacttttaggtatttcatttaatcttgggacaacctagaagatttgtatcctcattttaggtataaaaaaaatctaggcttagaaggtttaaataactggctcaaggtcctgcagctggtagaggtaaggctggggctagaactcaggcctgagtggctctgaaagctgggttttctagttacaccacgtggtctccccaaaacaccttttgataggaactgaagtgggattcagctcagctgagaacaaactaggcaacagccagcagtacaaattcattcttgaaggccacctgggaaactgaccaacttacgtgctgaaaatatttacttagggctgaatcaaggagtttgagaccaaactccgtggagggcacatgctaaaagcctccattctgaaacaaactaaatagaggaggaaactagacatgatatttgagtgccttctccatggaaggacctgggctggggaatttgtaatctccacttgattattctctatctcatctctatcaggtaggtatgaatctctctatttcacagaaggggaaactgaagctcatagggattctctctgttgcccaaggacatccagccaataaatggcagaacaaggattcaacttcagcaccgccttcatcgtcccacagggcctccctgagcagaggcagtccctgcccagcagctgagggggtcaaacgtgccccacctgtgttatgcaggcataccttgttttactgcactctgctttattgcacttcctagatgctgcattttttacaaattaaaagtttgtggcaaccttgcttcaagcaagtctattggtgccatttttccaacagtatgtgctcactctttgtcaccttttggtaattctcacagtgtttcaacctttttcataattatggtgatctgtgatcagttatctttgattttactgttgtaattgttttggagcaccatgaaccacatccatataagacagcaaacttaataaatgttttgtgtgttctgactgctccacaaatagaggagcattcttyccccatttctctccctctcctcaggcctccmtattccmtgagacacaatgatattgaaattaggtcatttaataaccctgcagtggcctctaagtgttcaagtgaaaaaaagagtcacaagtctcacttgaaatcaaatgctagaaatgattaagcttagtaaggaaggcactgcactccagcctgggtgacagaagagaccctgtctcaaaaaaaaaaaaaaaaaaaaaaaaaaacagaaaagaaattgttacaactacctcctcaatcgtcagcaaccaccaccctggttagtcagcagccatcaacattgagaaaagaccctccaccagcaaaaagattctgactctctgaaggctcagatggttgttagcattttttaacaaagtattttaaaactaaaatatgtacaatctttttagacataatgctagtgtacacttaatagagtacagtgtagcataaacacttgtatgcactgggaaacaacgaaaattgtgtgatttgctttattgctgtggtttggagctgaacctgcaatatcagtgtacttacttcctgcagtctgaacactgaatggcacagacaggacctaaccaacctctgtgtgtccaatgccttactatggcacttggcacagagtaggaactcaaatgtctgaatggctgaaacatttggggaatctgcgggtttgaagctaacttctcatcgataccagtagtatttgtttgaagatttaaatttccccgactaggtcctctacttatgttggaggaccatctactccagctctccagttgtgcttgttttatagatgaagctttgcagaattatcttttgtggcactaacaatgagctgtacagtggtgccacttaactaaaccaaatttgacattttaaatggcccaaggagattgcagcaccacatggaacaaatggctgagtgatatctgatagacatgctgtcttggacatacaggctgaatgctataaccagcagggtcacacaatgttggaaaagtataatccactataattgtagcttaatcacatgggccaagtccaactatgaattacatgcacactttgcgagccaaggaggccaaatatggagtctacaagattaagaaacagattgcatggctatgctactgcaaatttacttaccaaacatttactgagcacctaccgcatgtgtgttgctatgttgcattccgagagattccttaggacgtgatccttcctttcagggggctcatattctagcaaagcacaatgaagtgccatggaatggggcccaggagctattgttgcagctggcatcacctgacatctgatgcatggcccccaggcagccagccctgggctctctgtagaggaaaactcttccttacctttattattttgaggatgaatgtccaggagcaaaagatggtgtttccaggagtcatgagtcaataaacagtaaaaaacactctattacatcttcccaaggtccttgggtgtcattatcatggctactatgccttcctcaagagtctaagtttctcctttggactgtggacatatgtgcctggtcctcagagaaagggtatcctgatgtccccatttgcccagtacatccctagtttacacctgccgaccaaataaatggagtgcattttcactgtcaaacttgccttatttggaatgatagaggtttctggttgtcattcacgggggtaatgtgaacctttggatacaaataaagagacagttctccaagcatggtccacggtccccaggcagcttggaaggcccttctgatgggcagagaattgatctggaaatgcagtctttttcttgggtttatctggtgattaacatgcagttccatcraccttcacttaatgaccagggttgcttacaaataatctaagtgagcaactaaggcttaggaaaatttttggtttattaagttgacattggcttattaccagaattttctgaagaccttgacattacaaatcctagattattatgtcactctgcctaaaaaattagatgtgaagaaacctagctgacccagaccacacccatgcggtcagcacttccctgctgcaaaactgtaaaggttgccttgcaggctttcccggaccacagtggaaccactgagagatatctgttctaggaggaccattgctgctgatgttgctcttacattgcagagccaaagggaagaagccatccttctttcctgctgtgattttctgggatatccccatattctagtttagcacaggcagatacgcaagaaggcacattcttgttaattataaaaacatgtttagcttagagactggatgtttctgattataagagtctttaatgctgttagcagtctggttccttctggatccttgtggggagctatacagttagataagattacttccaagttcttgtctaactccaaagctctgtagttctgtgccaagatgatttagggtgagcttagtcattttgcagcaaaamaattttagtgtctatctatctcatcttatatgggattataagaaaatggatttccattttcatttttctgggacatgcctacaactatgagaatatgtgtgcacacaattattcaccctctccctctacctgtctatactttactttgyattttaaaatagagtccccgccctggtttcccccaccccaaaaagaaacctaaaatgttgctccaccctggggggtgcgggattcttgragggaaatatttccaaggaaaatgttttaattgacacgatatgtgataatatcaaaaagatcacagaaacagttttcgtcttttctgctcaggctgctgccttggttcacatttatcttgatggctctgtgctggtcactcacggtggaattgaaatggggcagggggtccacactaaaatgattcaggtaagaatgcaaataactcgattgagttgggtgtgtgcttatagatctgttcatgagagaaaaactatgaatggatattttctgttacaaaatacaggataggaagctgggtgaggtggctcatgcctgtaatcccagcattttgggaggctggggtgagaggatttcttaagtgaaggagttcgagaccagcccagggaacatagggagattccatctctaccaaaaatatatatatatatatatatatatatttttttttttttttaattagcagggcatggtggcatgagcctgttttcccacctacttgggaggctgaggtgggaggattgcttgagcctgggaggtcgaagcctcagtgagccaattgcaccaatgtactccagcctcggtggcagagcaagaccctgtctcaaaaagtaaaaataaataaaaaacaaaggataggagatttgagctttgacagtttactctgttaaatgattagcagaaactgggtaaacaaaccaattttgcaactaaacccctaaaagaatgtggcagaagaatctcgagttgttttattgctaaagaaaattatatgcttatttgctgctttcctttggatatagtgacagttgagttgtcctttctgagtttttcttgggcaataagataatgtgtaaattctgatgtatttggattatttcttgccctttttgtattacaggctccgaacaattgctaatataaatcacctttgatatttacagtcaaactttatctgtttgcttttggctgtcttattttagattaattttaagctactgtttctcttttgttaatcataatagtaacattatagattataaaatatttggaagcagcagaacattttaaaaaacaaagaccctacacagtttcaccacatagaataatcattatttgggagtctttacatcttgtcttttttgcttttgcaaaaaagtcaccaacatgcttttgtttaattttgtattctgtttttccacccactttatatagcgtgaacactttctcctgtcattaagcagtctttacaatcatgaattgtatgtggctgcatgtggatayatatatgatttatttaaccatcccccagttgtttgaatacttcagtgaatatttttgtacactaacctgtgatcaaatcattgattgtttcttaaaatagacttctgggaatagaattactgggtcacaggtgtgaccattttaaattgtttgacacacattatcaaattgttttccagaaagtatccctctcatgacacccctaaccaacagtgaatgttatggattgttgaaaatttgtagataatttgataagtgaatgaaagtatctcattattgctttcatttacatttttctgagtataaagatgttaaatacatattttctctcagtcacttgagaattgactttccccattggagggtaagatttcagtgttttccttattggatcaccagagactttgatattctaagcctattgcactctgtgtggatgatctgagagccagacctcatggaagggctctgtatgcctgtgtccttgtagaagctgtgggcaagcactttcaagccatgctgctagcaggagagaggcaagtttgggatcaactaaagttagcaatatgattttgctctctagcgctaaaaataaagaataaagcagccagctaagtccttgtgttggcacatggcactggcgccatctcctgtgacccacatgttcatgccgttgcttttccaaggccatcgtcctttctcataggaagcactctttccctggggcaactccagaaatgtggataggagatagacatctcctatcattgataaggttctgctagaattttgcagagtgtggtcgtaggagaagcctcaaagatgtcaatatcatgattataaaaacaagaatgaagcatttcttcctgccttggcctggggcctcacctcctctttctgacactatcaccagaaagtcaaagaaaaagaaagtgtgttcaggacttggggtccagactagctataggatttttagaaacragaaacttttcatrgctggaggaatttgtggttctgctcccttgtccctgtcatgggtatgagggtatcacacatgkgttaccacgtgggcatgtgcacaggtctgtgactaatcaaagtgtttaaaaggaaactctctcttaaaattcaggtggtcagccgtgaattaagaatgccaatgtcgaatgtccacctgcgtggaacaagcacagaaactgtccctaatgcaaatatctctggaggttctgtggtggcagatctcaacggtttggcagtaaaggtaacagtcactgcagtggcgtccaaatcattaactccctcagggccaaatacgtgggtgggtggagctccaaagatgctgagagttaatccaactcatatctccttccccatcttgccctcagtcagtggtacagcacccagtggttctcctgtgctggaaatgccacctctttttctccctcactcctgacatttttctaatcagcaagtcctttcaagtctactcaaaaatgtctctgtctttctgcttccatattatgttagtatcactttaagacaggctcgcgcctctccccagggccgatgcaggacttctgtctctccaccacaacttcattgccttttgctctagctttctgctgccggagtgaattttctcacaaaataaatgtggccatgccatgtctgaaagcaatggctggtggttttccaagaggttttttattaagtcttgactttttagcatggcttacaaggccagttctctacacacacacacacacacacacacacacacacacacamgtgcacacactcatatgaaacctttcatatcaccttcatacagggttggtgtcttatttttccatgttccctcttagataagcctatggaatggtacatattatgttgttttgaatttggtgtttgcatgaaattaggagcataattttaatttaaaaataatctctaggatgcctgtcaaactcttctaaaacgcctcgaacccatcatcagcaagaatcctaaaggaacttggaaagactgggtgagaatcaatggttctctgtattttattttagaagaaaaaggagtgggaggagagcaagagcaatgtgcattaattgaaatctgtagaaagggcatttgcaaaggtaccaccattgtgtaatgataaataaaaggccctttggctcttagcatgtggaaatcctatcacagtgtggtggaggaactcttgtatctgggaaaattttctgttagagaaaaagatggttcttctgccagaactcctgttttaatccagaattaattaatgtttcatcctatgtagcctaggggttgtctagataataactgtacatctgttttttctctttctttgggttctgctgttcctaaaatagaaaaacaatagtagaaccactctgtaaaagtaaaaatcatataagcactcgtttagaaataggaaaccaagccagtgggtatatgttcatccagtaataggtactcaatggaatggaaatactcaactgcttcctttgatctgcttataatctagttggaaaagaagacacattctaaagtcagctaacaaacttttcaaagtaatagtttatcaactaccagatgttgtggaacaaatatccataaaagctgggagcatgtgtcacgctggctattctagaatgtcagtttttgcaaccttacaaatacaggtctgggggaaataacatttgaggatcccacttagaaatggtttctgctattccatggagtaaggactcattttataattcatatttatgggrtctgtctatacttcctgggcatatttgtttctgtcctctgtcccatgctgcctgagcccagaaagcctgagtcagtgtggctggagaaagctggagagaggtgcagcatggasagtagtactccaccaccatgagatgcagccattcagcccactttcttcgctaatgattgatgtgcttctgaccttcattcctagacttagggacttggacctgaccctgatttttgtgcatagtagtcagctctgtgtactgcagagttttggtgtaaatggtacaatttagcaaaattattcccctcacctgaaacaaatgtgtccagaaagrattgacagttcccataaatatgaattrtaaaatgaacscttactctatagactagcagaaacctgatattaaaattaagcagccaaccaagcattgttttctaaaatgtcccatcttaattgaaaattttctgcagatgactgagtgaatttcttcctaagtggaacatatgttgatgactttagtccagcctgtatcataccacagcgggcatttagtacaatcataggtgctgaacaaacagctacaagccgtgaaccacagaggagaaagccaaaaggaatggattaatctgggtccttcctggttactattgctgatagttttatttaacacacagggtaaaattaaaattgaagtcttgagtgattctttctttgggcatccttgttgcatcatgctatgctcttccttcacaggcacagactgcttttgatgaaagcattarcctttcagctgttggatacttcaggtaaatactccctstgatcacatgctatggagaagaacagtggtatcttgaggaagagtttcagttcccttgcaattttggcaaacgttgactttctaccttctatttacccatggttataaagaacatttaactgctagttaatccatggttgtggttataaagaacatttaactgctagtatccagaaagacttctgttaggaaaaataggcacacaaaattcagcttaactgatgattctaatcatagtgggtggtattataaggctctctgtggttagtacttggaatactcggcagtggttgactttttgttgaaaacacgatctatctcttaagaaacaaaggtaggggaaagcaaattaaacccataagatgggtaccattttayaccttcaggattggcaaaaaagaaattggaccataaccatgttacattaagatgtgaaacaacaggaactcagtgaatctggaaaacagtttattaaattattttaatggaaagtgaaagctgtctgagagcagggtgatgtagagccttacctggtttgatcactttgccattggtgcgggacctgggcactgactgcctgtcaggaacaggcattggaagcatttttaatggccacctccaggttgcagggcagcagaggagagagggtagagagttctgcaagctgctgacccatgcttctgttttaccattatttatttgatgttcttaaagattagttaggaacagagcaggccatggagcttgatggtgagagaccagagtagagacaaagaatgggagccatgggacctgatccttcacacagaggggcaaattctggagccagaaagatagacaaagcaggcaagcatgcacctttgaaatagcrtttggtgtaaaatgaaggttgagttccccaaatctgatgatccaatattagccaaaagcagtaagatggacattcaggaagtaagaagctaacctccargagtaaggaggcaccagtcaggagtagttagatgtttttatcagacaaagcaagttttaaaagaaaaaactaaatrcttatttattcaacacatttatcgcacatacattaggtgctggcacatacattaggtacaggtatattcctgtggcttgcataaatcctcatgggtctgtttagtcatcatggtctgcaattaggggacgtgatcacttaacaacactcactgtttcttccagaggttatgagtcagacatgaactgggagaaaggcgaaggccagcccttcgaatactttgtttatggagctgcctgttccgaggttgaaatagactgcctgacgggggatcataaggtcagtaccggttggaaaggtcttcaagttgcacttaggatgcacctaaattccacagatgccatctatctgaggagagcttagtgagtggcagcatcgtgcatttggcctaagggtgatttccctggattaccagaagaaaatagaatccccacaattgccttggtgatctggttgctgccatggaaaacaactggtggcctgtctttatttccctggcccttttaaatggaatcaggaaagaaactacatgaagaaagaaacatgctctaaagggggctttcatgtagactattggcacaaccagcaattctgactttttatgagaaatgccaagatatgacattcttgaaggatttcatagacatctgtaatctgctaacaagcaccaagccagcccagggcaggtagtggccacttttttatatcttttactcagctaggtcttgccttttagaagtccagtgtgctatccattgtgccacagagctggcttggtcttgctttttagatagtttaagagcatccttatgctttcaagggatgctctgaagagatacacacacatacacacaaacacacacacacacacacacacacacactctctctctctctctctctctctccccctctttctgtctctgttgcttcaaagactcatagaatttctcctcttgtaccagagccttcgggagtaaaagaagccacttactggtcactgtcaatactaatraatgatcactgatacattaaatgggactgtgataccctaacaactgtcatgtgaccaagctaccagtttagtgataatctcttccaaaatgtacctagaagcaagctctagttcttgatatttacaaatatcctctatgcctgtgttcttggattgtgatcagatttaaattttcatttaataagtctccagcatgtattttttaaaactatagtcaacctaatctctgaaactatggtcacttttattgaacctgccttttcaagtatctaacctgtctggttctaattcagactggatctctatagggtaacctcrcactagggcaaaacartgatcactttgagcatggtttttgtgttagactagcagccctacactactagggagcgggttcttgcatagaactgatttctgtttgtttgtttgtttgtttttgagacagaatttcactctgtcacccaggctggagtacagtggcttgatcttggcttactgcaatctctgcctcctgggtttaagtgattcttgtgcctcagcctcccaagtagctgggattacaggctgcgccaccacacccagctaatttttgtatttttagtacagacatggcttcaccatgttgcccaggctggtctcaaactcctggccttcaagtgrtccacccaccttggccttccaaagtgctgggattataggcctgagccactgtgccctgcccatataactgatttctaagtcccttctccctcaaagcaaaagttggtgaaaacttagtcatgtggattttcttatattcctatatatgcattgtccttgttaagatccaagaacaaggtaataattagcctagtatgaaattttaaggcatgttcctataacttatttgaatgatcttaggggatgtgtcatatagcctcatcagatgccttcataaaagctaaatctcagctcaggttagtgtcactgctaggcaaagggccagaatgtgacattctaccaggggccctccccaaagkcctrtttctcagccattctcctgttgatagamttgcccttattccggcaaaattttcctcactttgaacctacatctaaatatcagttacctgttctgtacaacaaattacccccaaacttagtgctgaaaacagtggatgctcattagctcacaccacttctgaggggctggcctccgggagtggcttatctgggtgattctgcatgaggcttgtcaagctgtggctggggcaacagtcatctcaaggctcaacggggacaggagaatcctgttccatctccctccatcatagcgttgttgacaggaggctcagcttctcactggctgttggccagaggcctccattctttgtcatgtggatacctctttgtaggctgcctgagtgtcctcaggacaagacaactggcttcctccagagagaccagcccaagagaaaaagagagagcatgtgyaagcgagagagtacccgagacagaagcccagctttataacctaatctcagagtgactactgtcacctctgccatagcctactggtcaaacaggctggcctggtagagtataggaggagactacatatggatgtgaataccaggaggtgaggattatccagagccatcttttaggcagcctaccacaacctagatccactctctccagtcctaacaaaagacacgacagacagcactaagcctacagctttgtgggttgtttttttctgttttgaggtggattcttgctctgttgcccaggctggagtgcagtggcatgatctcagttcactgcagcctctgcctcctgggttcaagtgattctcgtgcctcagcctccygagtagctgggactacaggcacgtgccatcacccctggctaatttttgtatttttagtagagacggcatttcaccatgttggccaagctggtctcaaactcctggcctcaagtgatctgcccccctcggcctcccaaagtgctgggattacaggcataagccagccccaccagcctaagcacacagctttgaaagcacaaccttcactaacactgaagactttagagctcctcctctaaccttcagctgaggccacttatctcctggaaggccagtcttgctgactgatgtcaaagaggactttacattttactgtgtgtttaaataagaaatgtgagttcctgaagttttattattgtcaaacattccagatcattatctaattttcaaatgttacatgaaagtcccagatcaaataaggaaactcttggatttcttttgttcaattagtaattataagwacaatctgttagtcatggcagagaccattatatcacattaaaaaaaatgtacagacttgctggaaagcaaaggtgttactaacactctggctgggsctgctgtacttctcctcatttgtaggttatcagtagcaagttgtagtgtcaactttattctcttctctgctacaaaaatgaaaagtctagaacagcagatgacaatttgaagacttttttgttggtgcaccctgaactctgtggttcagtaaacattcctcagccagttgtacctggatgtttggttgtatgctagccattaagctttgcaactaggatcgtgagggccatagatgttttcttttgttgtgtcatatgttatatctgttgtagtgaattaaactcaatctgttgcatcatacagcttgaatcaaaatgaagtaaatatttttttctcctattatttccaagaaaaaaagacagtgcttcagctggctaagagtatttgtataattttgaaagttttacataataaactttgtcmtataataaaatctttgttgcttctttcgaaatgacatggctgaaagaaaggctttataccaaagtcagcctggcaggaagtgttcctcagcttcttctccctaagttattctcattaaaataaacattttaacttttttttaatactagaacatcagaacagacattgtcatggatgttggctgcagtataaatccagccattgacataggccaggtacgtstaactgatgtgtctcactttctattygtaaaagccaaaagtgcggtggggtctgcaggagagcattccatcagtcttattcatcatcttatttttctaaccctttagtcaactctattcagaccaactgcagagctcaaatgttttactgtttaaaagggggaaggaaataaaggtgttttaggtagtttttgaagaaacataaaatctgtgactagggagcttgaatgaggcaagaccaagcctacaggtgactgatgagctccaaacttctgggacataartagagttagtgcccagygctgagccttagccacacgatgggcttcagcttcgaggagtttgaagtcgtgttgggataayaagcctcaagtcatcagagcagtagctgttggtaggcagcctgtagtgctggattccacccacagacattttcaaatttaaatttgaaatagttgaaaagattggaaagtcataaatatctagtttctcttgaaaacagaaagtttgcccacactggatcctcatttccatgagtgaagtcggtgggctgtacctttagagtcccacactctccaatgacacaggacccacctggaatcttcatatactgggtttrcgtgtctcgaacctggaggcaattcagctcattacctctgatttagggcaccatcttgtgtcccctcccccccaccccccgcccccaccatcatgacattgcrttattggcgaatgggaagaatctgtggtgtggagaagtcaaaggaggcttagggaggaagtgggtgtgaaccaggttgtcaaggaaagaatgagaaacgacattaggggtgaaagaagagtggaggaagtcaccctacagaaacacatggaatttagcatgcctgttcatggctgctaatcaggccagggcagatgactatggggaaggcctgtgtgggaggggtgggccatgaggagggagtcaragagcagaagagggctggggactgccaggggtgggtggagggcttttagagacaagacttcacttagtggggatggactgaagtgtttggaagactgatctaaaatcagagtccagagatgtgaggctagccactttgtgggcaaggaggtgggatgagacaatgggattgtagcwttcactagcaccctggggtctctggacacatcagtcaggggggtttgtctgcctcatgggcaaaaaacaaaagaagagggtgcttgggctccagactctgtgaagactcttcctgagcactcatttcaatggccaaaccaaaattagaaccctagtcctttgtctttgaccttctttttttcatgatttttatttattattattattattttttttttttgaractaagttttgctcttgttgcccgggctggagtgcaatggtgcaatctcagctcaccgcaacctccgcctcccaggttcaagcgattctcctgcctcagcctcccgagtagctggaattataggcatgcaccatcacacccagctaattttttttgtatttttagtagagacgggatttctctatgttagtcaggctggtctcaaactcccaacctcaggtgatccgcctgcctcggcctcccaaagtgctgggattacaggtgtgagccaccacgcccggctgactttgaacttcttttaacttaatgctgaacaaacatgtttaaaatggcttttagataaactttcagcaacatgctccaagacaccctgaaaatgctcttaaactgtaattttaaaattcaagcaaacagcatgaagttgaaatgctacttagtgttgactgtgttttctcatacgtggaaattctttttttgttcttgcctcagattgaaggtgcatttattcaaggcatgggactttatacaatagaggaactgaattattctccccagggcattctgcacactcgtggtccagaccaatataaaatccctgccatctgtgacatgcccacggagttgcacattgctttgttgcctccttctcaaaactcaaatactctttattcatctaaggtaagtaatgttctatgggtaaatatgcatgtttatatgatacctgttgggtgacaggaaggctacattcctctcttggctgtttgggatttttaccaggattgcagaagaaaaattcttattaaacattttaattctaatctaacattatgataaaaatttttagtattccaaatcttagaacttaacatcaactactattrccatcaggttctatctaatttttcaccttgcaataatcatcttcatgcctaataatcatcttctgtatgtaggtcatttcctgaggctagaattctaagaatgggaatattggatcaaaagattaaattactttttgaaacaaaaaatttatataggccgggcgcagtggctcatgcctataatccaagcactttgggaggccaaggcgggcagatcacctgagtccaagagttcgagaccagcctggccaacctagtgaaaccccatctctgctaaaaatacaaaaaaatagccaggtgtggcggtgcatgtctataatcccagctacttggaggctgaggcaggagaatggctcaaacctgggaggcggaggttgcagtgagctgagattgtgtcactacactcyagtgtcatgcttgggcaacagagccagactctgtctcaaaaaaaaaaaaatgtacatatgtagtacgtaatatttttatatatgcacatatgctataaatatgcacatatatacagagtgagagagagaggtataatctagttggcatgcttcctttcaagggtctgggagagtcgggggtgttcctggggtgttccgtgtttttcgctatccatgacgcagtgagtgcagcacgacaggagagaggcctgcrtggacccttgacccttaatagtccactgaccccggagaagattaggatggcctgtgaagacaagttcacaaaaatggtacgtttgcatggtagaaaaaaaatagtgatcataaaattctgaatttttggcctctgttcttgtggtaagttttcgtgaacgcactgctgtggcttttcttgccagaaaaggtgacgggaaacctgggggcatttgagcagatgtgcagaggggtccttgaacttgtacccctcgggttgcattttttcatcagcctgcccctgcttggctccattctatactatttgacaaaagaaagttcattcccattagttttatgttcctctcctgttttgctcccttcctaggacaccttggtcaggaatagaagttcaggaactatgccctgaacctaggacacccagtccaggaatataggcccctctgacagtctgcctccaccccaaccccaaacgggcacccggaaagtatgctagcaggaacccctcccctctggcaacagcgcccatgccgagcagacatctctaccctccttggatattttcagggacagggtttttaattgtggaagaaagtcatactgttcacagttaccaccctgactttgactgaagggaaagcccctcccatcctccactcacactggctctttgtggtatccttcatrgttttccctaagcccctgacacrttgctttttctactctggagaaacagagacccactccacttttcactgggtggtcttcaagcgtgagatgataaccccaggacctctccagtcctcccctggcttyctctatacttcacaggctgttgttccctgacctgtcatggccctggttgccctctgctggtgtttaacctactttatgttcttctatttttcacctaagtcacaaacatttcccaggtttgaacatccagatttgtttttattttagattccgagagatgaacctggatcctacgttccttggaatgtacccatctgaatcaaatgcaaacttctggagaaaacagagtgcctcttcccagatggcaatctgtcctatctctgtgctggaagatgctagatctgaaagacagagtttccacagttcagaaatcatcccacagtgttgcttttctmtggagctgatttaaagtattccatttagatttgatagatatgcttaagcaatctataaatcattttcaatgttataaacactaattggtttcctctagggtgatatycgtcattactctgtctcttcaatccatccagctaaatggaataggtgatgacttgsatgtgactcctacttggcttctatccaccaacagaaattataccatatagtgaaaggcaattttctaaataatttcatkactaatatgaactgtgaagttgtcattttttcatttgtccttttctgctatcaccttcctcttgtcagaatgaatatagacactgtatctaagtgggaccaaagaaaaaatagcgaactttcaccaaagttttcatgaaaacccaaaarctttaaaagttactatcaagaaattgaaaggaaacccacagaataggataaaatatttgtaaatcatatttgataaaagtcttgtaaccagatacataaagagctcttacaactcaataaaaggcaagtaatttaaaaataggcaaaagaattgctggatggtatggtagttctatttttagtttttaccctaactactctgacttgatcatttaacattctgtgtatgtaacaaaatatcacatgcataaatattatgtatcaataaaattttttaatgggcaaaggatttgagtagatgtatctccaaagaagatatataaatggctagtaagcattaaaaatatgctcaaactcattagtcattaaggaaatgcaaatcaaaaccacaatgagccaccattttatatgcagtaggatgattgtaatcaaaatgatggacagcagtaagtattggctaggatagggaaaaatgggaacacttatccattgcagggggcagtgtagaatggtgtagatactgtggaaaatagtttagcatttcctcaaggagttaaacatagttaacatagaagttaaacatagaattaccataatcttaggtatatacccaagagaatttaaaacatatattcacccaaaaatgtatacataactgttcatagcattattcatagtatcccagaagtggaaacaactcaaatttccatcaactaataaaatgtggtatatccacacaagagagttttatttggccatataaaaaaaaagcactattacatgtgacaacatggatgaaccttgaaaacattgtctaaatgaaagaagccaggcacaaaaggctgcatattatatgattccatctatacaaaatgtccagaacaggcaaattcacagacacaaagtagattaatggctaccagaggctgctgggaccacagactgctaatggatatgggattccttttcggggtgagaaaaatgttctagaatgagtggtgataattttacaacgtgtgaatatactaaaaaccactgaattgtaattttataaaggtgagttttatggtatgtgaattatacctcaatttttaaaaaagtatctgtggagagaaacagaaaatgtgggaaagattgagaagttgtgagaatcaagaagcctgtcccaatcaatggctttccaaaaacatggaagcctcaaagggaggctaaatagcaaggcatagtcaaggaaaaacgccatttccgttaagagcagagagaagtcacatggatctctgcctttaagagcagattttctcatttataccacaagtatttatagagcattttactctgtgccaggcactgtactaggcacttgagatttatcagcaaacaaaatagacagagatccctgtccttgggaagatcctattttggtaagggcaggcagaaaaattttaaaaataataagtaaattacaggagtatggttgatgcttgagtgctaagggaagaagtagaagtggagcaggttaaggccaatggagagtgatggagcaggtggcaggttgtggttagaataggtcagagaaagccctcctgaggaaatgagaatggaggctgtgagctaagcaggtatctggaggaagagcattactggggagacaaggcattagagcagagtctcttgcaagcaagtgtgcctggcccgtttgtggagcagcagtggggcccatgtggctagcacagagccagggacgggggcagccatgtagaacctggaggccgctataaggacttgagcttttaatctaagtggctgcagagcagaaaagtgacatggacttgcttctgttgcaaaggattatcctggatgctgtgctgatgcaggtcgtgggagggcaaaagtcgagggtagatgcctcctttctgtccctttgccaactcctccccctccagcccacctctgtaaatgttggaattctcgagacagccatgggccctctttcccagtctctctgcctggtgggtggctgcctttactcccatggctggaggtaactctcttgcttaagctctggctctgtaaacccaactcttgcttttcattgccacttggatgtctcaaaggcacttcaaacgtcccaagcagatctccttttctgtacagccatccacaggttgctaggccggaaacgggaaatgatctgaggtgctctgttctctttgcgcacacatctattcaggcacgaaatcctgtcaatcccacatcaaagacagttcctgaatctgcctctccctctctttatttccatagcctctatgttactccaagccaccttcatttctcccctgactattgcaataatcccctcctgatttccctgcattcattttgctttccttccaaccattctcacattgaagccaaagatatacatgaatttgtgggcacacacacatgcacatgcacacacaaaatcatcatgttacactcttgcctaaaacccttcaattgcttcctattcatctcagcagaacatgtcccaaatccctaagatggcatctgcagcctaggttatctagccccagcctgtctctccagcgttggctcatgttcccttcccttttcctgtctgggtttcctgttgtagctctcactctggagcctttgcctgtgtcctctgtctggagggttctatcacttttacccctccttgggtctgactgccactatccagtactgctctgcagttacaggcacaaaagtaacttgaggatcttgtgaaaacacaagtcgtaagatcaggcaagcaaaagctatacagtaagaaggaagcagaacatccagaaccaagcaggagcaggagcgggaggaacaagccagcagcagaagcaggtaccccagacacagtggcccacgccggtgcttcagcgtctctccctcaactcacacctagagctgctaggcagagtggaggggtccttaagctgatgcagaaggaaaaagacagagctgggttcacaagagggttggctccatacttgggtacaatccagatatgcagtgttggcagtatagaccctcttagaggtggcaaggggaaattttcccaataggcagggctttggggagcacactgattatccacattatgtggaaaacaggagtggtgcaacccaaggttaggatatatatggaacaaatggtttggccagctggtcaagggcctgggtggggggggtgatattacaagactggggacaagatggcatatgaatgggcatacggaagtggcatgatatgtgaagatttttgtatcacaggttaacacccagcaggaagctcccactgtgaaagatttgctaaacaattaagtggaccaaatgagatggccatgtgacattagccaactctgtcatccatcaccccagtcagtgctcacccaatggtgtcagggatggaggccttgcacrggcccgacagcatgggcttccacttgccatgtagctgatgctgatgctgaacatccaatctgcttccaacacagaccaaaactggtcctcaatttgacaccatccctccaggagaccaactggccatttggtggcaaattgactacactgaaccctttccattcgggaaggggcaatgattcactttaacgttttctgggtagaggtttgcctttcctgcctgcaagatcttagccatcaccactatctaagggcttacacagtattacattaatcatcataagatcccatgtaacatcacgccggggcaatttacagcaaagtaaggggatctgcttcacagcagcctgggagtgagtgcatgactgtggaacctgctggtcacatcagacgctatcctgcttggaacagctgttctgacagagcaatgaaacaacctcgcgcaggcacagctggaatgccagctagaggatgggctccctcctccaggacacaggatgcttgaaaatgagcactctgtatgatgttatgtccccagtgggtggttcatactggcagaggatagctgggcatttataacagagaatggttggtacctattgtatataataaaattctacagatagataaataaaaaacctactagggaaaaataatcaaaggagagaagaataagtacaaatactcactaattgtctagcaagatggataacctcaccaaactagagaaatgcctactatgaactgtcatttctcccacatcctggaaaactggacagtagggataatgctcagagctggagaaggctgtgtacatgatttgttatattaaggaacacattttagaaggtgatttagttggattcagcaatgtgcatagccttcaacccaggaattccaactccaggaatttgtccaacagaaatacttgctcaaatgtccaaaggtgaagtccaaggattttcatggcagcattatttataatagtgaaaaattaaaaacaatgtaatgtaaatcaatagatgactaataatttatggcaataatacaaatagttaacatttactgacagcttaccttcctatgtgccaggaactgttttaagcactttacttcacaacagccccaagggagatactattattttgactattttacagaaagcaattgaggcatggagaacctaagtattaggttggcgcaaaggtaattgcactttttgccattgaaagtaatggcaaatactgcaattacctttgcaccaacctataacttgaaaaaaagaaaattttagaatagcatgaatagtttgagttcactttttagaaactatcaaaaattatgtatgcatgtatgtatctatgtatatgtgcatgggaaaattctgtacagacgcacaggaatctgatactagtttcctttgcgaagtaaacactgggatagaggattttcactttttgctttatatacttttatgtttttttaaaataagccttctatttgtaatttaaaaacaaattatgaaaaaaagtacatttaccatcaagaaactcccctgaatgtagttcatttgcaaatatagcatgatttagctccatgtcactgactaaagcagcttcgtgttgctgctttaagaagatggtttaaggccgggtgcagtgactcatgcctgtaatcccaacactttgggaggccgaggtgggcagatctcttcaggccaggagtttgagaccatcctggctaacatggtgaaaccccgtctctactaaaaatacaaaaattagtcgggcctggtggcgtgtgcctgtaatcccagctacttgggaggctgaggcaggagaatcacttgaacccaggaggcagagattgcagtgagccgagatcacaccattgcactccagcctgggtgacagagtgagactacatctcaaaaaaaaaaaaaaaagaagaagaagaagaagaagaagatagcttattccagtgggttgtccccatggcaaggagaaatatacattatgtaagggctgaattgccatgaaagttccaggttggcttaaaggaggaggaaagtgggggtaacagagcaaggcggggagacaagagggttgggaacatagacagacaggagctggttggaggaacacactcaggaagcagatacaaatggccccggaagctgcttcatccactattcatcctcttccagggagcacatggcaagcctgtcaggcggacacaggaacaggtgcttttgatacaacttcacaagattcagccaatgctggtggcataatgtcacattccaaggcgtcagatgaacttggtttgtttgtatgtgaatggaagaacagtaagttttctacattattaataaattcatataaagaaagaaaccatgatagaagcaatcttttattaatgtttgccaagacgatcctaggttcaggtgacttgtgtgtgagttgctgatttgctgtgtgactgtgacaaacctataacaatctgtatctgtagtccttagggttcttagggaaggggaggagagaaggagggagggagggaaaaaggaggaaaggagagggaggtggagaaagagacagacagaatctctgtaatgcatgtaaaggtgtcaggattaccagatgcaaagcgattgtgttgataacttcagaccacattttgtaattgcacctgtattcatccaagccatcaggcattgacttctctttgctaggatctttcttgcatctctctcttcctccccacttcctcccacagctctgcctccttcagctcttgtcccaccaccaccattgccaccacacacaa

SEQ ID NO: 93584 - DNA, 30366 bp, Homo sapiens
tcctcattaccagtcctaggggggaaaaatcactccatttaggacaaatatagccaaaatgtattttagataatccacagtttacaaacctactataatagattagatttatgtggaaccaaggatttaaccaacagaacccatttaatctgaaactaatccattttctagaatagcatttctctaactctactgggcatcagaatcacctggaggattattaaaacacagagtgctgggccccayccctggagtttctgattcattatatctaggtgggggtctgagaggttacctttctaacaagttccaggtgatgctgatgttgctggtccaaggacctcactttgaaaccactgttcaagaactgttctcaatcccgattgtgcatcagaaatttcttggccaggtgcagtggctcacatctgtaatctcagcattctgggaggccaaggtgggcgggtcacttgagcccaggagttcaacaccagcctgggcaacatagcaggaccctatcttattatttttttaattattaaaaaattaaagttaaaaaaaaaaaaaaaaagaaggccaggcacagtggctcacacctgtaatcccagcattttgggaggccaaggtaggtggattacctgagatcaggagttcaagaccagcctgtccaacatgatgaaaccccatctccaccaaaaatacaaaaaaaattagccgggcgtggtggggggcgggtgcctgtagtcccagctactggggaggctgaggcaggagaatcacttggacctgggaggcggaggttacagtgagccaagatcacaccactgcactccaacctgggcaacagagtgagactctgtctcaaaaaaataaaaaaaattccttctagcttcttaaaataacagctgctggatccttccacagaaccagtgaacagaacatctacaaatggggctggggcaaaatgaatttttttaaagccttagagatgataattttaaaacatcattgaatttgagaatgtcctggacagattctcaggcaaactccattctaattataaggtctgaggtgaatacaaaaatctgcattttttttttttttttttgagacagagtctctctctgtctcccaggctggagtgcagtggcgcgatctcggctcactgcaacctccgcctctcgggttcaagtgattctcctgcctcagcctcctgagtagctgggattacaggcatgcgccactacgcccagctaattttgtatttttagtagagacgaggtttctccatgttagtcaggctggtctcaaactcctgacctcaggtgatccaccagccttggcctcccaaagtgctgggattacaggtgtgagccaccgtgcccagcctgggagtctcttaaaacaaacaaaaaaagactattcagaaaaatatttcccatgatgttaaataaaaagactgatttatgaaaatatatatttaaaatgtaaagataaatataaaaaagcacttgggaatcactgatttgctgggaaccaataaaagccttatcaccacatcactaggatctatctgtattctctaaagtaaaaacaactatctttgaacattaccaggattagaaatactgtaggtaaaatgcatagtatagtcccctgacatagaaaatacttagtgttacttaccgtttttattgttttgaaaaaattccatagttctccaggacccacaaacaaatgaggagtatgctactttgtaaatcaactccagagaaaactatttgtttcaagcctaaataccagggttatagactttgtaaggaagatgcttaccaataaatacacacaaaaaaaagagaaaaataaattgtacctagcagaaaaagaagtgacagaaacaccgtcaattcctttcactgcagacatgactttgtccaggtcttgggtgtagttaacgttgaattctactcggtggtttccctctgtagggtagttgggagctttggaaggatgtatgggcctggaggtacaagctcctagagaaaatattgtgggaaaatgggagttttggggggtgagagattaagatttaaaagtaaactattataggcaaaatttctaagaaatgactttttaaaaagattcattctcatgcttacataacatacacacatcccttagatatacatcaccagtccccataatctagggctttggcatggacatacaaaatcaaattattttcagaattattttccaaaagattcttaaatctctgaaaaacttggacaagaaagactgattcatacattttcagataatacacagaatggtctactgcttggtaaatctagccatgtaaaccatcattcaggttgcaaatgctcatactttatttgaccacattaatccagatatcatcataaaagctttagcccaaaatgagtaaactaaagacttactaaaataaagctaaaatccatccatcattccctcattgtgctaggcataagtaaacattcactaaaaacattcattaaaaccctgatgtctatttacttgacttatcaatcaagtgtattctggagaggcctgagctttcaattcaacaagcattttccaagtgcctgggtgacaggcattgtgccacaaaagtgaggaatcatgaagctcagtccagtaaggaagacttctgctctccttactccataagaataaaaaatgtttcctttttcaaatgcaatttaactgccaaatttcagcaacattattttaaaattattatataaaaatggaatcatgccctccccaaccctaaagcagttaaaactttactggaaagacatcctaaagtttcaaagtatttgcagggaaaatatcaaatatgaaagaggcttctcaccaagccctttagccaaccagttgttgacgccctggggcgcagcatcataggctgtatgaggagagtagataccractctgttctccagagcccggatcaccaggcgctccttccatgtgttccaggttatgcrcttcatgggtcggaagataggcggatggtaggagagaatgaggtctgccttcttttgcagcacctcctccatcacttcctcagtcaggtcattggtcaggaagagtgtatttacagtatgtggtgggcttggttccaccagtaatccaacattgtcccaactctcagcaaacgagagggatgcaaagtcattcaaggaagaaaggagagccttcaaatccatgaaggaacgggaagaattgcagatcagggaatctacaaaccggactgtcgtggggactgggcgtacgcaagatgacaacatacagaaatcaggtaaagttcaagtttctgatgtcaaaacaaagaaaatggtacacaggtatactttaggcctggatctttgaggcatcaaaacatatgggcaaaagagctgtcgtcatagagatctgggttcaaatagtggctctgccacttaccagcacactgtaacttaggtaagccatttaacctctccaatcttgttttctcacctacgaaacagagatactataacccacttcacaggccatccagaggagctaatgaattatgtaacctagcaaagcctggtacataatacacaaacgtccatcccatctcctgccttgcacacccttgttcttattctccctacccttgcttcaaccaacctcctccctaatccatttctctaaatattacctttccttttcccaagccccctccaacttcttaaataaaacttttcttgacctcccttttcagcatccttcccaaggctccccacccctcagtattctcataattctgtgtgtgcccattatgctaaagctactatgtaataggaactaacttcaataaatctcagtatcactaatataagccagcactaaatgcttactgcatagaatgacactgcccgcctcccctgattgcaacagaatttggagttggggtggtatatactggcattacaatgtgctttaccaaaaaacagaataatgtggcggggcgcctgtaatcccagcactttgggaggccgaggcgggaggatcacaaagtcaagagataaagactatcctggccaacgtggtgaaaccgtctctactaaaaatacaaaaattagctgggcatggtggtgtgcacctgtagtcccagctactcgggaggctgacgcaggagaatcacttgaacctgggaggcggaggttgcagtgagccaagatcatgccacagcactccagcctggcgagagagcaacactccgtctcaaaaagaaaaaaaaaaaaaaaaagaatgtttaaaatgtcaagtgctttatcagaatcaaaaatcaaggaatacataggcaggtcactctataaatgggcagggtcaaggcagaagaagggagaagccactgccccttaagcaacatttgctacacaaaggccaggctcaagaggtgggaggggataaggtatagggtacttttcccagacagcctgtaagccttctaagtatctacatccaacaaggaactgaaaaggttggcaacagagggaaggtgggagggcaatggaaaggtagaaaaaaactgctggctccaaaatatgcacaattagtaaatgtttaatcaaataaccacaaaagataatgctgtcaaccccattcttaaacttaccacttataaacactttttgaagaaaaacatttcatagtatgcacaataagaaagcatagccaactgtaaatttgatgaaatatccataagtcaattattccaaaagcaatttttcaacatttctatttaatgagatgaagatgcttgtttaacacattatttgaagtgatacagggtctccaaaaaccactcgaggtcttggaagtttgtttttgtttttttctttttgacacagggtttcactaggcgcctaggctggagtgcagtggcgtgatctcagctcactgcagcctcgacttcctgagctcaagcagatcctcccacctcagcctcctgagcagctgggactacaggcgctaaacaccacacctggctaatttttgtatttttagtagagatggggattcgccatgttgcccaggctggtctcaaactcctgcgctcaagtgatccacctgcctcggcctccaagagtaccgggattacaggggtgagccactgcgtccggccttgaaagatcttctaatggtcctcatagtactccattctccagcattttctacatctggcaagctcgaaagtgaaaccctagtgggccatcatgcaggttttgagttatttactgttacagatgaggaaactgcgaagctacatggccacagtcaacaacgacaacagaaggcaacatagtatggcggttaagagcaccgactctgaagccagcctgaatcctagagccagagctgtgcaacagcaggtaaatgacttatcctgtgcagtttcctccttaatggaaatagtgcccaggccacaatatcgcgagatttacacgtaaagctggaaacaactcccgtcctagagtaagcactgtttactattaagcagcatcagtagggcccctttgcaacctgcaaaccgctccctcgacgttacctcatctatgcctcatttcagtgccacttcaggccttttccaggacagtgaaaaaccacgagacacagccagttaagtctgagtcaggacccctgtcccactagtgcgctgtgctctggtgcggcagggcagttttctgacccaatctcctcttctgctgtcctctgcagcaccaagataacaatcacagccggccccaaccggcacctaccgcgaaggtcacaactacactcgcgggtttttaaatcgcccactactcaccagtcccggaaacttctctgcgtcacttccggtcccgcgtcggcgctccggatgctgtggcacttggctccccgtagcgggagagctgggcggaagtggtcctttccgtttggcagccgagtgtaaagcattgcttgaggttgcccaggtagtttcgccttacacttcttgtcccagtgcaattattagtagagctccctttcactgtcaaatttccggttggggataaattgcattgtcgttttggtttgagataggaagatgaggggaggaaggaggtgaggcggtaaggggcgttctctctcttgggtcccgcgcccaacttccgctggcccaaagaaactataattttgaaccaacagacctctgctggcatctgcgattgcatttttcctgttttaacaacggctgtgctagacgaagtggtgaagcccaagtatggagtaacgtcattaattctttcattcacttattcgaatgcttgctgagttctgtgttgctactggtttagttcttgggatactgcgagtgaacagtgggcggcgaggctgttgttgcaacgtcagagtaaaagaaggaccctgcacggcggcctcccagcacttcgggaggccgaggcgggcggatcacctgaagtcaggagttcgagaccagcctggccaacacggcgaaaccccgtctctactaaaaatacaaaaattagtcgtgcatggtagcgcgcgcctgtagtcccacctactcgggaggctgagacacgacaatcacttgaacccgggaggcggaggcggaggttgcagtgagccgagatcctgccgcactgcactccagcctggcgacatagcgagactccgtctcaaaatgaaaaaaaaagagaagttcatagtatattagtgataagtgctgtggtggaaaaaaaaaagttcatagtatattagtataagtgctgtggtgaaaaaaaaaaaaagcgaatttcatagtatattagtgataagtgctgtgggagaaggaaataggaatgtcctagggctgaagggctaaagcagttctgtgtaggattgtcaggtcagttaaacttgacatttaagcagaaatttggaggtgaggaaattagccgtagagatgtctgagtataagaattccaggcaaaagggacacccaatgcctggaccctaagggaaggtatctgggttattgggggacttgcaaggaggctcttgaagaagagcaagccgggcaagtaggagattgggaggcttgaatcgggtaggatatcttctatagccgggtttttattacctaggggatgccattagaggattttttttttttttttttttgacggagtctcgcgctgtcacccaggctggagtgcagtggcgcgatctcagctcactgcagcctccgcctcctgggttcaagtgattctcctgccgcagcctgctgagtagctaggactacaggckyctgccaccacacccggctaatttttgtgtttttagtagagacggggtttcgccatgttggccaggctggtctcgaactcctgacctcaagtgatccacccgcctcggcctcccaaagtgttaggattataggcgtgagccaccacgcccggcgaggtttttatttaaaatgttcagtaaagatgagcgtgtgtgagttaagacaggaaaatgagcctaattctttttttcttttgggactagagacttatttttgagctcgctgtaagactgagaaatcacgtagtccttcctgaaaccactaagaggaaaaatggtaagttttgagcaatttttatctaatgtctttcattataagtaatttttagaaattcagtcaagggcaataaaagttcatggaaattgcagtggcaagatggagaaattgtataatatagaagcacttaatatggaataattcttttaaaaaatacacaaaattgctttaaaattctttaatgttgtcacttaaaatgcacagaatttacctttttttttttttttttttttgagtttcactcttgtctcccaggctggagtgcagtggtgtaatctcggctcactgcagcctctgcccctgggttcaagcgattctcctgccttagcctccccggtagctgagattacacgcgcctgccaccacgcccagctaattttttgtatttttagtagagatggggtttcgccattttgggcagactggtctcgaactcctgacctcaggtgatctgcctgccttgacctcccaaagtgttggaattacaggcgtgagccaactcgcccagccagaatttaccttttatggagaaagattgattacaagatagatagaaatggaaagggagagttgaaggagcagaagagaatagacaggtctgacaattttaattggattattttgctctagatctaaagtgggcaactaggctgggcacagtggctgacacctgtgatcccagcactttgggaggcggaggtgagaggactgcttgatcccaggagttcaacaccagcttgggcaacacagtgaggcccccgtctctacttttaaaaaaacaattaaataaagtgggcaactagaacctgaagtagaaaaaggcaatgagaatagtgccctgcttctcccacacacatctttaacctgctcatactctctaactgctaggccaggcgcggtggctcacgcctgtaatctcggcactttgggaggcagaggtgggccaatcacttgaggtcaggagttcgagaccagcctggccaacatggtgaaaccctgtctctactaaaaatacaaaaattatctgggtgttgtggcatatcccagtaatcccagctacttgggaggctgaggcaggagaattgcttgaacgcaggaggtggagattgtagtgagccgagatcacgccactgcactccagtgtgggcgacagagcaagactccacctcaaaaaaaaaaaaaaggagaaatgaaaaaggaaccctccaaattgttttctccctctctggaatacagtatcatatcaaggggtatacaggttacagaaaaacaggtacaacaaaaacaaaaagcaagcaagaaagcactgtggttatctctgcacatttaagatttagaaacactgacacttgttatatttttgttagtcgagaaaggaattattttttaaccctatttctcagaattaaattacctaaggaaaatggtggaaattatgttttgaaaaatcattttctcatcatttttctataaataaggatgttggtgaattgccatgtacatcaataatacataacaattgtttttatttttcttgataaaaaattcaaagttaaaataattctttccatcaaaatatttacttccaaatttttgtcatggatactacttaaccctaacatttatattctggagttttttctctactgttgggatcaattttgagaaaaaagtacaacttaacctctaagagctgctttgtggatgggtcatctctgaagcagtatttctgtcygtttttattcagattatcatcttgaatatccacacagggaaataaacaatgcataaagtcacctaaataaatttcatttgttctcacattttctctcctttttagtctgtgacactgcatacagatgtaggtgatattaaaattgaagtcttctgtgagaggacacccaaaacatgtgaggtaagtactattatttacatattcaacatcagttaatacaacaagataagcactttggaattgaataatctaacctaaataacaacaacaaaactttctgtaaaaccattgttagggaaaactagccatcctaacttctggcctgatttccacttatttgtccaatgtcaaaggtggatcaaagagaacgtagataatttttcggtaacgatagagtagccagtatctttttcttttgaactaattttcttcaggaaacgtaatcattaggacattatattacttttttctttctttttttttatttatttattattatttttttttgagatggagtctcgctgtgtcccccaggctggagtacaatggcgcgatctcggctcactgcaacctccgcctcctgggttcaagcaagtcttctgcctcagcctcccgagtaagtgggattacaggcgtgcgccaccatgcctggctaatttttgtatttttagtagagacagggtttcaccatgttggtcaggctggtctcaaacttctaacctcaggtgatccatgcacctcagcctcccaaagtgctgggattacaagcatgagccactgcacctggccttttttttttttttttttttctcaagacggagtcttgctctgtcacccaggctggagtgcagtggcatgatcttggctcactgcaaccttcgcctctggggttcaaacgattctcctgcctcagcctcccaagtacctgggattacaggcacccaccaccatgcccagctaatttttatatttttttagtagagacggggtttcaccatgttgaccaggctggtctcaaacttctgacctcaggtaacccgcctgcctcagcctcccaaagtgttgggattataggcatgagcctccatgcccggcaggatattatattaaagaattgttgtatactttttttttttttgagacagggtcttgctctgtcgctcagactggagtgcagtggtgcaatcacggctcattgcagcctcaacctcctgggctcaagcaatcctcccaccttggcctcccaagtagataggactacaggcgtgtgccaccatgccaggctaattttttttaaatttttatggagacgagatctcactatgttgcccaacttggtctcgaactcctggtctccagccatcgtcccatctcagcttcctgaagtattggaattataggcgtgagccaccatgcctggcctgttctatacattatttcgcctgtttatttttatttatttatttatttattttgagacagagttttgctcttgttgcccaggctggagtgcagtggcccaatcttgggtcactgcaacctccgccacccaggtccaagggattctcctgcctcagcctcccaagtagctgggactataggcgccagccaccatgcccagctaattttgtatttttagtagagatggggtttcaccatgttgatcaggctggtctcaaactcctgacctcaggtgatccacccgtcttggctgcccaaagtgctgcccaaagccactgcacccggcctgtgtcacctgtttaaatgacaaggatggaaggaagaagagtcacctgtatatattcatttattcagcaattatttatggctgggcatggtggctcacatctataattccagcactttgggaggctaaggtgagctcagaagttctaggcttacctaggcaatatagtgagacccccatctctacaaaacaatacaaaaattagccagatgttgtggtgtgaccctgttgtcccagctacaagggaggccaaggtgggagaattgcttgagcctaggaggtcaagactgtagtgagctctgatcacactgctgcactccagcctaggtgacagagcaagaccctgtctcaaaacgaaacaagaaacccattattcgtgaaaggctatcttgccccagagtctggagatacagtgatgagcaacagacattccttaccctcatggagccaatattttagttgtaaaaataagcagggcaggaaaattaagtaattatatttttaagaaattattttcatttatttattttttttttaaagatagagatgaggtcttactatgttgcccaggctggtcttgaactcctggactcaagtgatcttcctgcctcccaaagtgctgagattacaggtgtgagctgctgtgcctggcctaaaattaagtaattctaaaagatgataatgccttgaaaaaaattaagtgttgagatagagaataatgggaaaggaagaaggtgagggcaggtgtagccaataaactaatacttaaattaaatgcaaaggtatgagggcatctccatggaaagaggtatagaaagaatattccaggtattcagattcagaaaaggttgtgaaataaaattttaaaaaattccaagaccaggcacggtggctcacacctgtaattccagcacttcgggtggctgaggcaggagaatcatttgagctcaggagttcaagaccagcctgggcaacatagggagacactgtctctacaaaaaaaaaaaaaaaaaaaaaagaacattccagatatagaaatctcaggtacagagtaccccaggtaagaaaagctgccccttttggattaattgtcagaatgctgatggagtttaggtagtaagcaacaagaaagcagttcttagtatatgtgatgaggagatgagccaggtactgcagggcttgttaggccctgctgaagattttctttttgtttttggttgtttttttttttttttgagacggagtctctgtcgcccgggctggagtgcagtggtgcgatctcggctcactgcaacctccrcctcccaagttcacgccattctcctccctcagcctccagagtagttggaggcgcctgccaccacacccagctaattttttgtatttttagtagagatggggtttcaccatagccaggatggtctcgatcttctgacctcgtgatccacccacctcggcctcccaaagtgctgggattaccggcgttagccaccatgcccggcgaaagattttgtattttatttcaagaggagaaggaagctattgaagtgttgtaggcagggaaatgacatccaaagtaatgacaacagtcatagtttaaatatgctgctatcacgttttcagtaaatatgattggttttttgtcttaactgggtttctgctgcatcatttctcaatcatttttactcccttcagaatttcttggctctttgtgccagtaattactacaatggctgtatatttcataggaatatcaagggtttcatggttcaaacaggagatccaacaggtaagttattccattaaccaagatctaaggaactgaatgtatagtatgaagaagtgggtaaaagaagaggaattaaatacgtggagtttttgttttgttttgttttgtttaataagttctgttctacaagtacagaacatgcaggtttgttacataggtatatgtgtgccatggtggtttgctgcacctatcagcctgtcctctaggttttaagcccagcatgcattagctattcgtcctaatgctctccctccccttgcccccacccacaactagccctgctgtgtgttgttcccctccttgtgtccatgtgatctcattgttcaactcccacttatgagtgagaatatgcggtgtttggttttctgttcctgtgttagtttgctgagaatgatggcttccagccatccatgtccctgcaaaggacatgatctcatcctttttatggctgcatagtattacatggtgcaattttaaagcagaaattattagcacctacccctaaaatgtgaacaatattgtgctcactttggcagcacatatactaaaatttgaacaatacagagaagattagtgtggcccctgcacaaggatgagacacaaatttgtgaagcttttcatacttaaatatatatgaacaatatttataaggagggttattcttttttgttttttgtaggtctgttttaatcttcaggtctgtgaagttaaatttggggaattaggaaaggccatatcaaattttatctatatttaagcagtcaaactataaagtattccttaagttttgggaaatgaacttgttttcaatttaattaaatacttcttttgatttgcttcacttgtaatgtaggaactggaagaggaggcaacagtatttggggcaagaagtttgaggatgaatacagtgaatatcttaaggtaaatcctcaatgctttaaaaatctatttctcatgccttggttatgcatggaaactttgatacatgtgtcatagtgatacaagttaacatcattgcaaaatgaacatacttttttatagtttttgtacatttgacaaatgatgtcggggagacttgagaaatggtgatcctagcctgacatgtgtactggaatcccaccaccacgtggctcttgatagtaagtgagttcatctttgaatctaacctgaaatgtttaactagtagtgtaccaaagagacttaatatctcaccataaaattcatgttgaatgacatgaaacagtggccttttttgagagtggggaggaaagactatcaaacttcctggttgcaatgttgcccattatcagtacccagcttttatcatcttctgttagatgtttgaacatccctgtattaatatgacttaatacctatggtagatcacaactaggttaaagagtagtacatataaatagtctttaacatggtaaaattagggatttttaattttctttgttatatttttctgtgtttttcaaacctctgtggagtcattttttttttttgtctaaaattaaaaattagtgcatgcctagttttaaaaatcaatcccacttcccagagataacttcagttgatgacttattatgtggtctttcaaactttgtatctccatagaatgataactttatgattagaaaaagagcaatgaagtatcctcaaccagggccgggtacagtaatcccagcactttgagaagcccagtaaggaggattgcttgaggccaagagtttgaaaccagcctgggcaacatagtgagacccccatctccacaaaaaaatacaaatattagcctgttatagtggcgtgtgcctgtagtcccagctactcaagaggctgaagtgggaggattgcttgagcccaggagatcaaggctgcagtgagccaagatcatgcacagaacgagaccccactcaaaaaaaaaaaaaagtctactcaatcaaaatatgcagtttaagtgtattattatatttccattacattaaaatgtacccacaaaaattctgaaaaaaattcattgcagtgtttatctctggatgatgagactaggagtaatttcttttctttttgctttttttaaaacctttttttagagacagggtcttgttctgtcccctgggctggagtgcagtgatgcattcttggctcactgcagactaaattttctgggctcaggtgatcctcccacctcagcctccagagtagctgggactacaggtgcatgtcaccatgcctggctaatgtttgtattttttgtacagatggtgtctcactatgttgcccaagctggttcattttacttttctattgtaaggaaatgtattagttttgttacaggagttgaggctgggaggtgataaactttttgaaaagtcaactttttcctgaatgaataactaaacaattttttaggtattaattattacattaatgactgcttccatataccagctgaaaaccagagactggctatgacagaatcacctgtggaactttgttgtttgtttttgagactgggtctcactctgttgcctaagctgagtgcagtggcctgatcacggttcactgcagccttgacctgagctcaagcagtttctcctgcctcagcctctcaagtggctggaccacaggagtgcaccaccgtgcccagctaatttctgattttttgtagagacgaggtcttgctctgttgcccagtctggtctgaaaytcctggactaagatgatcctcctgtcttggcctcccaaagtgttgggattataggagtgagccactgcacttggctggaagttttaaaactataacagatcatggccttgccctcctaaaaataaagtcagtagggctggttaggacttagactatattttaaggttcctagatgattcttttgcaggcagagttaagaaccattatataggccgggcgcggtggctcacacctgtaatcccagcactttgggaggccgaggcgggcggatcacgagggcaggagatcaagaccatgctggctaacacagtgaaaccccgtctctrccwaaaaatacaaaaaattagccaggtgtggtggtgggtgcctgtagtcccagctacttgggaggctgaggcaggagaatggcctgaacccgggaggcagtgcttgcagtgagccgagatcgtgctgctgcactccagtctgggcgacagagcgagactccgtctaaaaaaaaaaaagaaccattatattatacaccttatacaccaagattgtggatatgtattgactcttcatatattctggcccaggaattccattcccaaatgtttactcaagagaaacttgtaagtttgcaccaagagacatgtacaggagtgttctgatgtactgtttgtaatagcaaaagtctagaaacaacccaaatgtccactgattgtagatgaatcactatgtagattgtggataaattgtagtatattcagtagtgaaatatcacatagtagtaaaaaaatagtaataaactatggctatatgtacatgtataaccttagaaatgtaacaatgttatttgtagaaagcatttcccagaagactaaaatgttacgatgtaattatattcagaaggaaaaggaaagaatgtgttgtttaggcatgtgtaaatgtgttagggctgggcacagtggctcactcttataatcccagcactttagggggccgaggtgagaggaacaagtacttgaggccaggagtttgagatcagcctgagcaacatattgagccctcatctctactaaaagttaaaaaattagccaggtatggaggtgtacatctgtagtctcagctactcaggaggccaaggtggaaggattgctcaagcctaggaggtcaaggctacagtgagctatgattgcaccactgcactctaacctgggtgacagagtgagaccctgtctctaaaaaaaaaaaaaaatgaaaaaatgaaaaaaaaaaggtattagaatagtggttacctcttgtagaggctgaggtaataaatggagaggagcacatggatatatgtaattaattggtaacttttattttttcttgagctcccattattcaatgaattggtaaattttaactctgaaagctgggaaatatgttaatgggtgcttattttattaacttacatttttattaactatatttttgtgtatgtattaaatattgtgtatgtattaaatattacatgtgtatttaatattacatttgattggtggacaccttttagggagacaagcattaatattttgatataggtgcttctctatgacttattagcgtcacccaatgaatagctaaagctagagtaattggtggagttgtagtgtattacaggcacctccctgtaacatagttcacagttacatcttcattcttatcagtaaggtccttttaatttctatacactgtctcttgtaaacaaatactatcatgatagtagagctaggtgagacctttcttagatcgttcagtcctggggttataaactgactgcccatgagtggaacacccacagatgcattatctgtggcccttagttaaaaaatatatatttaatgtcattaatcaagagatagcctattcattttgccagacttcatctctctctaatgtttacattctgcccaattgtcagtttatctgcttgacccttgtgagcatctgagttataaatagacccttgaactagtccarcctcccttgttttacagataaagaaactagcaagagtccattgtatgtgagaagagattgtgggcattttggttttgttgcctgcctgatcatttcattccagcacactattccttaatataaatgtaaggattatttctattatttgttggtattgcaaaaagtgtccatggctgtatttcttcaaagtgaaaatgaaattaattgagaaatattatttgatatattaaccttttacatacaagttttcaaaggtacagaaaaggcagaaactgaacatttggattatccctaatagagagaagttggttaaatgttttcttgctcccttaaatattgtgaaggtaaagattgaatgtcttggctgggtgtgctgattcacacctgtaatcccaacactttggaagctaaggcaggaggatcacttgagcctaggagttagagaccagcctgagcaacatagtgagaccccaatctcaaaatatttttaaaaaagaaaacaaaggtgtgcctgtcttgtttcaatactatatttgggatggttatataaaaacacagttaatactttgatgtgtctttttcagcacaatgttagaggtgttgtatctatggctaataatggcccgaacaccaatggatctcagttcttcatcacctatggcaaacagccacatttggacatgaaatacaccrtrtttggaaagtgagtattctggttatggttttcttttagcatttcaatgcaagtggtgcatatgcttagctgtgacagtagcataactaatattgaaaagagtgaggccgagcgcagtgcctcacacctgtaatcccagcactttgggaggccaaggtgggcagattgtctgaggtcaggagttcgagaccagcctggccaatgtggcagaacccctgtctctactaaaaatattttaaaaaattagttggatgtggtggcacacacctgtagtcccagctactcaggaggctgaagcaggagaattgcttgaacctgggaggcggaagttacagtgagccgtgatcatgccattgcactccagcctgggcgacagagtgagactctgcctcaaaaaaaaaaaaaaaaaatgaaaagaaaagaaagaaaagaagagtggtgtgagagctaaacgtacctggagtttaagtctaccacttagcaaccctgtgaccttgggaaagttataatctccctgagctttattttccttattttgtaaaagaggccagtaatttttcaatattgttatgcaaattaacatagtatatctattttctttttctttttctttttttgagacgaaaggctctgtcgccaggctggagtatggtgcagtagcacagtcatggctcattgcagcctcaacctcctggtctcaagtgatcttctcacctcagcctcttgagtaactggaaccacaaatgtgtaccatcatgcgcagctactttaaaaaaaaaaaaaacaaaaaaaacactttttttttagagacatggtctcactatgttgcccaggctggtccattttcattaatgatagcatttcacagcaactaacagatctgaaaaatagtggcttaaacaagatggactggcatggtggttccattttgttaccagtgttctaggcgcctctgtcataatattggcagcacagctcttatcaaaacttctgtgtatcagggaggaaaggggaggaaagacaaaaggtgcttgccagctgattcaccttttttaattaacagaactttcccaggcctgtaatcccagtgctttgggaggctgagacaggaggatcacttgaggccaggagttcaagaccagcctgtggaacatagcagaacccatctctataaaaaaaatttaaaaattagccaagtgtggtgacacacacctgtaatcccaactactcaggaggctgaggtgggagaatcacttgagcccaggagttccaggctgcatgagctgagatcacacttctgtactccagcctgggcaacaatgataccctatctctaaaaaaaaaaagatagaaaaaaagaaaagccgggtgcggtggctcacrcctgtaatcccagcactttgggaggccaaggagggcagatcatgaggtcaggagatcaagaccatccaggccaacatggtgaaaccccatctctactaaaaatacaaaaattagctgggtgcggtggtgcgtgcctgtaattccagctactcaggaagctgaggcaggagaatggcttgaaccctggaggtggagattgcagtgagccaagattgcgccactgcactccagcctggtgacaaagcgagactccgtctcaaaaaaaaaaaactttcccagaagacccagaacttagtaatgtgaccactccttacctacaatggagggtagaaaatgtatttcagccacattgccacccttactaaaattagatttctccgagtaagaagaatggctcctaggaaggtatttcacagtttctgccagggtatctattaagagtactatgtctgggagttgcttttataaatcagtgggaagtcaatttgtctgttcrttcaacaaataattatcatgcttaataaaccaaggcacaattctagagtttgttctatttaatagtttggatgccaaattaggttaattaaaaatagaggactcccagtctaggtaacatagtgaaaccccgtctctacaaaaaaatttaaaaattatccaggtgtggtggctcacacctatggtcccagctacttgggaggctgaagtgagaggattgctgggctcagggtgtcaaggctgcagtgagatctagacagatcttttctttttcattccatatacatgtatctaatttacacattaataataatcaaggagaaaagaaatattacaacatctagtagtttttttatgtttgtaaataacccagtttccctcttattttctcccttaaccaacatcattcaaaattattgttcagttattaccaggactcattttaytggatttgcgacaaaactgtagagtttagaacaaagattaaccttaggttcattaattccttgtttgttgtatacagatgcacacacatttttctgggaagatgatccagtaactttcctctagttctccaaggggtccgtttcccatatacttgactctacttaactgcctcagttctacctgctgggtttttttaactttttacctgagacctatgttttctacctcctctgtttctcttactgacctagaaggtgggatagcctttaagacttataatttaaagacttaaatgtctatatttaggggtaaaatcaaaatgttttggttgaagtacccattttgtgaaaatgcaaaataaaatgcaaatctgctaatttttttttttttttttttttgagacagagtctcactctgtcgcccaggctggaatgcagtggcgccatctcagctcactgcaagctcaccctcctgggttcacgccattctcctgcctcagcctcccaagtagctgggactacaggcgcccgccaccgcgcccggctaattttttgtatttttagtagagacggggtttcaccatgttagccaggatggtctcaatctcccgacctcgtgatccgcccgccttggcctcccaaagtgctgagattacaggcgtgagccactgcgccaggcctacaaatctgttaattttttaaagtacataccagtggttgagaatccctaatctgaaaattaaaaattaggaactttttgagcactgacatgatgccacaagtagaaaattccacatctgacctcatgtgacgggttgcagtcaaaatgcagtcagatgaccaggtgcagtgactcacgcttgtaatcctagcactttgggaggccaaggcgggcagatcacgaggtcaagagatcaaaagccactctttcttagcaaatgttttagactgaaatttccaaaacttgtatttgaagaatagctctcaatatattttttcttggtggtaacatgaagtgggattgctggaggctgttaactgtcagtcttctcttctcctatttttattacttcttgttgttatccagaagcaaaaagtagaaatgccataattaggccagacgtggtggctcatgcctataaccccagcactttgggaggctgacgtgggcagatcacttgaggtcaagagtttgagaccagcctggccaatgtggtgaaatcccatctctactaaaaacacaaaaattagctgggcatgggggcatgtgcctgtagtcccagctgcttgggaggctgatgcagaattgcttgaacctgaaggaagaggctacaatgagtcgagatagtgctactgcactccaacctgggcaatggaagtgagactccatctcaaaaaaaaaaaaaaasaaagaaatactataattaaacaattaactgctgggcttggtggctcatgcctgaatcccaacactttgggaggccaaggcgggcggatcacctgaggtcaggccagaccagcctggccaacatgctgaaactccgtctctactaaaaatacaaaaattagccaggcgtggtggtaggctcctataatcccagctacttgggaggctgaggcaggagaattgcttgaacccaggaggagaggttgcagtgagccgagatcacaccattgcactccagtctgggggaccagagcgagacttcatctcaaaaaaaaaaaaaacaagtacaaagtggagtggtcacctactttaggactctcattgtagggcagtattgctaatagtgtcatctacatactttctccatgtatttcctgtagcaaagaaatctttatgactagtgtgttgtaataagacatacatatttggacttcatccgtggtttccagcatagttcttttaaaaaccttgcaatttcctgagtgacaggagtgaaaggaatattttattgttcataataaaccccattcaaccatacctgagtttatgctaatgaggtgactcttggtggggttctagatagcttcagtatggagggctggttgccagaggaatcagccatgtatttttagaggggtggaacattcagtgacctcctattcttgacctctgggaaggagagaagggctggagattgagttccagtcactagtggccagtgatttaattaatcgtgcctacctaatgtgccctccgtaaaaaccctaaacagggtttgagagcttccaggttggtgaacacaagtagatactaagagggtaacacaccccgagaagagcatggaagcgctgtgcccctctctcagactttgccctatgcatctcctccatttggttgttcctgagttgtaacctttataatagcccatagtaataaataaagtgctttcctaagttctatgagccatttttgaaaattattgaacagagctggggggcatgaaaaatcccaaattatatcatggttagtcagatagtacagatcacaatcgggacttggaactggcatccgaagtggtaggggctgtcttgtgggattaaccggggtctctgttcactccttgtagttagtgtcacaattaaattatagggccaggtgtgggggcatgcatttgtagtcccagtgagatcctgtctttaaaaaattaaataaaattttgaaaaaataatcaagttgtgggatacccagagaattggagaactgggaaaacccacacatttggtgttggaagtatgaaagtgtagaaaaacagtttgttttccctttaactggttatattagtcccatttgtagctgttctctgtcactgtatgaatggggtagaatataattttaggtactatggtggaaatattcctaccctttgtattgttgactaagggcataaaagtaaattatttctgaattttgatccatatctatgatggaaaatcaacattttgttgtacattcaactagagaactcagagatctgtaagacttgattattttttaaggagactgtaattgtcatagatatggatatcatgtttyaatttaaggaaattttcatatgttatgttgtttctctttcagggtaatagatggtctggaaactctagatgagttggagaagttgccagtaaatgagaagacataccgacctcttaatgakgtacacattaaggacataactattcatgccaacccatttgctcagtagctatgrtagacctggacaaataacttgacaaattgctggaacacacttattgtggtttacccggttttaattatgtcagagattgcatcatccttctgcttgtttacaactatgatcttctatgaaatggtggtaccaaggggcgcccaacagcttttatccccattcttagagcatattctttattataatgattatccaacatatttctttaattttaatacaaaaaatacatcatttaatttttgttacatatgaacattcatttttaaatgctcagcctcaagtgcaggcatttttgagtggcctgattacatattcctcccacagcaagtccgtatcctggaagtgttattttataataaaatttaaaaagttttaaagaattaaatcgtaggacaaattaattaaaatattgtgtaaaattaccttcaggctatgtgtataaggtatatatgaaacgtaaatgaacttcatgtttaaatttgggtctcatctccaagatatcttattatgtatatgcaagtatccccaaatctgaaaatttgggtattcctgaaactgatactaacggtaagagctctaccattaattattcactttatacagttagaaagaggagggacaggataaaaagttagtctggaaaggccagccaatccatttgctattttctctgatttttttttttttctttttgagacggagtcttgctcttttacccgggctggagtgcagcgggtcactgcaacccctgcctcccaggttcaagtgattctcctgcctcagcctcccaagtagctgggactacaggtgcacaccaccatgcccagctactttttgtattttttttttcagtagagacggggtttacagagaccatgttggccaggatggtcttgatcttttgacctcatgatctgcccacctcggcctcccaaagtgctgggattacaggtgtgatctttaggtttacagtaaaggctctcagaggtcctggaggccgagtgtggtggctgacgcctataatcccagcactttgggaggccaagatgggcagatcacgagatcaggagatcaagaccatcctggctaacatggtgaaaccctgtctctactaaaaatataaaaaattagctgggcatggtggcgggtgcctgtagtcccagctacttgggaggctgaggcaggagaatcacttgaacccgggaggcagaggttgtagtgagccaagatcgagccattgcactccagcctgggtgacagtgggagactccatctcaaaaaaaaaaaaaaaaaaaagatgtcttggaatacagtaaacactcaacatttcccaactgatttgctcatggacttttttttttttttttgagacatagtctcactcttgtcactcaggctggagtgcaatggcacaatctcgtctcactgcaacctccgcctcccgggctcaagtgattctcctgcctcagcctcccgagtagctgggattacaggcatctgccaccatgcctagctattgtttttttgtgtttttagtagagacagggtttcaccatgttggccaggctggtcgtgagctcctgacctcaggtgatccgtccaccttggccgcccaaagtgctgggattacaggcgtgagccaccacacccggcctgctcatggacattttttaaggcatatcttttttttttttaattttagattcagcaggtacatgtgcaggtttgttacaagtgtataatgcatggtgctgaggtttgggcttctactgatcctgtcacccagacagtgaacatagtgcccaaaaggaagcttttcagcccttgcccctgccccttcctccttttttggagtccccagtgtccactgttcccatctttttgtccatgtgaatccaagatttagctcccatttattgtaactgaatgcaggctgggctgcacgccacttgcaaagtcaacaacaaggaggagatgcaggaaaaggaaagtgactttattccagagctagcagtggggaaatggccaaagctagtaccttaaagaaatcattttgaactttaggctggggagaggtgcttaaaaagggaacttagaatgggaggcatgcgggagtggtgcagggtttcagatctctgtggcttgctgtagtggctatcttgagttgtggtccacctggagtgggggctggcatcatctcaacaatggctgggttgttgactaaccaccttaaggtaatctctggaattttgcagctgggtctccaagcctggtatatgtcatgattagcccttgatgggccaggcacagtggctcacacctataatcgcagcactttggggaggccaaggtgggaggatcacctgagcccaggagttttagatcggcctgggcaacgtagtgagaccttgaatctactaaaaattgaaaaaaaaaaaaaaaaaaaaaaaaagccggatgtggtagccccagctacttaaaaggctgaggtgggaggattgcttgagctagggaagtagagactgcagtgatccatggtcgtgccactggactccagcctgggcaagagagttaagaccctatagataagagtgtatagtgtaagtttaacaagtgtacagttagataaatgtgcatagtataagggagtgtgaggcgggaaagggagggaaacggttttaacaagactacattctgaaattaagaaagaaagggccaggcacggtggctcacgcctgtaatcccagcactttgggaggctgaggcaggcggatcatgaggtcaagagatcgagaccatcctggccaacatggtgaaaccccgtctctactaaaaatacaaaaattagctggccgtggtggcacgcgcctgtagtcccagctacttgagaggctgaggcaggagaattgcttgaacctgggaggcagaggtcgcagtgagccgagattgcaccactgcactccagcgtggaaacagagacttctgtctcaaaaaaaaaaggaaaaaaaaaactttaaaatgcatttcaaggctaggatacttggttatattacaagtgagaacataaggcatatctctgaaaatattgaagagtggagctttacagaatatccatttgaaaaatgcaatgaactagttaaaggcaccagtttgtggagttctggtctgtgtttgaatcacagctgtgtcccttacagtgtaactttaagcaagttaacatcttcaagctttagtattctcatccataaataatacctcagaagacaattgtgagggttaaatgtgtgtaaagcttctggcatgtagtaagtaagtagaagctgctgtcctaacattcatgtccaccacagggctctcacctcatcaagccattcattgggttctaccactgatttcatcaagaccatattctgcccactgcctagatcacagtggttggatttgggtgttcctaaaacttataccagccgagcgtagtggctcatgcctgtaattccagccctttgggaggccaaggcgggcagatcacctgaggttgggagttcgagaccagcctgaccaacatacagaaaacctgtctctattaaaaatacaaaattagctgggcgtggtggcacatgcctataatcccagctactcgggaggctgaggcaggagaattgtttgaaccccgggaggcggcggttgcggtgagctgagatcgtgccgttggactccagcctgggtgacaagagcaaaactccgtctcaaaatgtttgtcttggcatcagttcttggtttgtctcatttcttccaatggctggtctaattaatgttttgattctttcttgactagtttggagttagcttacagctatcctcttgtcaccatttatatcttccactaaactgaggtgctttttactagcagcgaatctgtatccgtacaggtctgcagcaacctcaattcttgcctcctcagaagaaagaattcgactgaggggcagaaggagagggtgaggcacgttttagagcaagagtgaaagtttattaaaaagctttagaggaggaatgaaagaaagggaagtacgcttggaagaggaccaagcgggcgacttgaaagataaatgtgtggcttgagcttttgacttggcgttttatacactggcatacttccaaggtcttgcattacttctccccacttgcccaactcctgagatcttattgggaagctgctgctcaccagtttcaggtgttttctattaggagactgccgttccctggtgccagctgtgaccaattactacttcagcaagagagttaataaccgcctgaccatctcacctgatggttgcccgacactcctagtgtgtgtttgggggagccatctcctgctttgttcatacctgactagctacccaccgtaacagtgccagttatactagtgacttttttttttttttgagacagagtctcactctgtcgcctgggctggaatgcagtggcgcaatctcggctgactgcaacctctgcctccagggttcaagcaattctttttttttttttttttttttgagatagagtctcactctattgcccaggctggtacgcaatgtcgcgatcttgactcactgcaacctccatctcccgggttcaagcaattctgcctcagcctcccaagtagctgggattacaggtgagcaccaccacgccttgctagtttttgtatttttagtagagacagtttcagcatgttggccagggtggtctcaaactcctgacctcatgatccacccaccttggcctcccaaagtgttgggattacaggcgtaagccaccgcacccggcatactaatgactttacattttgtttcacttttaaaattttaatcatttaagtttctagacttagtattaaggcctttctttggccagaccttgttttgccactttttttttttttttttttgagacggagtattgctctgttgcccaggctggagtgcaatggtggatctcggctcactgcaacctctacctcctaggttcaagcaattctcctgcctcagcctcccgagtagctgggattacaggtgcctgtcaccacgcccggctaattttttgtatttttaatagagacggggtttcaccatcttggccaggctggtcttgaactcctgatctcgtgatccacccgccttggccttccatagtgctgggattacaggcgtgagccactgcgtctgacctcctccaagttttattctaaactctgccacttttaattagtggtgcaaatatgttttttttgattttaggagtgttagtccaaactgcaccattttgtaaatcctgcccccccaccgccctgccccgtttccccagccctgcctggtctcccccaccctctattttgcagaccttggtcaaagtgaaacattccacaggggttcgggctgtgagaaacatcctgcctaaccacctgaccacaaaacggacaaaggcgcaactaaagaaacacccctatcatattctgccgggagaaagtgcaaagaacaccacattcccggggggtcgtggtggctcacgcctgtaatcccatcactttgggaggccgaggcgggtggatcatctgaggtcaggagtttctactaaaaatacaaaaagtagcgaggggtggtggcgcacgcctgcagtcccagctactggggaagctgagacaggagaatcgcttgaattcaggaggcggaggttgcagtgagtggagatcgcgccactgcactccagcctgggcgacagagcaagactccgtctcaaaaacaaaacaaaacaaaaaaaactaccaccacattctgcgggaacaagggccagaaccgcctcattatgggaacatcttaacatcctgcagggcagcaagtcagcaagccatatggcccaggcccctcccgcccttacctaaaagtaccccactggtgggcactggcattaggctggttccccacttctgtaggtcttaggctggacataaagcccgcagttgctgtagagctgccactctgtatctttaacgctggccttcccttcaaaacttatcaaggagcttatttttagaatgtgtgctcagttacggccataaaagtatcatagacagggaggtatgctggctgcccacgttgggcctgatgcaggcaccatgaggatcaaggtgcagaacattgatttctgttggctcacactgatcccattagtaatttgaagccatctgacgctagtggtatattttatttatttatttattttttagagacgggtcccgctatgctgcccaggctggtctcgaaatcctgggctcagcgatctgctcgcctcggcctcccaaagtgctagggttacaggcgtgacccaccgcgccgtgaagtattagttttaaagcaattgttttagtggtcgctaacagggtacatgctactgtgtatactgattccctcacttttcct

SEQ ID NO: 93585 - DNA, 13571 bp, Homo sapiens
gctatacaaagtcacctggaagtttcaatcgtctctggccttaaacccataactggaacttaacagtcaccaatggacatacaggctatgcccactgaaagggggatggtcacaaatagcatttataggaatagaccctaggggccaataatgacagtacactccagagaagactatctggtatctgcacacttataaacacatacccctatatccaattctggaaatggacacattgggctgttggagctaggtgctgtcacacattggcatgatacaactacttcttgttctggttctgttcacactgagagacacctcgtaatttggctcctttcttagtctgcaaatagtagggagagagtgtgctggtccagttcacacaactgtctggcttgctgacagacaattctgagaataaattaacaaatcggtactccagctttaaacaaaagctctcatgagctttgctttcttttttttttttttttttttttgagacggagtctcgctctgtcgcccaggccggactgcggactgcagtggtgcaatctcggctcactgcaagctccgcttcccgggttcacgccattctcctgcctcagcctcctgagtagctgggactacaggcacccaccaccgcgcccggctaattttttgtatttttagtagagacggggtttcaccttgttagccaggatggtctcgatctcctgacctcatgatccacccgcctcggcctcccaaagtgctgggattacaggcgtgagccaccgcgcccggccgagctttgctttcttaaagggagtcactttgcccagtctcatccatttaagacatggagaatattgagtttctgaggaccaaagagaaggcagtggtaaattcctcaatggaaatggcaccttgaagcccacctgtgtaggcagccagcaggctctcctcttctgcatcatcacacttcccttccagtagcaacttcaactactgtcatttttcccctaaaagggtgaacactgagctgtcatgcacttgaaccaaatagaaatgatgcaaaccagcctttctgacacagtaattcagactcagcagattaaatgacaagcccaacatactgtatggtaaggaagtacttatggataagtatcataggataaaacataagaaataatgttcttttttactatatgtgtatgtgtgtggtttttgttttgttttttgtttgtttgttttgagaaggagtctcactttattgcccaggctggaatgcagtggcacaatctcagctcactgcaacctccacctcctgggttcaagcaattttcttgcctcagcctcctgagtagctgtgattacaggcacccaccaccacacccagctaatttttgtatttttagtagagacggggtttcaccatgttggccaggctggtctcaaactcctgacctcaggtgatctgcctgccttggcctcccaaagtgctgggattacaggtgtgaactaccacgcccggcctactttatattatagaccaaaggcacaggtataactcaaatactgaccaaacaatccctcaagttctgccccataaaaccttagcctctatgacagcaagtagaacaaaggtactgttgaactcaaatacttaagaataagtctttgaaaatgtgaagaacgtcagatgtcatttctttccattatatatttttgaggaagagagtgtaggggagaaaaggtatcttttcctcacccatggcaaagttcatggctgacacccctataacaaaaagattaacaagagaaaggcataacaaatttattcaaccaaagttttgcatgacacaagagccttcagaaatgaggatccagagacttaggaaacttgaatttttacgcttaagtacaatgaagaatggacagccacgtagaagcatgattgaacaaaaagggaatgaggcctaataattggggtgggggcccttagcaaggcctgcttgtccagattcttcttgtcctctgggtacagggcaggacctctctggaatgagagtcttataactcactgtcaggtgagataggtcagagaattccttgatgaccatgcttcaggggagaaaggcaaggggaggtcagagggacctcctttcttctgcagtttctcttatatgccaaggtgccatattggggggtatcctgtcctgagccccaacaaaaggaaagaccagcctctttgttactacaactaaaagttactacaactaaaactgaataatagaagtaaatttcctgtaacgttcattgaggagaaaaggtgaataggtaacattactctgagagggccaatggcctgaagtcacctaaatttctactatcattcaacatgtaagttttccaaatgtcacatattcttcttttaagccccccagaagttaaatagactatcaaaagcttacttttacttctggtatttctccttcagcacaccaagtctttggggacaggcacaacctctctacattatgtatttgaattctgcacagcatgttgtgttggcatataaaatataacaaaaaacaccctagacaaaatagtaagatgattccaaaacaagacaaaatctatttcagtctgtaatcacaatggcaatatcagaaccatgaccaccttgtctgagatcatagaagagtactagcagtaaaacgtttctcttctggagtgccatactgcctatttacacaatttcaagtcgaatctgagagctgagggcagggactatgtttattctttaacagatacaaacagaagccagaacacaggcttcgcacccaccctgttctcagtatttgttgacaggctgcaatgaatacagatgtaagatttcctccaaatcaagcaattaacaaacatttatagcagtttataattgacaaagaatattcctatatattcacacttgcaaggaatgcaagaaaattcagttaaatccatgtgacatcagacaatgagatattagggaggaaaatgctgcatttagcaatatctcttcatatccacatctgaattaaccttaaaacctcagtccagttaccccaaatacctaaacacacatactctgtgcacgctctaatgaaggggcttctcccatcaaactatccacctggcctcaaagcaaaattctctgaagatgctgcttttgtcaaaaataataaagccagagtagcaacatttacaagtgaaacactgtaaactaaggtacacttaattaagacatttttcttctttgcttcaaagaagcatcaaaaacatcctctgtgttagaagcttgaaaagttcttaaaacgtagttagtctgactcacgtaactaacagtcatgccttctgtataacacctttagaactgttcttcatattagcaacaagaaagtggtggtggtagcagggagtctgaagcagcctacaaaataaataatacagactaaagcaaataagaaaaaacaaagcgtaagagaccaaaaaaaaaaaacaacaacaacaaaaaaccacacacacacacacacacacacacacacacacacacacacacacaagaggtctgctagatggtacactggctgttatctagaaactcatggaaaaccctgtacacagaaatttcctgaaagcaagagccatgtctcatcactcctaggagatcctaggaggctgggaaaaaccagcccttgatgagtttttgacattccaagatttctctcacactttccctcactttagtagagaaatcctaggaattgacagagaccttgccaatatgactggaaacaactaacggaacttctccaggatccagatgcttcatccagaaaagtgtgtcagggtgcgggggatggctagaacaacccgtaaataattgtgataagtaaagaattggcctttggttcttcttttttttttatatatttggttttttttaagagagtcttactctgttgcccaggctggaatgcaatggcaccatgacagtgacagttcactgcagtcttgtcttctcaggctcaggctatcttcccatctcagcctccagagtagctgggactacaggcatgtaccaccaagcccagctgcttattttttcatagagatggaggtctcattaggttgcccaggctggtctctaaactcctgggctcaagtaattctcttacttcggcctcccaaagcacagggattataggcatgaagtacagcacctagtctggtttttcttaatttgcatagctggaaaatatgacattaaactataatttattctctaagacacatagatccagtcattcattctttattcaacaacccattctacaagctgaacctctattctactattctattctttatagttttgtcctaagcaaaaacacttcagatttaagtataagttattaaaaagcatagtaaatttacagtcacaagtaatatgaatttaaaagagttctgggcatgaaattggaaatcaaatgcttaagttctgatgcaccaaaattaagtggaaactattgtggtgaaatcaccttccacctatatttaaaatattctgtacattcatacaggttgtttcaggaagagtttctaccaaaacaaacaaacaaacaaacaaacaaaacaccttaccttagccagtatttcaagttactagaaaattagtattttgataagtacttggcagaaagaaaatttcacttttggaggagacgataaagaagttgcttccttctaagtacaagagccatcttcatatacctgtaaagggatttgttcaatccaaattctaacaccatttcttccataaagccttctcaggccacaatggtcaaaagatatgttttctctaattctacatcctgccttgttctaatatgatgatagatcaaaattatggtgaaaaatgttgaactccacaaatcccccatggcatctagcaatgtaccttacacacaacaaacactaaaaaaaagtctttaaatgagtggcagggttattatggaagggaaatcaaaatcaacggcaattctcttccaacaaggagtttggactaataatttaagaattctggtaccaagtactaattcccaactttatggtcaaaataatttggtgtatacatgaagaagtgcacatttaacacagtaagatctgttcaaataacaggctttcagaagcactggctgcaggtaggttttatttgggtatttcaaataggcacacagaagggataagtgcaaagacagtagccaaaaatctgaaatcaatacactctccttcaaaaaaaggaagggttcagaaagggcagcatttccagcaataatcatgatgtctcccaggccaatggctactgtgcaaggcagagctcagtcttgcagagagctcctgctcacttacaggcaggagttccctgtcttcatttccctgtcacctgagtgctccctagctgagacttacctccctaccacagcagcaaaacacggctaactagaagacaaaactccaatattgtcactagtactgtatatcatccaggtatttacatagatgtttagatatattagagaaagcaaaagaatttcataagcccacccacttcaaaacacaccacagaatcacctcatcttcgaagccttcttcatcttattttaattgtttatacacctgcttccttcaccaggctttgggcctctgaatggtcagaccctgccttgctccccaccccagcaaagtatttgttttccaatttcaacatcaatgaatggttgtggagaaacataattttaatctataattttcaaagggaattattgtacctaaaaacagactgttatcctttaataactttaagtaaaattaatatccttctacaggctatgagcaatggagaaacttgccctggctctcctggaccagcaagtggcagaaattgggttacaacctaattttccaattaaggaatgagtgttgggttagcaattgcaggttttcattcgacatacatytgtacgttgctaccctgtgccaaacaacaagggacacaaaggcaagtacaactgacagaggaggaagacaacatgtggacaaacatgagcaggaagctaaaaacattcatgcctccattttgtctacaaggtaaaaacaaggtaagaggtgcagtgaaggttcaggatagccctgtagatgagaggaaggcaagtaagagattaaaaggacagctggctgggcatggtggctcacgcctgtaatcccagcactttgggaggatcgtttgagcccaggcctttgagaccagcctgggcaacagaaggagattctcagaaaaaccaaaaacaataaaacggacagctgaacagctctgatcatccaaactaggctgcagaccaggccataacacccgattatgaaactgctcctatcctcaaaggctcacaagtagcatcatcatatcgtgcaactcatctatggttctgggttagtggaatatttgcgggctggcacacaccatttgcctgctcctgtagttcacggatatgtcctatgaggagaaatggtacacatgccaggaaactcctatgattgaagccaatggctggatgtgatattcaagctagacctggactttcctaatctgcccaacttcatggacgggaagaacaaggtcacccagagcaatgccatcttgtgctacactgctggcaagcacatgtgtggtaagactgaaaagattcaagtggacattttagagaaccaagcaaccagtttctgcacacaactgatacagtgctgttacaactctgaccatgaaaaactgaaacctggccaggcgcagtggctcacgcctctaatcccagcactttgggaggcttctcttttctcgtggatcacaagttcaggggatcaagaccatcctggctaatacggcgaaaccccgtctctactraaaatacaaaaagttagctgggcgtggtggcgggcgcctgtagtctcagctactcaggaggctgaggcaggagaatagcttgaacccgggaggcggaggttgcagtgagccgagatcgcaccattgcactccagcctgggcracagagcaagactccatctcaaaaaaaaaaataaataaataaaataaataaaaaccaaccctgaaacctcagtacttggaacagctacctgaacaactgaaacaattctccatgttcctgggagaaattctcatggtttgcaggggaaagctcaccttygtggattttcccatctatgacgtcctggatcaaaagtgcatgtttgagcccaagtgcctggatgagttcccacatcttaaggctttcatgtgccgttgaggctttggagaaaattgctgcctacatgcagtctgactgcttcttgaagatgcctatcaacaacaagatggcccagtggggcaacaagcttttatgctgagctagaggcagacttgcactgctagttttgtttcatccgtcmctagggggcctccacwcttttttgttcttttaaataaacagcacttgggctaaaataaataaataaataaataaataagctatgctgtgcaattcccttctctgactctcagccccaagaaccatccagggatggtccagagaatgcaggatctgatcaatgatcaggagttcacagtgcaggggccagtacaggagtgctcagagtggtgtgctgtgaaatcaaggctggtcaggaagggaatgaagccctgagaggtaggatagccagagagaaaaagtatggtgtctcaaagagatcaaagaacaaacacagtcggaataaatgaatgaggaagttgaaagagtctggttctttttaaagaatttttaaaatttggatgtggaacaattccagacaatgataaagcccacaggattagtaaaggcaaatctgtgatgtgaacccaggcctgacttgaaagctcaggcactgaatagctgcctccaaagtcctcaatgaactgagggtagggggaatagggaggtgatcaggacagcacagaatacacgcctcaaagaaagggaggctttgcatgaggatgaaagtgtagcagttatggataccagcatcacctcagggacccagtagccatgcagctaaaaagctcctggagaaccacctagggtttgagtatgaaccacagtctgatcgtggtctcctcctctcacataactcagtagaaggcgtggctagggccatagagtctttctttgtgtaaggtttagggcaaccggaaacccaagtcccaatcctccttatgacagttagctccacaacaaccacactcagaattacattctcttttcctttctccttcctgttgtttcccacttgtgtcatacaacagagctacaatccccaacttacactgcccaccttcctgatgtgcaatcgcaactcccagaatacaggtagaggcattatgtatacaaagtgattctggacaagttgttatttcaccaagaatactgttccctttcctgctggactggataatttcaggtctcttccacctgtaggcattataatttttaagggggaaactttcttgttcctaagaccactgtaagcacagtacacaataaaccatcatcacagatgaaaaaggaacccctcagaggaggccactgtatgcgtgataagcttttactatgaaaagagaccttgaggacattttcaaaaagtgttaaaaggcactcaatcaatgccagctgaatgaaatttggtattataaacctaaggaaattaaaatttttaaattgcactggatctggcctcaaagtgaagggtcagacagcctcaaagatgcctgtgaaaggcagctattcatcacagaatgatctcttgcttatgtagctgacagatggatctttcacttaatgcccagaatataagacatcaaaaacgctcctccacttgctgaacaaggttataacctccccaggccctaatttcattaggattggagttctcaatacccacgcagggtgattagaatcacccaccaggtgattctaatgtgcagccagcaccccttatttaccactatccatatgcctggccctgttctaagcacttaccatgcatatactgattaaatcctcacaaccaccgtctgaggaaggtactgttaatctccattccacaaaggcacagacaagctagtgacttgcccagggtcacacaactcagtgtgcatccaggcagtcttgatccccagcctgaccatgcagtcagtctaccaggcctcctttcagttgaaaagaagagagaccagcccccagggagtggtgagagtcaaaggcaaagctgctcaacaggtggaaaagataaatcggctttggccaaacatacacacggctcacacacacttcactcctagagcagcatcccatgctgcaaatctatcctgaaaaaaacaaaaacacctgcctccactgagagacatctacagtacagtccctcgagttatcagttatttcaaactacagtgctgtccatgtgtgacctggaggcaccatgcaacagaacacatgccaaaatgagcaagctcttgagttcattagcccacagggggagaaccctgggaggtgggctacaatgccaatatggaggatttggggagacagacacctttgtgtcatacaaacaatgctgcccctattcctaacacttacccagaagttagcaactatggtattcatgaaaaacccggaaaactgcctcatttcttgtgaataaattgtataaagcttgttacacggtgacaggatgcagtgagaaatggcctgatgatctcaatgtctttctctgggcaattttatacagtctaataaatttagtgaggttttaaccttggatatcaagttctaaattaaaccaagatatgcctgcagtgatactgcagtggagagctgaatcaaattcatacaagccacacagcatcatctcttcccatagctaaagcaatgacatcagcatatgcatcactgcgctctcctctggaatttgtaaaggaaatcattcttggccataaacatttggttgcagtaagcagtctcacagaagcctgtgagaaagggcatatgggcaaggacaatagctttatttttttctcttttttttttttcccttaagctctgttggacttgaaggcttaattttttaattaactccaacagccccaaaaggggaataccagagctccagatgataaaagtcacagacaaggcatgctagaaaacaaaggccaaatatgttaagacttaaaaaaaaaaaaattcaggtttaatgttaacaaatctagtctcaaatgaggatgagaaagacacaagggtgccatatccaaggcatgaatctgtaaccttttaagttccatggatggcttcagcaatctgtaccctcagagtgtttttgaatgatttttaagtagacagtcttattacaaagaaaactaattatattgaaacacagatagcaaaatgttcaaaaagcaaacctgatacactaaagtatgcttaacrcataaataagacacagcagcaggttttataactactgcagtttttaaagcagcgatgggcataaatgtattttaaactatttccacaatatgatacaaaaatcagttaatttccatgtgacaaagttacatgtcctgttgatcttacatggttggttgcccactttcatgattgaagcaatggctatattttggctagaggttagtgaaaatacagttgagtttttctccacccattcaagttcacagatcccttgtcttagtccattttgtacttttgtcacagaatatcatggagatggtaatttataaacaatagaagtttgtttataaacttctatttggctcacagttctggaagctgggaagtccaagatcgaggggcccacttctggggagtgccttcttaccgcatcatcccataaaattcagaaaattaaacagtaacttactgattggcacacattagcaggagcgagtatgtcacatacacgccactgctagcaattaaaggcaagtcccatgattcattttcagaatagtctgtaaaagccctatttatcaagaatgtccatcaccaccaaattactatctacaaaaaccaggcctggcatgacaggagacagactctagatatttactgtgacagacaatgtacaaaaacaaaatgccacatttcatatttgagacaggtgtttttaatacacgctgttggttgtattgttttcttggtgctctcctcactctttttgaaagtatttgtgctctggaaactgccgtgtttcagttaactggatcaggcttcctaatgaatgtggtacccaaggcttggcctctcccgcccccactgcctcatacagtcacaggccattccccagctgtatgccctaaatcaggggatgcccataggaagataaatataattcagagtccaaaatacacggacttaaactgagccattgccaatttctcatggatcctgggtaaccgagatggtttttgttttcatggttaggaacagctgcaagagcgcaatactctttctagactaataaaataacctaagtctggctcagtatttcagctgtggcagcagccaaatttcccagaatggtgcaagcctcgtgcagttctggaagagctggggtggtagttctgaactaaactgaaggcatccaaacccaacccaacagcaaacacacacacacacacacacacacacacacacacacacaaacaccacttcaactaaattttgaattagagctaattcctatgggtggatatgacatgttatttgtaggggtcccataaaactaatcaaacctatgaagtttaagccttatacttgaaggtatgttacgcgccatgtatgaacatcagatgtttttcctctaaaacccagtgaaagattcaattaaagctcttagtaactctgcagtgaaacctttgatcactgattctgtcatcatttctcttagtatgaaacatctcagacctaaagaacaaaagtcactattgtgacgcagcacagaaaacacatgcacacatacatacacacagctttcttttcttggggaggaatagggagttgcagaagctactttttccacaatgagaacattctttatacactcttgtacatgtagcccagttaccaagttatttcctaaatgtaagtgtgtggtccaaatgtctcccactaaggaaaaacagcccaattagaacccagtggaaaacaagacacatgtttcttgaatggctttgaattagagacggtggatgtaaaattgttgtagatataatgaagatgttgcacagatgtactaagttttcatggtctcagcaaaacatcttcctggtacagcaaaatatgtcagtctgcaacaaagctggatataaaataatttttaaaatatctgattcttgtttttatgcagtaaaacttctcaagccaactctcttttgccttctcacaaacctaacaaagcccatatttcaatgtactgataattcactaaaaactataaaactgcattcatctccaattgacatcactttttataatcctcatatcataaatcaatacaaatggaagatttatcgatacaaatggaagacctttacttcacaaatccagcaaccaaccacaaaagcaatggcagaggtagagaaacttatttcacagacaacctcctgtttagtcctcacaaccaccaggtgggaactataattatcctcttttgacagataaggaaactgagacttagagaatctcagcagcctgctctaggtcacaccttagctcttaacacctcattccacttcttcctttgcaagaaaaacatgcactaaaaccatgccttggcaccctaagccttggatttccagataaaatgacattcaagaacaagtctctgttacacagcatggggcctaaagctaaatggcaaaactgcaacgctgttctgataacctggtttaatttaaaactatatcacaggctgggtgtggtggctcacacctgtaatcaacactttgggaggccaaggtaggagaatcacttgagtccaggagtgtgagtctttgtttctacaaaaaaaatttttttttaattagctgggagtggtggcacatgcctgtagtcacagtactttgcggggctgaggtgggctcatttgagcccaggtgttcgaggctgcaatgagctctaatcatgccattgcacttgagcctagataacagagtgaggctcttaaacaaaaaaaattatgtcactatgtattcctaagcattttgacttactcttctgaaagagaaacaaatgctgcactcccaagcacccaatcccatatcagtctattcttgggtctctttctctgtgctatcatccttggaaaaatgaccagaatacccacttcaactgctgcctgtatgcaggcaagtcacaaatctgtttctccattctttatctgtgctacag

SEQ ID NO: 93586 - DNA, 20726 bp, Homo sapiens
ggggaatttagaagtaataaaggccaggcatggtgaatcacacacactttgtgagcactttgggagccaaggcaggtggatcacttgaggtcaacagttagagaccagcctggccaacatgatgaaacaccctccctgcaaaaattagccgggcatgatggtgcatgcctgtaatcccagctactcaggagactaagacaggagaattggttgaaccagcaggcagaggttgcagtgagctgagatcaggccactgcactccagcttgggcgacagagggagactctgtctcaaaagaaaaaacaaacaaaaaaaacttccctagtatttaaagtcggcatctgattccaagcctctttcaacttttataagtaactaaaatgtctatacattctttttaaaaaaaaaaaaaattcaacaaacacttatttctcacacttctggaggctaggaagtccaagatcaaggtgcttatagattcagtgtctggtgggggctcacttcctgctttatgagctatgccttctcactgtggtttcacatggtagaaaggggtagggctttctctctggcctcccttacaaaggcaccaaccccattcctgagggctctgccctcacaacgtaaaatttctgtacattctatgccatgctgaagctcattttacaaccctaagctctcaccttaaggtccatacatgctcctaaggaaaatccaccacagcgcactcagtcctcccgtggaggcacctgctgcactctgctgcagtgttcttcctttctaataaactttccttttccaaacctatactgttgtcagtaagttctttcttttttgagacccctccccccaccccaagacatgccagtagtcccagctagttgggatgctgagacaggagatggcaccactgcactccagcctgggcaacagagcgagactcatctcaaaaaaaaaaaaaaaaggatcaaacagtactaaagaccctattataaaagtctttcactcacagtgtccctgaatctccccctccctcccacaaccactgtttacagagccttaaataaacagatgataatgtgttaccttgctcagtccctggcctggagtgctgtggtgccatctggactcactgcagccttgacctcccagactcaagcgagcctaccctctcaacctcctcagtagctgggaccacaggcacatgccatcatgctgggctaatctttgtattttttgtagagaaggaggggttttgccttgttgcccaggctggtcttggactcctagattcaagtgatctgcctgcctcaacctcttaggatcaggggccactgcaatgggctagacatttttttttttgagtcagggtcttactctgttgcctggcctggagtgcagtggtgtggtcatggctcactgcagcctcaaacccctgggttcaagccgtcctcctgtctcagcctcctgaggagctagctgggaccacaaacacaggccactgtgcccagatgatttttgtagagacagggtttctccatgttacccaggctggtctcgaactcctggacttaagcgctccacctgcctcggcctccctaagtgctgtgactacgggtgtgagccaccacatctagcacacctagtgcagtccttctggagagtgggccactcccagccccggagcagccttactcaagccctccctgatcagataggcagcctgacaagttgcactgcctggggaagagcagcaagaaccctgctctggaagttaagagttcccggttctagcccagagctgctttccttactagttattgatcttgccgaagtcatttcctgtctctggctctgtttcccaatctgtaaaattgttactggaaaggggtcccaatctagaccctaagaaaggtgagagagcgaacgggccccggagacaaaaagttcttatctgagcaatttagataaggagcaatctaaggagcaaagaccacatgttgaccatcaaacaggccatctggaggcaaaacttgtctggagaatttagaagtaatcccagcactttggaaggctgaggtagatggatcacttaaggtcaagagttcgagggagcggcagcggcggccaggcacggcgcgaggcgacgccacaggacagcggcggcagcaggaaatgcagcggcggccgcagcagcagcaaaacggatcggtggagaggcgccgccgccgccgggccgggcgtcgcgcrccgaggctcggggggagtcgtcgcagccgccgccaccgctaccgcagccgccgccgccgccgccgcccaggtgactgaggagagaggcacctcctcgctcccgccgccgccggacttcaatgcccagtccccagctcgccagcgtttttcgttggaatatacgttgcacatttatggcgattctgaatgtgagagcagatttctgccaggctgagcacagcgttttcgctgacaagtgagcttggaggttctatgtgccataattaacattgccttgaagacttctggacaccgagactggcctcagaaatagttggctatttatttatttatttatttatttattttgagacggcgtctcgctctgtcgcccaggctggagtgcagtggcgcgatctcagctcactgcaacctccgcttcctgggttcacgccattctcctgcctcagcctcctgagcagctgggaccacaggcgcccgccactacgcccggctaattttttgtatttttagtagagacggggtttcaccatgttagccaagatggtctcgatctcctgacctcgtgatccacccgccctggcctcccaaagtgctgggattacaggcgtgagccaccgcaccccggcagctttttttttttttttttttttttttttgagagagagtttccctctgtcgcccaggctagagtgcaatggcgcaatctcggctcactgcaagctctgcctcccgggttcaggccattctcctgcttcagcctcctgagcagctgggactacagacgcccgtcactgcgcccggctaattttttgtgtttttagtagagacggggtttcaccgtgttagccaggatggtctcgatttcctgacctcgtgatccgcccgcctcggcctcccaaagtgctgggattacaggcgtgagccaccgcgtccggccagctttttttttttaattgcaagcatatttctttgaatgactccagtaaaattaagcatcaagtaaacaagtggaaagtgacctacacttttaacttgtctcactagtgcctaaatgtagtaaaggctgcttcagttttgtatgtagttgggttttttggagtccgaaggtatccatctgcagaaattgaggcccaaattgaatttggattcaagtggattctaaatactttgcttatcttgaagagagaagcttcataaggaataaacaagttgaatagagaaaacactgattgataataggcattttcatggtctttttaatgttttctgttgttaaacatttcaagatttattgattttttttttcactttccccatcacactcacaggcacgctcacactttttatttgccgtaatgaaccgtctagcccctgtggagatctcctatgagaacatgtgttttctgataactcacaaccctaccaatgctactctcaacaagttcacagaggaacttaagaagtatggagtgacgacttcggtttgagtttgtgatgctacatatgataaagctccagttgaaaaagaaggaatccacgttctagattggccatttgatgatggagctccatcccctaatcagatagtagatgattggttaaacctgttaaacaccaaatttcgtgaagagccaggttgctgtgttgcagtgcattgcgttgtggaattgggaagggcacctgtgctggttgcacttgctttgattgaatgtggaatgaagtacgtagatgcagttcagtttataagacaaaaaagaaggggagtgttaaattccaaacagctgctttacttaagatgcgattacgcttcagagataccaatgggcattgctgtgttcagcagaaagaaatgtaaatgaaggctgacttgattgtggcatttagagggaactcctggtacctggaaatgtgaatctggactcttacctgtgtcatcaaagtagtgatggattcaatactcctcaaccactctcctaatgatcagaacaaaagcaaacaagaaatctctctataaaatgaataaaatgtttaagaaaaaaaaagagttcgagaccagcctggacaacatggtgaaatcccatccctacaaaggttaactgggcttggtggcacgtgcctgtaatcccagctactcaggagactgagacaggagaatggcttgaacctgggtggctgaggttcccgtgagctgagattaaaaaaaaaaatcatacttccctagtatctaaagttgatatctgattccaggcctctttcaactttttttgtttgtttgtttgtttttttgatatggagtctcgctctgtcatccaggctggaatgcaaatggcacgatcttggctcactgcaacttccacctccagcgttcaagcgattctcctgcctcagcttcccaagtagctgggactacaggcgtgtgccaccaagcctggctaactttttttcttttttttttttttgagagggagtcttgctctgtcccccaggctggagtgcagtggtgtgatcttggctcactgcaacctccgcctctccggttcacgccattctcctgccttagcctcccgagtagctgggagtacaggcgctcgccaacacgcccggctaattttttgtatttttagtagagatggagtttcaccgtgttagccaggagggtcttgatctcctgacctcgtatccgcccgtcttggcctcccaaagtgctgggattacaggcgtgagccaccgcgcccagcacctggctaacttttgtatttttagtacagacggggtttcactgtatgttggccaggctggtctcaaacccctgacttgaggtgatctgcaagcctcagcctcccagagtgctgggattacaggcgtaagccaccgctcctggcctaaggttggctatttttatggttatttcttgattatatgataaacaaggggtgggttagtaatgaatttttcagaaaaggggtggggatcccccccaactgaaggttcctccactgtttagaccatatagggtaacttctggacgttgccatggcatttgtaaactgcctggcgctgctaggagtgtctttagcatactaatgcattataattagcgtataatgagcagtgaggacgatcagaggtcaccttcctgtcttggttttggcaggttttgaccagtttctttgctgcattctgttttatcagcggggtcttgtgaccttttatcttgtgctgacctcctgtctcatcctgtgacgaaggcctaacctcctgggaattcagcccagcaggtctctgcctcattttacccagcccctgttcaagatggagtcgctctggttggaaacttctgacaaaatgacagctcctgttatgttgctgctgctgccgccaatggacagcctttaacgtgcccgccagccctgctccaccgccggcctgggctcacatggccccatccctcctcgaacctcctagcctgttagttactcaaatctgcaagctctctgccttctcagggccttcaataaatgcatttcttctgtctggaaggctcttcctttccctcttctagccaattcctattcatccctgagtttcagattaaaagtcacttcctttggaaaccttacttcgctacttcgctacttactgcactacttcgcagcatcacaactatgatggaaatccttacttacgttaaatatctggtttctaggtcacctccctgacggggacggtagggaccgtcttctcgttcatcagtagggaagtagctatggcagtgcctgatacaaaataaactccaaatgtgtatttattagatggttggatggaagttatttgcgtgtgaaagcgcgttttacccgaaggcgctctgtgagggccagcgggtccccttcgsccctggagccggggtcacacgctccccaccgcgtgcggtcacgagacgcccccaagggagtrtcctggtacccggaagccgcgactcctggccctgagcccgggcttagccttcgggtccacgtggccggagsccggcagctgattggacgcgggccgccccaccccctggccgtcgcgggacccgcaggactgagaccatggaggcggtggcggtggccgcggcggtgggggtccttctcctggccggggccgggggcgcggcaggcgacgaggcccgggaggcggcggccgtgcgggcgytcgtggcccggctgctggggccaggccccgcggccgactkmtccgtgtcggtggagcgcgctctggctgccaagccgggcttggacacctacagcctgggcrgcggcggcgcggcgcgcgtgcgggtgcgckgctccacggrcgtggcggccgccgcggggctgcaccgcyacctgcgcgacttctgtggctgccrcgtggcctggtccggctctcagctgcgcctgccgcggccactgycagccgtgccgggggagctgaccgaggccacgcccaacaggtaccgccccgaagcttccccgcgtccgcccgaggcgcttaccccctcccggagccgctgccacccaaatcgggaggctgagcggggagcgctggccggaaggcccagctgcgccgcctccagcagctgtgtggccttgagccagccactctgcctttcagagcctcggctggcccacctgaaaaacggaaagaagacgcctaccgtgcagtgttattgtgaggatttgcacgatgatgggcatagaatttgtggtgcacaattggtgatgagtgaattttcttgccttcctcccccaccttctctttgaacctgcggactgaggaaggacgcctccatcccccacccyacaggcctgtgttccagcgcctgccacactatggagtgatgtgttcacacagctgtcctcccctgcccatctgttagactgtgggggcagggattccccgttccaggaaaacaccgtgcagaggaggggctctggcagtgtggcatgaaagtggaatatgccacccaaatacccgccaggctagagggccctgggagagtgcaggggacgagtgcctcagaagcccagccccggtacctggtctcagctccacctggggtgggtcccagtgtgcagcagaagggccgagtttggagcccctcccctctcctctaggtgggggatgggggatttgttccagggccgtggaccctccagggtgggatgcgcccctgctcatgacactgcccgcaggtaccgctattaccagaatgtgtgcacgcaaagctrcwcyttcgtgtggtgggactgggcccgctgggagcgaragakagactgkatggcgctgaatggcatcaacctggcactggcctggagcggccaggaggccatctggcagcgggtgcgtgcccactgtcccttccccaccctcctctatggcgggagccaccstaggtgttttcacccgccccccagcatgggcgcagtgtctctctctagaagtgctttcarcgtgcacagtggcttgggcctcctaaaaactgaggcttccggccgggcgcggtggctcacgcctgtcatcccagcacttcgggaggcctaggcgggcggatcaggagttcaggagatcgagaccatcctggccaacattgtgaaaccccgtctctactaaaatacaaagaaatagcaacctgggcaacagagcgagactctgtctaaaaaaaaaaaaaaaaaaaactgaggcttccagtttgaggagtggggctccttcccccatctcccctatgcagccaatcacctggtcccttggatccaactcatgggcagctctagatctgcctccctggaagcttctgtgctgcaatggctgctccaggctctgcttaagctcttcacacagttgccctgcccttccatctggcactcttgctccatgaagccttctaaggccttcctsttgggggaaagcccctttgtgccccatctcctcacccatgcgacaaaggcaacacagtgaactcacctactcacaggtctctttcctctgggctgtgggctccttgatggcagcgttcggattttgtctcagtagccctagcrcccagcacaaagaagcaatgagtgaatggttgttgaatgaatgaatgaatgaatgaagatgaatatatttctatgtgtgggcccttcttcctcaggtgtacctggccttgggcctgacccaggcagagatcaatgagttctttactggtcctgccttcctggcctgggggygaatgggcaacctgcacacctgggatggccccctgcccccctcctggcacatcaagcagctttacctgcaggtaaaaggatggaaaagggaaggggcagaatcggtgatagatggtcatgggcccaggaagggtggtattaggccggccccagggctcttaactgaggcggggggctgcgtgtatcctgggagatgagggccttctcataggacagcagtggccatgctcaccacccttccttctgttcctccagcmccgggtcctggaccagatgcgctccttcggcatgaccccagtgctgcytgcattcgcggggcrtgttcccgaggctgtcaccaggtgaggttccgctcaccccctccacttagctcagagagggaattttattcccttctagaacatgacttaaaaacttaagctctgggccgggcgcagtggctcacgcctgtaatcccagcactttgggaggccgagttgggcggatcacctgaggtcaggagttcgagaccagcctggccaacatggtgaaaccctgtctctactaaaaatataaaaattagctgggcatggtggcacgcgcctgtaatcccatctacttaggaggctgagacaggagaattgcttaaacctgggaggcagacgttgcagtgagtcaagatcacgccattgcactccagcctgggtgacgagcgaaactctgtctcaaacaaacaaacaagctctggacgtaggcctgggtttgatttctgactctgctactaattagctgtgtgacttcgggcagatgacatgactgctctgtgcctcagtttccttacttgtaaaatgggatctctacccacttcgctgtagggtttgtaattatctctcgatctatctgtgactttgcacagagtgctagcaaatggcagcccytgggagtggcmgcaggggtgctccagtgtcccttgtccctcctgttcctctgtgcttcccagccatcctctcacatgtggttgggaaaagtcttcaaggctcacctgagacctcccctccttcaggaagccttgctagtgccccgcatgacctcctttgcacctgctaatgtctggctcccatactctcgtaggacttaatgcatgccagtggcctccctgcccgcctctttgcccccatcaccaggtggcaggaaactcactcattcattcaataaacttggtccagctgtctgaggctgccagaactggctgtgctgggtcctgggaggcggcaagaaaggtgcccaagggcttacccctgataggagagatatgttggctgaaggatacaatgtggggacaaggacaggaatatatgtgggttccgctctcctctgccgggagagaggggcaggaagggctcagggcagagcccagccttgaaaaatgagtgttgcttggacggacgcttggctaatgcttgtaatcctagcgttttgggaggctgaggcgtatggatcacctgcggtcaggagttaaagaccagcctggccaacatggcgaaaccccatctctactaaaagtacaaaaattagccaggcgtggtggcgggctcctgtaatcccagctactcggtaggctgaggcatgagaatctcttgaagccaggggccagagactgcagtgagccgagatcacaccacttcactccagcctgggtgacagagtgagactccgtctcaaaaaaaaaaaaaaaaaaaggaaagaaaattaaacacctcatgttctcactcatagtgggagttgaacaatgagaacaacatggacacaggaaggggaacatcacacaccggggcctttcgcggtgtgggggtcaaggggaggagtagcattgggacagatacttaatgcatgcggggctgaaaacctagatgatgggttgatgggtgcagcaaaccaccatggcacatgtatacctatgcaacaaacctgcatgttctgcacagaactgaactgaaagtataattaaaaaaaaaaaaaaaagctgggtgcggtggcccacacctgtaatcccagcactttgggaggccgagacgggcggatcacaaggtcagcagatcgagaccatcstggctaacacagtgaaactcagtctctactaaaaatacaaaaaattagccgggtgtggtggcgggcacctgtagtcccagctactagggaggctgaggcaggagaatggcatgaaccygggaggcagagcttgcagtgagctgagaatgcgccactgcactccagcctgggggacagagtgagactctgcctcaaaaaaaaaaaaaaaaagaaagaaaaaggagcgttgcttgtttcaggccacaggaaggggagagatagtgaaagtttttcagagaaggtggccagggaaggagaagaaaggactgtaggcagagagcatagcctgtacaaagccatagaggcaagagaaaccaggagctgtagagaagttggcaaggctgttgaacactatggtgaacactatggcggcttccatgaaatatctgagcttttgctccccactagggtgttccctcaggtcaatgtcacgaagatgggcagttggggccactttaactgttcctactcctkctccttccytctggctccggaagaccccatattccccatcatcrggagcctcttcctgygagagctgatcaaagagtttggcacagaccacatctrtggggccgacactytcaatgagatgcagccaccttcctcagagccctcctaccttgccgcagccaccactgccktctatkaggccatgactgcaggtacagtgcctgggtggggtgggagagccccccagaccctcaaaaagaagggagtagcagatgtcagtaggggtaggcagagggactggaataatgcctcgccataacacacagtacttyatagtttaccaagcacgtgtacacatgcgttgtctcagtgaatcccactgtggttgagaggtgagctctggaagccaacaacctgggtcacacctcgcgctcctatttcctggccgtgtgacttatgactcatgacctccttcccagtgtctcgtttgcttttcctgtaaactgggactacctcataggtagaataacgcctggcccagagcaaaggccactaagagctagctatgaacaaggattttgtttcatctctgcgtggttgctgaagtaggcactgcaggcaggaggtgagtggatgtgcctaaaggcactaagtgcgcatcctgctacaaaactgtgaagccagggctccttcctgccacttaaaggaggagtggagcagagggcgcccaagtcaggaatgacttagtggagaggcgtctgtgttggccaggaagggaacagatcagctcagcctttcttgagcagtactgctccaagtgtgacccaaaaccagcagcagcagcagcagcagcccgagctgtgagatggcaaattctcaggccctacccaagacctgaaggagaagctacattttttttttttttgagacagatttcactctgttgctgaggctggagcacagtggcacaatctcatctcactgcaaccttcrtctcctaggttcaagcgattctcctgcctcagcctcccgagtagctgggactataggcacccgccaccacgcccggcaatttttgtttgttttgagatagagtctckctctgtcacccaggctggagtgcagtggcacgatctcagttcactgcaacctctgcttcctgagttcaagcgattctcctgcctcagcctcctgagtagctgggattacaggcgccccccaaccacactcggctaatttttgtatttttagtagagacggggtttcgctatgtaggtcaagctggtttcaaactcctgacctcaaatgattcgcccacttcagcctcccaaagtgctgggattacaggtgtgagccaccttgcctggccaatttttgtatttttagtagaaacaggtttcaccatggtggccagactggtctcaaactcctgacctcaggtgaactgcccacctcagcctcccaaagtactggtattacaggcgtgatccactgcgactggccttgattttgtttttgagacagaatcttactctgtcgcccagactggagtgcagtggcacaatctcagctcactgcaacttctgcctcatgggttcaagtgattcttgtgcctctacctcccgagtagccgggattacaggcacctgccattacgctaggctaatttttgtatttttagtatagacagggtttccccacattggccaggctggtctggaactcctgggctcaagtgatccacctgcttcagcccctcagagtactgggattataggtgtgggccaccacgcccattcagaaacctccatgttttaaggagccctctgggtaactctcatgttcacccaagctgctgaaccctgtcytggagttttcagagggacgcgtatgtgccacagagcgtcccgctggtgggggtcatgggaagccatgacctgggatagacagtcgtctgtagagtggggtgaacattccctgggccctctgtttcatcactcctcttctctgttccccctacctcctgtccacagtggatactgaggctgtgtggctgctccaaggctggctcttccagcaccagcygcagttctgggggcccgcccagatcagggctgtgctgggagctgtgccccgtggccgcctcctggttctggacctgtttgctgagagccagcctgtgtatacccgcactgcctccttccagggccagcccttcatctrgtgcatgctgcacaactytggggraaaccrtggtctttttggagccctagaggctgtgaacggaggcccagaagctgcccgcctcttccccaactccaycatggtaggcacgggcatggcccccgagggcatcagccagaacraagtggtctrttccctcatggctgagctgggctggcgaaaggacccagtgccagatttggcagcckgggtgaccagctttgccgcccggyggtatggggtctcccacccggacgcaggggcagcgtgraggctactgctccggagtgkgtacaactgctccggggaggcctgcaggggccacaatcgtagcccgctggtcaggyggcyrtccctacagatgaataccagcatctggtacaaccgatmtgatgtgtttgaggcctggcggctgctgctcacatctgctccctccctggccaccagccccgccttccgctacgaccygckggacctcactyvgcaggcagtgcaggagctggtcagcttgtactatgaggaggcaagaagcgcctacctgagcaaggagctggcctcccygttgagggctggaggcgtcctggcctatgagctgctgccggcactggacgaggtgctggctrgtgacagccgcttcttsctgggcagctggctagagcaggccygagcagcggcagtcagtgaggccgaggccgatttctacgagcagaacagcyrctaccagctgaccttgtgsgrgccagaaggcaacatcctggactwtgccaacaagcagctggyggggttggtggccaactactacacccctyrctrgcsgcttttcctggaggcgckggttgacagtgtggcccagggcatccctttccaacagcaccagtttgacaaaaatgtcttccaactgragyaggccttcgttctcagcaagcagaggtaccccagccagccgcgaggagacactgtggacctggccaagaagatcttcctcaaatattaccccsgctgggtggccggctcttggtgatagattcgccaccactgggccttgttttccgctaattccagggcagattccagggcccagagctggacagacatcacaggataacccaggcctgggaggaggccccmcggcctgctggtggggtctgacctggggggattggagggaaatgacctgccctccmccmccmcccaaagtgtgggattaaagtactgttttctttccmcttaaactgatgagtcccctgggtctgtcaaaatgagaaggtcactgctgccacgcttgggaggactcagggctatagcatggccctggggtgggacctgttctcccatcccttgcctcacgtccctgtttttgtttgtttgtttgtttgtgacggagccttggtctgttgcccaggcttgagtacaatggcacagtctcggctcactgcaacctccgcctcctgggttcaagcaattcttgtgcctcagcctccccggtagctgggactataggcatgcaccaccacaccaggctaatttttttttttccaagatggagtcttgctctgtcgcccaggttggagtttagtggcaccatattggtttactgcaacctctgcctcccgggttcaagcaattctcctgcctcagtctaccagggagttaggactacgggcctgtgccatcacgcccggctaatttttgtatttttcatagagataaggtttcaccatgttggccaggctggtctttaactcctgaactcaagtgatccacctgcctcggccttccaaagtgctgggattacaggagtgagccaccgtgcccggccaygtctctctttttaacactaatgttaccctgacctttgaacgtagaatgcccttctgttgcaggaaaacctcttttcaaaccatgtttgtcctttgctggcatgccacagcaacagtcaccaacacagaagacttctgtgaccaaatatttggaggattttccccacacacaccaagcagcagacatcagctgggtgtcctccaattcagttccaatgtaatcaaccagagacagcatcagatcccacagggttagggtgcagatccatgagaccaccccctccttcccaacggttacaagtcctgatccctggaacttctgactaactggcttcaagttggagttcccatgacccccttcccctctttggagtcaactcatttgcgacagtgacccacgaaacacagggaaacccttattatgtttattgctttattacagaggaaaaaaatttttttctttcttttttgagacagggtctcactctgtcatccagaatgactgcagtggcaggatctggctccgtcacccaggctggagtgcagtggcatgatctcggctcactacagcctccatcccccccaaaccccacgcctcagcgccccaccccgcaagtggctgggactctaagcatacaccaccacacccagctaatttttttgtagtttttgcaaagacggggtctcattctgttgccctggctggtcttgaactcctgagctccagcaatccccttgtcttggcctcccaaagtgctgggattacaggcatcagccaccgtgcccaacctcaaaggatattttaaaggatagaaataaacagccatatgaagagatacagacagggcggtctggaagggcccagagcaggagcttctatctccatagagttggggttacatcaccctccaggcacatggatgagttcttcaccttctgtcagcctccacacgttcagctctcagaagcttcccgaaccctgtcctttgggccttttatggagaactccattggctgtccatgactgaagcatggacaactgtgataatgtgattgggcaaaaagggtctgatctaagcccagcaaggccagtccagattctttgggcctttgtgcagcattcctttctccagggtatggggcaaggacccactctggaatgaggatcctacaacccacaatcagattagagtcctgccttgggcagctgaaaagaggacaggagaaggtcaaagagaggaaaggctgttttttgaggcctgaggcgccccaacatgacaacgaaagactgtaaccatggtcatgtgagttatgagctaggaaccctggacgaaaccaacacatatacaatcatctcccacctcccaacacctttactttcacagcctctgcagcaaactgcggtcactataatcgctcctgtggcacagaggcatacccaggggaatctgcccagggggccactctgtgcccacatgggaacccacatctgcttgtaaagcctcccctccctctgaccagaaacgaggacagtttgttgttccaagcagtgggctcatgtctgttttggctcagaacagggtggggagagcgggccagggacccgcaggagggcttatccttgagattgcgtgggagacacaacaaggggtgggggcccgcaggcggggcggggcgaagcaggtgatatccagcccagagccccagcctctccccacagtctcaccatggcctgcaccgtggtgctcatcaccggctgttcctcaggtattggcctgcacttggcaatacatctggctttggacccatcccagagcttcaaaggtatagataggtagggacagggagggagagaagggaaaagcccttggaggccagaagagaagtcagatcttcctcctctcccaaaacctccagtgtatgccacgttgagggacctgaaaacacagggccggctgtgggaggcggcccgggccctggcatgccctcagggatccctggagaggttgcagctggatgtaaggaactcaagctccctggccgctgcccgggaacgcgtgaccgagggccgtgtggatgtgctgggtgagcctcctggaagcatatgggctcctaggagccttctccgccctgcgttgaaaccaacatgtccccaggcccctggagcatgaggggacaggccgtgctgagggtgatgctgaggcgggctggttgggcctctgtccccgcagtgtgtaacacaggcctgggcctgctggggccgctgggggaggacgccgtggcctctgtactggatgtgaatgtagtaggtactgtgcgggtgctgcaggacttcctgccagacatgaagcggccgggttcgggacgcgtgttggtgactgggagcatgggaggattgatgggtgagtggcagggaccgggccccggagctccagattctttgtgtgcagagctgagccttgaaggcaggctccttagggggtggggtgcaatcagcttggaggggcactgcctgccgggggatgaccccctggccgctgcgcctcaggaacctcatcttcccacccaagggctgcctttcaatgacgtttattgcgccagcaagttcgcgctcgaaggcttatgcgagagtctggcggttctgctgctgccctttggggtccagtgagtcaacacccccgtctcctcaaccctcttaactctgacctagagatgccgagcaccctgtcctgcggaagccgctctggtctctgcccggcttacatttgctgcgtgccaggcacttaggctggagcattggcacgcattgtgccacttgctgacctggctgctgaagtgttggtattgttatggggaagctccagccaagagaggttaggtgactggcccaaggtcatgcagcggccggggatcccgccaggttcgaattctgacaccagggctacctggcagcctcagatgggtttgggagggctgtcgagcaataacccgctattcaaatgttctggttatccccagcgctctttccaccttcgggacgcagcggtgctgttctgggtcgtggccagggccggggtcggggccggtgctggggcaggagatgggacttggcgcctgggtcgcctccgtccctgcccacttgcggctctcgggccagcagcgtgagcctgatcgagtgcggccctgtggacaccgccttcatgcagaaggtgttgggcggtcccgaccaggtgatggaccgcacgaacacccggaccttccgcctcttgcactaatacctccaccacagcaaggagatctaccgcgaggaggcgcagcaccctgaggaggtggtgaaggtgagcggggggcgggactccgggagcgggggcggtgcgtcgtcctgcgcgcagccggggccagagctcctctcccgccgccgcaggtcttcctcaccgctatgcgcgccccgaagccgaccctgcgctacttcacaaccaggcgcttcctgcaccagctgctgatgcgcctggacgacccctttggcttcgactacgccgccgccatgcaccgggacgtgttcgccgacgatcccgcagaggccgaggctggggccggggctggggccgaggccgggggcggggccggtgggatgggagaccctgagctcagcgatcctctggccgccccgcaagaaaggctccgtcagccactgtctcccgcgccctcctttgtctcctgggcctgtgcggtccctggggatgggacggcggtgacggctgtggatggctaattaagacagatcacgttagcccgttatatctgcgcggctaggcgcgatggctgtcgcctataatcccagagctttggaaggccgaggcaggaggatcgctccaggccaggagttccagaccagcctgagcaacatagtgagacaccccatctctaaaataaaaaaattagcacagtggcaccattccttgagctcaggagttggaggctgcagtgggcatgatcgagctactgctctccagcttgggcgatagagtgagacactgtcaattaattaatctaatcaaccaaccaacccaacaacccagaaaccaaggtccagaaagaagccagcccaggatcatgcctcaagtccacagtaaagcccagacacagtcactggatacccaaggggcatctgcaggacgagttaggtgggacttgggttggggtagagtcaggttgtgacctgcactccattagccatgagacctcaggcaagttccttgctttctctgagtgctttcctttcctttcccttttcttttcttttttgtttttcttttgttttgagatggagtttcactcttgttgcccagcctggagtgcaatagcgcggtctcagttcaccacaacctctgcctcccgggttcaagtgtagctaggattgcaggcatgtgccaccacgcccagctaattttgtgtttttagtagagacgaggtttctccatgttggtcagactggtcttggactcccgacctcaggtgatccgcccgccctggcctctcagagtgctgggattacaggcatgacccaccccatccggccctctgagtctttcttatctgtaaaatgggtataataatacctatctaatcggttttagtaatggtggagataatgcctgaaagtgctagtatagaggtttaatagccagcaaggactgttattagaatgaatagtaatatgactactgtcacattttgcaaatgtgtaaagaagaaagagggctaagtgaatcaaagggagacagccccactcaccctgttctgccccagaggactgagcgatccccaccatctggcaagctgcctcaccaggaggtccagctggggctacaggactggctactttgctacaatggcccgtctttcctgagcccagtggagggtcccaggggggcagaagtcattgataggggccagtagggttgtagagccactgtctgaacttctgtggaggtctggtgcaggggaggtgtgaacagataggaggctaggtgaggatgcagcagaggaagggggcaggagtgccccaggagggggcggtaccgaggcagggattcagctgggtctgagagggaggcaaggctgagggggatggccctttggagtgggcagggacatgaccacagaaagcctgggaagtggaaacagacaggagcctgctggagctcttggagctttgtgtggggcactaggggaaggaggcaggcactccaccctgacctgcccctacctctggatgagggtcttctctgcctgttggatgatgtgctgcccctgctcttggaggaagaggcctcccagccaccccctcctgccagtcgccctgacctgctgacccagacagatctgctatccctacagcatccaggaaggccacagggagggggcccaggtggcatgggtttctgaggcctgggatctgctctcagtcccgctctcgccaaccccctttgcccctctgtgacagtgtgtgtacatatgcgtgcatgtgtgtacctgtgtggtgtggctcacaaggtcacccctgggggtgggataataagaggtaaagtgtgaccccctctcttccgtacattca

SEQ ID NO: 93587 - DNA, 75708 bp, Homo sapiens
cagaggcaggcaaatcgcctgaggtcaggagtttgagactagcctgaccaacacggtgaaaccctgtctctactaaaaatacaaagattagccaggtgtagtggtgtgcacctgtaatcccagctactcgggaggtggaggttatggtgagccaagatcgcagccctgcactccagcctgggtgacagagcaagaccccatatcttaaaagaagaaaagaaaattttactaagtatatactgaataccaggtaccaaaataggcagtgagaatacaataagtgagatacgcagggtcccttctcttggagctttatgttctactgaaagttagatctctcctttgaacattgaatcaactagatcttttctattagaattttccgatgtattcattccacgtctccctttctttctcgaagtcactagaaacccaatatagaaacatttgccagattttccacttcagaaatctcgaactagtttctcactttcctggacaaatatttcaggtctagtgtcacagatgtttttcagccttgtgtcactcagccctttccctcattcccatcccaagatttctcatgttttccaaatttcatttccttaaaaagcctctgcatagcattcttaacttccacaagttaagaggctcactgcctcatgtgtctgtcacaggagtcatgagggttgcataaaataaaatgttacatgccttaggctcatttatatctccttgtccatgcaatcattagcagagcttccgaggaagtctcaaaatctattaggtttttactttttaccaaaaggcctttaatcttaaacactcacaggtttgaaagtaaaagcagaagtattttaaggaactcacagtgaagttgtaaaagggactacttctatggaaacaaactgctaatcaacaggtcacctaaaggttgtagcagtagaaatgtctcaatgaacgctcatatcagattcttggtagaacagttttaagaatcagaattcattttcacataaaaagaaaacttttaaaaatggaattctggttgcaaaaaggaaaacatagggcaggtgtggtggcttacgcctgtaatctcaggactttgggaggcagaggagggcaaatcacttgaggtcaggtgttagagaccagcctggccaacatggtgaaaccctgtctctactaaaaatacaaaaaaattatccgggcgtggtggcaggccctgtaatcccagctactcgggaggctgaggcaggataaatgcctgaacccaggaggcagaggttgtagtgagacgagactgcgccacggcactccagtctggatgacagagtgagactccgtctcaaaaaaaaaaaaaaaaaggaagaaaagaaaaaaaaattcatgtataacggggaacctgtgaaggtggcctcatttggaaataggatatttgcagatgtaatcaggttaagatgggatcatactggattaagtggtgccctaatctaatggctggtgcccctataagaagaggagaatttgcctacagacagagacacatagagaaggccgggtgcagtggctcactcctgtaatcccagcactttgggaggctgaggcgggtggatcacttgaggccaggagttcgagactagcctgagcagtatggcgaacccccgtctctactgaaaatacaaaaattagctgggcgtggcggtgcacacccgtaatcccagctactcaggaggctgaggcaggagaattgcttgaacctgggaggtggaggttgcagtgagctgagattgcgccactgcactcgtctgggcgacagagcaagactctatctcaaataaaaaaaaaaagacatatagaagaaagaataccatgtgacgatggaggcaacaattgaaatgatgcatctataagccaaggaacaccaaggatttctggcaaccaccagaagccaggaagagggaagaaaggattctttcccagagcctttggagataccatgctctgcagacaccttaatttcagacttctagcctccgctgtgagagaataaatttcggtgtttttgtttttttgagacagggcctcactgtgtcacccaggctgaaatgcagtggctcaatcacggctccctgcagcagcatcaacctccctggctcaggctcaagccatcctcccacttcagcctcctgagtagctgggtctacaggcacgtgccaccatgcccagctaatttttttttttttttttttttacagacgtgggtcttgctgtgttgtccaggctggtctcaaactcctgggctcaagccatccttctgccttggcctcccaaagtgctgggataacaggagtgagccaccgtgcatggccgatttctgttgttttttgtttttttgagacacagttttgctttttcatccaagctggagtgaggtggcgcaawcttggctcactgtagcctctgccccctgggttcaagtgattctcctgcctcagcctcccaagtagctgagactacaggcgcccaccaccatgtcttgctaatttttgtatttttagtagagatggggtttccccatgttggccaggctagtctcgaactcctgacctcaggtgacaggctggcctcggtctcccaaagtgctaggattacaggcgtgagccacctcggctgacctgatttctgttgttttaaatgctacccaggttgtggttatttgtatggcagccttagggaaacgaataytggaagcctgtggagaagacactggagcagatacgtatttcaaaacaccgggcttaacgttaaaactctcctctaggccccatctaggaatctaagtgggataagctaagatgagctagctgattcttcactggtggaaatttggacaattgacacgcattcattcaaactaaaaattaaagataaaaaaccacatttaataatttcactacagtgacaattcttgtaacattttgagactctatcagttagatccctacctctgttctattctttttgtggtagtgaagaactaatctttataactgtttttttttttttcagactcagttttgctcttattgcccaggttggagggcaatggcgcgatcttggccactgcaaccaccgcctcctgggttcaagtggttctcctgccttagcctcctgagtagctgggattataggcatgcaccaccatccccagctaattttttgtatttttagtagagatgagttttcaccatgttggccaggctggtctcaaactcccgacctcaggtaatccacccgcctcagccttccaaagtgctgggattacaggcgtgagccaccacacctggctttaattgttttttagccattttcacaaatgctagggaatagctcggtttagatactcggaactgtgtcactggccaagcctcatatggaattgctcatgtcttctagggctgtaggtgtggtcaacagcattttaaatttgatcttattggacatatgcctcagttttaccatatcatctgttatatggggataataatagtaactgcctcctaatgttgttgtgaggattaaatgagtttgtatttaccaagcatgtagaaaagtgcctggcacatagtaagtattaatcactgcactcctctctctcttgccatttgggaagtttctttctcactgaaccatgagctctccaaggataagaagcatgtctgtttcattttctatccccagcacctagtacccctctctggcacacagtaggccctcagcaagcatctgctgcctaaaaggcactatcaagcaggcagtatgaaattccatttctgagtcttgaagaaggaagtcaggtggaaaaacagataagagtcctacacataaacgtttaagcttgacaacacgcaagaccatcaaggaagacagcatggagggaaaataaatagaacactgaggaaagattgatggcaggagatggaagcaaacagaaaaggagttctgaaacaatattctttcaaagaagccgtgaaaagagttcaagggaattgaagtaagtccacaggaaaggctgtcttaaaagtggagtatgaaaaatttgtggttagcaagcagctgactgaggttaatttttttttaagtctcagaggaaggaaatgatattgtgtaacagttttctctaacttggcaggcttttaaatgtgggtcccgatctgtcttgccagaagggttgagagctagggagcagggagaaggagggtatgggtctctccaagactctgtgtcttaagaaggttgtattgaagtcaggttatatcttcactcacaatatgagacaataaattcaaataaaacgtccatttttgtccccttattttgtttaggctggtaaagcaggtttgatgatgtttttgtcaggttgacaaaattatcagcaacaagtttttatctggaatatctccctcattacacttgaatttcaacagggttccaccacccaggaagacagaataaccggttttctgagtttttcctgatacaattctggttatcacaaacgacttgagatccctactcttctttaaaagggcaagaaaagggaatcaatatcaatatttgataatggcatttaaaaaataatagacatcacttttgcgtttaaaaaatgtttttcaatatttaatttacaagttgagtacaagccataaaaaatgtttttaaaataaatttgaggaattgaaaactcctaagtggtcaattgagcccacatgaatctaccaaacaagactgaaatgtactttcacaacatatggtctgatgaggtttttcctgttaaacagagaaaaatagacccggggaagttgctggaaggcatgaaccatgtaccatttaaagagaggttttccatacttatgcaaatgagaccccgttaaagactctactacaggatctaaagctagccgctccccagtctggggctcaaatgttctcatctgtaaaataagggaaaagagaaagggtggtatatgtgtctgcgtattaattatttgagtgtgtgtgtgaattctttggatatgaaaataaagagagaagacattaattatttgggtgcgtatgtgtgaattaattctttggatatgaaaataaagagagggccgggcgcggtggctcacacctgtaatcccagcactttgggaggccgaggcgggtggaggccaggaccagtctgggcaacatggcgaaaccccatctctacaaaaaatacaaaaatagccgggtggcgtggtgcgtgcctgtaatctcagctactagggaggctgaggcaggagaatcccctgaacccgggaggcggaggctgcagtgagccgagaacgcgccactgcattcccgcctgggaaacagaccatctaaaaaaaaaaaaaaaaaaaaaaaaaaaggccgggcgtggtggctcacgcttgtaatcccaacactttgggaggccgaggcgggtggatcacgaggtcagaattcgagactcagcctggccaacatagtgaaaccccgtctctacttaaaaaaaaaaaaaatacaaaaattagccgggcatggtggtgcgtgcctgtagtcccagctacttgggaggctgaggcaggagaatcgcttgaacccgggaggtggaggttgcagtgggccgagatcacgccactgcactccagcctgagcaacagaatgagacttcaaaaaaaaaaaaagaaagagaaaagacaacctaccccagtataaggggtaagaaaaaggattcagggaggctcaggaacttaaggcctcgagcacctgcacctccagccccacccgctaaccctccccagcgtggagatacagcacaggggccaacatggcgtcagcacgctgggtctcgcctgcgacccccgtgactccgcactgctgcagcccgggcgaggccgcgccccattggccaactgcaatgaggtcattgcgggggcgggggccggcggcggcgcaggggcggggctttacggacgcaagcacgtcgaagcgctgctcctggagccgcggagggtgcgggtttggctgcggtggtttctgtggcggttgctgtggcggagtttggaggtgagtgggggctgtaggtttagcgcaacagggagcggccctcgatggacgtaggaaatccttctaagagcccccttgattgtcagaggaattagcggggatctgacgtcttcgagataaaatgggggttcgccccctccttgggcacccctcctctgccctgaggaaccggaggctcactgccctttggaagccccgcatctcttccctgctttaaggggtaggcggaggaaccggaggttattggataggcagaagaatttagggggcttcttaaagggtttctcagtttgggggttttcctctycttttttcccatctcaaggtagatgagcctgagtccagagaattcctgctcattgggtagacaggaaatgaagcaggtgaataccgtgggaggaggcgaggaccggatgacaggagtgagattcttctaggcagggcgcgggggcgctgtagttggactcatcttttgcagaattgctgtttcttcatattttgttttgtgatcgtccagaactactttggcctaattagttttctgttagcctccattgctatagagatattcttgggagacctataatcattaaagagcaggaggacggaggcgactcgttggaggcttatcattatccacagctcctgaactatgctgaccaggcctaattttatgtgtttagaggttgtagaatctctctttgtttaagggtggtgccggtaacagctgatttggatgattcagatgtacagaatcttaaagtcagcctgcatattctcttgagaagtccttgcttatgtctgagcktgtgttactgtcttgaacatcacatgcacaaaggtttgttcgttcagatttctcaaaatgtctcccagccttccagaagagtaaatcttcctttgatgtcagactcatctatcagtactcagtatagatgcccttatgacactaaaaatactgtgcatttttctgagtttggatactggacaggctgtgccttacattagctgatcgagaataaataattgcagtttcaggaccactgatagcgccagttgtctcatacccggcaacagtaagacagcactaaaacgaaacctttattggctcatgagatttgacagatggaagaatgtaattaatcttgaaggtagggttgagaaacagaaagctgcagaggtggaaggcttattctctgtggcttgataaaactgctttgtcattatcagtgtgttcctgtcatgcttgatttgaaattgagcttaatatgcaaactggttgctttttccagatgacggttatttgtttgaattcctaagtggggaaatattgttttctgaggaatctggaagattaaaccctttagtgtagccatagctttaggatagtgccagaactttgggcttttagaaatgcgcattgtcagtagaagggagaaggatagttacaaggcagacatctttatgagagggtattgaaggcctcttctgtttgtttcctgcactagcaaaaacagattgagcagtgtgaaactcactgcctcaatattgtgtcctgggtatttaaagagttgtttgaggttcccagttcctgtctttaatctggatacattcttatcwgttgagttgcccaaaataattgtcatttgatcctgatgttgactggaatggaagtgacttttcatctgacactctgtgggacagaattcaggaactgcctttgcaatttctcctttccatctttctagacagggtgtcaaaaacagttgttgacctgtcctcatggggtgttagaaatgtaaatgcaagagccgtagtggggtgtcatttgctcttagccctcgtggtaatttccaaagttatgtcattttctctttgcttcaggttggagagaaatccaggtactcactagactggtaccttctgccaccatgggggagcttttccggagtgaagaaatgacactggcccagctttttctacagtcagaggctgcttattgttgtgtcagtgaattaggagaacttggaaaggttcagtttcgtgacgtaagtagttgtggggctgcgacttgattactgctgaactctattgctatcgtggtcagatgccttatgatgratgttttgttttttatttgcaaaaataacattatagcactgacttcctattggcagaatgcacattttgagttgtctttctaaaggtgagaatgttttgtgccaatctttacatgcttttgctagctcccactttcagaacagtcctaagcattctccaggtaattgtttgggatgcagggagaggttaccaaactaacctgatcaaggctttcacttgctaaatagcaaggtatttaaaaaaatatattgcagtttttccatatagtaggacattttaaaaaaaataaaatttgaggtatccagctacagatatatagtatataaataagcatatactgaatattcattattttggaatattatactgggcacttggagaagctatctaaagaatatggacaatctagcctgggtacagtggctcacgcctataatcctaacactttgggaggctgaggcgggcggatcgggaggtcaggagtttgagatcagtctggccaacatggtgaaaccccgactctactaaaaatacaaaaaaaattagcatggtggcgcaggcctgtaatcccagccactcgggaggccgaggcaggagaatcgcctgaacctgggaggcggaggttgcagtgagccgagattgtgtgattgcacgcagcctgggcgacagagcaagactccgtctcaaacaacaacaacaacaacaaaaaacttgtcatccttaatttgcagttcttcatctggtcctatgttgtccctctgcttaacatctattggctctattcagccttcttttcttttacttatgctgtacttcagtcatacaaaaaaaagagataggggccaggtgcaatggctcacacctgaaatgccagtactttgagaggccaaggcaggaggatcgcttgagcccaggagttggagaccagtctgggcaacatagggagatcccgtctctgccaaaaaaaaaaaaaaaaaaaaaaatgccggatgtggtggcacatggctgtggtcccagctgcttgggaagctaaggtgggaggatcgctgaagcccaggaggtcgaggctgtagtgagctgtgattatgccactgcactccagcctgggtgacagagcatgacactgtctcaaaaccaaaaaaaaaaaaagaggtggggggagtattataatgaccacctatgtttctactatctgcttaagagggaaacattccgtgtataattgaaacctctgtttctctttgctccatgccagtcctttcttccaccccagaggtaacccgtacagtgatttgttttgcttttatttctcctatgtgtggtttttgttgttgttgttgttgcttttctttttgagacagagtccactctgtcgcccaggctggagtgcagtggtgtgatctcagctcattgcagcctccgcctcccaggttcaagcaattctcctgcctcagcctcctgagtagctgggactaaaggcatgcaccaccatgcccagctaatttttgtatttttagtagagacggggtttcaccacattggccaggctggtctcgaacttctgacctctggtgatccacccgcctcggcctcccaaagtgctgggattacaggcatgagccaccatacctggccaacagatatttcagtttcttctagttctgttaatttttttttaataataaaatttataacattaagaaaaaaaatagagatgggggtctcgccatgttacccaggttggtcttgaactcctggactcaagcggttctcctgcctcagcctcccaaagtgctaggattaccggtgtgagccactgtgcctggctgaaatgtacacatcttaagagtacaatttgctgaattgataactttatacacctctgtaaccagcaccccaatcaggatatggaactttttttttttttttttttttttttggagacagaatcttgctctgtcgcccaggctggagtgtagtggtgcgatcttggctcactgcaacctccgtctcctgggttcaagcaatcctccctcagcctcctgagtagctgggactacasgcgcwcattttagtagagatggagtttcaccatgttgcccaggctggtctcgaactcctgacctcaggtgatccatcccccctcagcctcccaaagtgctaggattacagacgtgagccaccaggcccagactgaacattttcatcagtccagaaaagtatctgtgtctactgctagtcagttgctacccttcataggtaacctctgttttgattgctgtcatcataggattagttttccctgttcttgaattatatgtaaacgactcatacattgcaaactcatgtctgacttctttcactcagcctctgtttcttgcatgtatccgtagttcatttttaaaaattgccgaacggtaagtagttcattgtatgattacaccacagtgttttcatcctttcttttgtcattactcttttggggctattatgattaaagctgaagtaaacattatcataaaagtcttttttttagtttacaagttttgatttttcttaagcaaatacagttgatccttgaaaatgcaggggttaggggtgccaatctccccatgcagtcaaaaatctgcatacaattttgactcctccaaaacttaactattgatagcctgcttttgaccagaagccctaccaatttcataaacagtcgattaatacatattttgtatgttayatgtattgtacactgtattcttacaataaagtaagctagagaaaagaaaatactgttaagaaaatcataaggaagataaactgtatttactgaaagtggatcatcttgaaggtcttcatccttattgtctttatgttgaggaggctgaggaggaggaaggggaggggttggtcttactgtctcaggctggccgaggtggaggaaaatctgtgtgttagtggaccagcagagttcaaacccacattgttcaaaggtcaacagtaactgagtagtggaatgctcagtcatgggttgggtaggtgtatgtttaactttgtaagaaactgccaacagttttccacatcttttacttcctttttaatagcatttatcacaacaaattgtaataattggtttgtgtccgtctcttctgtagagctgaagactgggacgtagcttattattaatcttaattgctaataaaaatttttgccttagattcctctaatattaatatattgagttctcgaagagagaagtgttgaatacatggatatgtatgtgtgtgtttgtatttttttttttcttttttttgagactgagtctagttctgtcacccaggctggagtgcagtggcacgatctcggctcattgcaacctccgcctcccgggttcaagcaattcttctgcctcagccttccaagtagctgggattacaggtgcccgctgccactcccggctaatttttttgtattttcagtagagacggggtttcactgtgttggccgggctggtctcgaactcctgacctcatgaactgcccgccttggtctcccaaagtgctgggattacaagcgtgagccaccgtgcccggccaatgtgcttgtatgtttctatgtgtgtatgcatataatatatatacacacatacgtgattaagctaataaattgtgttgttcagcttttcaaagctaggacatagcttattctttgtattttccccagtgcctagttcagtatctgacacctatttggtgcttcataaatgttgagtaaatatagttctttatttgtgttaattttatggaatttatcacatactattttattggttgggttcatcttcttctctattagattgcaagctttttatttaatttaattaatttattattattattttttgagacagagtctcgcgctgttgcccaggctggagtgcaatggcacgatcttggctcactgcaacctctccctcccaggttcaattgattcttgtgcctcagcctcctgagtagctgggattacaggcatgtaccatcatgcccggctaattttttgtatttttagttgagacagggtttcgccatgttgtccaggctggtctcaaactcctgagctcagataatcctcctgcctcagcttcccaaagtgctaggattataggcgtgagccaccgcatccggcctatttatttttttgagacaagagtctcactcttgtcacccaggctggagtgcagtggcatgattttggctcactgcaacctcagcttcccgggttcaagcgattcttctgccttggcctcccgagtagctgggattacagatgtacactaccatgcccggctaattttgtatttttagtagagatggagtttcgccatgttggccaggctggtcttgaactcctgacctcaggtgatccacccaccttggcctcccaaaatgctgggattacaagcgtgagccaccgtgaccggccagattgctagctttttagtgagtagttacttgttttgtttttatttgtatattccagaacatctgtcatattgctttgaaaattacttatggtgccagacgtggtggctcatgcctgcaatcccagcactttgggaggccgaggtgggtggatcacctgaggtcaggagtttgagaccatcctggccaacatggtgaaaccctgtctctactaaaaatgcaagaaaattagctgggcatggtggtgcgcacctgtaatcccagctactcaagaggctgaggcgggagaattgcttgaacctgggaggcagaggttgcagtgagccaagatcacgccactgcactccagcctggtgacagagcaagactctgtctcaaaaagaaaaaaagcaattacttgtggtgtatgaatgaataaactaaagcctgtcactgagaaggtgaaggccttgggacagaaaaacaagagaagttcctcttgtgcttggaaagaaagaaggaaaaccagagagagcttctgtgatattcattgcccaaattttaggtggtgggaaggaagctcactgagacttttgcctaggaagaacatttttgtaccgttgtgttttacctaatttgcctccattccagtaatgttgcagcaaygagggaggaagtttttatccttagctggtgtgactggccataaagcagtttttttggatcagtagacagttttgattagtgttgcatcatgcattgacagaaaattagtttttcgctttgcagaatgtgttgcttgagaaacagaagaaatagatacaatatttcaatgtttggtattgtgtttttatttttcagttaaatccagatgtgaatgttttccaacggaaatttgtgaatgaagttagaagatgtgaagaaatggatcgaaagcttcgtatgtgcactttggtcttgtgtartgttcctttaatgaatcatttgtcttagattagtgacattagtcctcttaatagaggaagaaaatgttataagagaaaagggaaaaatcttgcagttaagatgccaaggtgtatttctcgtatacgagtagattttgtggtctttgggctaagtagtgcttaatggaaacctcgtttgaaataacatgctgcaaactgaaaactggttgtttttttgtgagattttaataacaaaactacatgatagaattttgagaaataggacccagcacaccatcagtttttgtcagcagagccaccttttaatttgagctatttaagagggaagaaactggctgggcccggtggctcacacctgtaatcccagcactttgggaggctgaggcgggtggatcacgaggtcaggagatcgagaccatcctggctaacatggtaaaaccccgtctctactaaaaatacaaaaaattagctgggcgtggtggcaggcgcctgtaatcccagctactggggaggctgaggctggagaatggcatggacccgggaggcagagcttgcagtgagctgagatcgcaccactgcactccagcctgggcgacagagcgagactccgtctcaaaaaaaaaaaagggaggaaactaacatttatctaagttctcttgagggctaggttgctcatatacattactttattcattctccacaacattccttcaagatgggtattatcttatttaataattgaggaaactaaagattagagaggcttaatgacttgccctagatcataaacagttatgatggaatcagtatttgaagccaggttgctctctctggctcaaaagtccatgatcttgccactctactaagccagcttatggttagctgataagtgaatttggtccccactataaaaaacagttgtagttgttacctgaaacactcttctcttctggtattttgtgtccttattacctgttctgctttttcatttttgttttttatgcttaaaactgacctgattgttttcaaatttaatgaacccctttagatctagagttgtctcactagtgtgttaagtgtcaaatattctattgcattatactcttcttcataactctgctttgccaataatatctataagcagaactgtcatactttggagtggcattcgcgtatggaggagaggtgtggccttgaaggccagtgttaagacctgaagaaggaaagaaggcagttgtgggatgaccaccctttggagtaactttagaraatgtgaggaaggagaaagagggatggggagaaaaaaggtgcttctttcatattaaaagatattatatcttttatatatatatataaagtatcttttttgaataaaactttttgtagccaggtcttagatgttaattcttttccttaaataatggcaattacgagcatgtgcagttagacatgaatgttttgattctgtcattttaggatttgttgagaaagagataagaaaagctaacattccgattatggacaccggtgaaaacccagaggttcccttcccccgggacatgattgacttagaggtaaacacttctgggaaaaccagaaaagtttctttctacttgaacgcagaaattactttcctgagcagatagagagtaaagtaattcttgctaactttgtcagcattatctactgattgtaagtttcttgtaggtgggattttgatagataatatttgtacacatttatggtgtacatgtgatattttggtatatacatagaatgtgtatataccaagtcagggtatttggagtatccatcaccttgagtatttaccatttctatgtgttgggaacatttcaattcttctcttctagctattttgaaatatatacagtacattgctgttaactataggcaccctactctgctattgagcattagaacttatgccttctatctaactgtatgtttgtccacattaaccaacctctcttcatccccccacaaacccacacacccttcatagcctctggtatctatcattccactccctacctctatgagatcaacttttttagctcccacatatgagtgaaaacttgtattatttgtctgtgccctgcttatttcgcttaacataatgacctccagttctatccatgttgctgcaaatgacatgattttattctttttttatggccagaccatatgaatcccctcttttatggtgacaaacagcactcaaacagtattatatgccactaagtaaatgtttattggtttatcgaaaccttattggagtaagttatctactattttattttattttattttatttttgagacatagctatcacctaggctggactacagtgaccccatcttggctcactgcaacccctgcctcccaggctcaagcagttctagtacctcagcctccagagtagctgagacgatagctgtgtgccaacatgcctggctaatttttttgtattttttgtagagatgggattttcccatgttggccagcttgatctcgaactcctaacctcaagcaatctgcctgcctcagcctcccaaagtactgggattacaggtgtgagctaccacacctggcctatctactagttggttaatcttgcaatcttgcagactaaatgggcagccagtagacttctcagtaattattttatccatctgaaatcgcctgagaaagttaccaagtatacaatagaatgtgtaaacaaagaaagactatttttttgacttctacaatgacttagaaaggaaagacttttttttttttttttttttttttccagacagagtcttgctctctcacccagcctggagtgcagtggtgcgatcttggctcactgcaacctccgcctcccgggttcaagccattctcctgcctcagcctcccaggtagctgggattacaggcatgcaccactgcacccagctaatttttttttgtatttttagtagagacggggtttcgccatgtttggccaggctggtcttgaactcctgacctcagatgagccacccacctcagactccctaagtgctgggattacaggagtgagtcaccatgcccggccaggaaagactatttatttatttatgagatggagttttgctcttgttgcccaggctgaagtacagtggtgtgatcttggcttactgcaacctccacctcccgggttcaagtgattctcctgcttcagcctcccaagtagctgggactacagtcatgcgccagcacgcccagctaattttgtatttttagtagagacgtggtttcaccattttggtcaggctggtctcgaactcctgacctcaagtgatccacccgcctcggcccaggagagattattttaagcaaaaaaatttccataaagaaaattgctctagtaaaatcacagtatttgctaggcaagtccaagttctctttgaactatcggcttggcaacagttctgtgggatgaattcatttaatgtctttcagagcaaacatattgagcttagcttaatatattttcttatttcatctaggccaattttgagaagattgaaaatgaactgaaggaaatcaacacaaaccaggaagctctgaagagaaacttcctggaactgaccgaattaaaatttatacttcgcaaaactcagcaattttttgatgaggtcagactattgtttcttttagtatttgagcagctgatattatactcacacaagtgggccatatttttattccagtaattattttaatttgctagtttggaagcaatgccatttttgcaccctgttttagttacagaaatgtgagattatgttccatttttcatgcagtacacaaccagccatggttttgcattttttcacattttcttcaatttttcatctcaatatgaggaaaagaaccctgaagtagttgtataaacatagttagtataaatttttacaytatatttatacttataaggtaagtatatgcttaaggttaaagctgaggaagcaaacatttggttatagacaaaattataacaaaggtttaatcaccaaaccttttgtcatcaaatttttatttcattgtctatgtttgcttataaaccttcgagcacatttttcagtacttcagatagcacacatcacactaatttttcaagagtttttcattgtatttattgtatggaaaatattggtaggatgcttgtttgaaacttctggattatcacataaacttagacgcattacctcagagggaaaaatgttagtaaagttcttgggttaaatatgtaggtgaggccaggcatggtggctcatgcgtgtagtccctgcactttgggaggccgaggcrggtggatcacctgaggtcaggagttcgagatcagcctggccaacatggtgaaacccggtctctactaaaaatacaaaaactagccgggtgaggtggtggttgcctgtaatcccagctactcgagaggctgaggcaggaaaatcatttgaacctgggaggtggacgttgcattgagctgagattgctccactgcactccagcctgggcgacagagtgagactctatctcaaaaaaaaaaaatgtaggctgggcgcggtggctcatgcctgtaatcccagcactttgggagtccgaggtgggcggatcacgaggtcaggagatcaagaccatcttggctaacacggtgaaaccccgtctctgctaaaaaaatacaaaaaattagccgggcatggtggtgggcacctgtagtcccagctaatcaggaggctgaggcaggagaatggcgtgaacccgggaggcggagcttatagtgagccgagatcgcgccactgcactccagcctgggcgacagagcaagactctgtctcaaaaaaaaaaaaaaaaaatgtaggtgacttggttgggcatggtggctcacacctgtaatcccagtactttgggagggtgaagtgggcagatcacttgagcccaggagttcaggatcagcctgggcaacatggtgaaaccccgtctccacaaaaaatacaaaaattagacaggcatcgtggtgcacacctgtagttccagctactcgggaggctgaagtgaggggattgcttgagcccaggaggcagaggttgcagtgagcggagattaagccactttactccagcctgggggacagagcaagactgtctcaaaaaaaaaatgtaggtgacttagtccaggtgacaatgtgctgaggtgactccatggaaaggatctggagcaaggcttccagaatgctcccttctcctaactcagtctggggaggagtcttagctttcaacttggatgtggtttttctgatggcctaaagtacagtaactgtcttcttgacaggtgtctttgccaccagattgacaatattagacactttagggattgttacagtcactgttcaatgtgccttcccataaagttctttcattcctttgctcaacaagaaaacttggcaaagcttttaaatatagaggcccttttttttttttttttttcccgagacaaagtctcactgtgttgcccaggctggagtgcagtggagtaatcttagctcactgcaacctccacctcccaagctcaagcaattctcctgcctcagcctcccgagtagctgggattacaggtgctcaccaccacccccagctaatttttgtattttcagtagagacagcgtttcaccatgttggccaggctggtctcgaacctctagcctcaagtgatccatccacctctgtctcccaaagtgctgggattacaggtgtgagccactgtgcctggtagagtcccattttagttagcatctgctgtgttctcagttgtactttaaatttatatatatagtttttatttttattttttattgtttttaggccgggcgcggtggctaacgcctataatcccagcactttgggaggccgaggcagggggatcacgaggtcaggagttcaagaccagcctgaccaacatggtgaaaccccgtctctactaaaaatacaaaaattagccaggcatggtggcgggcgcctataatcccagctattcatgaggctgaggcaggagaatygcttgaaccggggaggcggaggttgtagtgagctgagatcgcaccactgcactctagcctgggcgaaagagcgagactccatctcaaaaaaaaaaattgtttttaactgcctcatctcagaaatttttctcttttgaggggagatcaaatatccagaattctctagactggagcaggggtttttcaaacaacagcagcagactcacctgtaatcttgtcagaagtatgaattatcagtctccaccctagacttactgaatcagacactgtgggagttaggcctagcagtctgtatttactaggtgatccggaggcatgctagtttgaaaactgctgggctagagaaggtctgctgaggatgtgatacattcctcactaatttaaggatttgactcagaagccatttaattaaaaggatctgctgggtcaagggaaaggggaaaaactcatatgaatttaattgcctggtcctttcaagagtcagaaggtacaaatatttatttagtttgctcacagagtcgagaattttgagactagtggtaacttctttcgccagtccctaatgacatcacgttagagggtgtgggacagtgtgattaactctaagtgtttaaggtcttttgcaataggcatcgccacttaagctgtatgtttttaatgaacctggaattcsagcatgctcactgcccagacgttattgtatttttgttcactaattcactgagcatataatgagcacctacttattgtgagacacaagatgagtaagacatggtccctgtgtttaaggaatgtatcattcagtcttaagaaataccccagaacatgacgctttcatatgctcacagatgtgtgcttttctaaacatatccaagctgctacccacagatctgatgtaaacctggccttgtagtcagagctcagctaccttttagcattatttggagcttaattcttttaccttccctgtccccatttttttcccttttgatatactgtttagtttactgctgagatattgctatctcatatgaaaatgtctttcaagacctcgtaagtttaagaatgagagccagcttcctattatggttcatttttggagaaattccgaataaagactgatagatggattcccttaagggaaataattatttaaactattaattttctaatgaaaagaacttagtaaaaatgaaaataagaggaaccacttggaaaaatgatattttaaaatcataatttatggatttaggacttttattttgtgaataataagtctaaacactaaatgcctgttttgagaaggcagactctaagtcttcatgatctttgtgcccttttcatgctggggttgttttccctctcctattttttttttttttgagacagagtctcgctttgtcatccaggctggagtgcagtggtgcgatcttggctcactgcaactgccgcctcccgggttcaagcgattctcctgcctcagcctcccgagcagctgtgactataggtgtgtaccaccatgcccagctaatttttgtagttttagtagagacgggygtttcaccatattggccaggctggtctcgaactctgacctcgtgatctagctgcctcagcctcccaaagtgctggaattacaggtgtgagccaccgcacccagcctccccctcctattttattcaaaactttttttttttttccagtctctggaagtacttagagcacaagaccgtggctatgagaggttcttatgctgcttttgtcatcaattccccttccattcccagcagtctcactgcattgcaagtctcctggcaagaacctctctgccttgcctgttcttgcactagctcacagcctcagccaggttcctttccatagaccttgccctgctgctgcgtagcagcaggctcaggtgtcactgccacaactttgcatctgcacatgcgcgtgcacttcaaataatgcgaaagataggacacttgggaccctcaaatgttggaaacttaggatttttaatgagattttcttctgtgtctgaaattataatatttgcaaagggcctaaaacactaccagttttaaaccccttattttgtgtaatttggtgactataatcaataattcacagtaatgagttagcagaaatggctaaatcagaaaatgattctatatttaggcataggagttatgattggcagggtgtgtgtaaggtgaaaaataaacatattgaatagtcttatgattaaagatgattacaaatttgacttagtcatttcttatctagggcatttaaaatgacttgttaatgattatccttttctaagtcttcttgcttatgaagaactgtaagagctggagagatttctctgcatcttttaccataagcaccataacatatgagaacataaagaagactggaaaagtaatggttaatggcatgcagattccctgctttcctttccttctcagttttccatccatctgctttctttatttttttcccatctgccatttcctttggggcctaggtgaataccttaagtaatgaaatataatttttttctcgatgtagatggcagtaattgtttgttcttggtaattgacatagcttgaactggatgtgctatttatacttaattgctgtagaaacagaactgaagttcttctacttcctttttgtaaggcgtggttttcagtatctgaatggagaaaccagagggcatagcagtaatgtagaggcatattcacaatgttgttattagagaacccagatacccttaagacaagcttgtccagcccatggccttcaggcctcaggacagctttgaatgtggcccaacacaaattcgtaaactttctcaaaacattatgagatttttttggaatttttttttttagctcattagttatcattatagtgtattttatgtgtggcccaagacagttcttcttccaatgtggcccagggaagccaaaagatcagacacccctgctctaagatttagatactttcaaccacatggttttagatactgctttaaaggccttcagttagtgagtggttctagtcatcctagtttctcaccaggcacaattttacttaaaaatttgtaacttttctctctaagatagaattcttaagtatgaagtggtgaaattagcaattcaaatattatcgcaagtttctgttgaattttaattttgttgttttttattctcagagagtcctagatagagtctttgaagtggtctagttgctaagtactgtttgcttttccatcagttagagcacatgtgtttgcattgagtccgatatttagggttgacttaaaccacgtcttgtgagacaggcaggcaagtaggatggagtcttgtgagtagtcaggctcactggtttttgccaagggataaaccaagaacaagttgaaatgttgtaatcatcgggatcctgaaaacaagttgcttgtagtcagctgatttgattgcaagtagaaaccgaaagaaccccctcaacttacatgtaacagccagtggtaactagtgtctccatgatctcatcttaaacttttccaatctcatgacagtatttctctgcacttctggtgttgatccttacttcccaaaatgattgctttctattttttaggccttcagacttatcatctggtttatacacagtttttccccctttttgctatgtttatgatcccatgactttatcaagttatggtccctgtgccactttttaagagtgtggctgacaggggtagaatcaaattgaaatttggaatgaaaatgatagagaaaaactcttctgattttttgtcttattgtgcttttgaagaggatgattgttctggtttactcctagtttttggtcaaacaagtattgcctgggtattagagttggggagatgaggcaatggagaagttgattggactggtttttgttttgttttgttttgttttgttttttggagcagcttctcctttctgatgggagtaaagggtggtaggatgagttcggtagagagaggctaggaaatgtagacctgcgtgtgggaagatccttcttcatttcattgtataaactgtcatggtggaagtcattttaaatcttaccaattaaaccagcccatgaactctagtttggtttattatctgttgtttttccttcactttacttgattcttgagctgtgttctcaagaatcctacaactgtaaagcctatgtgaacttatttagaagattcctagtcagaaaatgggacattcagatatgtttttacaggcctgcccagctattgtgcttcttatccttttgaagacataaatactctttaaatcccatggcttggatcattctataagtggccatgctgaaagttctcatattctgaattttaaaggggctggaaacgtagatacctggagcttccccttctgtctttctccagacttcacagcattcaaagacagtggcagtgccttgcttcttccttggaaagagagcctctatctttcacattctcacgtagggaaaattctagtttgtagctgcctagaaattaaatgttcagagtatctgcagagtctcttcattattgcacagaaagaagagatattttagcttcctatctacatgcagaggtatttcctggcactttcatcattcattcagggaaacgtaggagagaaaatggcttccaccaagtaacagatttatacatgtcaccatcacttaattttttttccttttgctccttatttctaaaaccatttccccagatgctttactggggcaattatgctttctttacctcaaatttattttctgtgttttcatcccctattcttcttgtctttttatggatatatcttgtcttttcgtggtttgttttctttttcatccttattttctgarcctgtctcctggttcctcgttgcctgcatgccactaactattttcattagatattaattgatttgtgaattcaggctgaattgcatcatcagcagatggcggatccagacttgttggaagagtcctcatccctcttggagccaagtgagatgggaagaggcactcctttaagacttgggtaagtgccatgtcaacttttcggtattcagtggggccatgttcatctcttctgttcagaagagcagtgagactggggattcacttgctaccaggatatgccctcttctgagcctattgagatagtcctacaactctggattcatgcctgagttgctctgtcagctctctgctgggtccataagtgaagctgggaataagacttgtattaaaccaacccaaatgtccatcaatgatagactggattaagaaagtgtggcacatatacacaatggaatactatgtagccataaaaaatgatgagttcctgtcctttgtagggacatggatgaagctggaaaccatcattctcagcaaactatcacaaggacaaaaaaccaaacaccacatgttctcactcataggtggaaattgaacaatgagaacacttggacacaggaaggggaacatcacacaccggggcctgttgtggggtggggggaggggggagggagagcattaggagatatacctaatgtaaatgacgagttaatgggtgcagcacaccaacatggcacatgtatacatatgtaatgaacctgcacgttgtgcacatgtaccctagaacttaaagtataataaaaaaagatatatatataaatataaataaaaaagacttgtattaaaaccttccatcccatgacatggaatagagtttccaatctgcctcttctccccacagcttcgtggctggtgtcattaaccgggagcgcatccctacttttgagcgcatgctttggcgggtatgccggggaaatgtgttcctgcgacaggctgaaatcgagaaccccctggaggatcctgtgactgtaagacaaggagattgcatcctgtggagtaggtcttgtaaagggagcccagagcagtaacgtagcatggggccacctgaatccagtgcttccacagaggagccattatctttatctctgctctaattggagaatttgaagtacttcctcttagttaattcctgtcatatatacatatggatgtatgatgtatacatgacatatacatattttcaagtttacccgtgtagatgttattctgattggaaatttttattttcactcatttgccttttatgaaaattaactttaaagcaagacatctggttccaaatttggtaatttttttttttttgaggtggagtctcactctgttgtccaggctagagtgcagtggcgcgatctcggctcaccacaacctccgcttcctgggttcaagcgattctcctgcctcagcctcccgagtagctggggattacaggcatgtgccatgatgcctggctaattttttctgtattttcagtacagacagtgttttaccatgttgcctaggctggtcttgaacttctgatctcaagtgatctgcctgcctcggcctcccaaagtgttgggattataggcataagccaccatgcccagccccaagtttggtaatattcatgtataaaaagagaaggagagatttcctagactgtgatcttaataagctgatgaaattttacttggtaaagtttttttgtttgtttgttggaaggattagaaacttagtttaagaatagatatcgcacaaaataggatgatcttccccacccagtacttcaggaagtagaaacagtttaacatcttggcatttgccataatgggacagagtttatcgtctaaacctgcatttaggtatggtgagtcctgatttcagggagtaccagtgaagataaatgtactgcaaaaattttgctttgcttttgtactagtattatttagaaacctaaagttagcttttctgttctaaattatcttgtgaatttcttaaattcgtgttctttacctaaaaagagagagattgaattgtgagatttctcagattgggtgggctgtgcagctgcagggctttcatcctccatgccgtggaggagtgtggttacacttcaggtgaaccccctgcctaggggtgtagtttcacaatcttgccaaaggccatcaggttgtggaaacgttgtaatttgtagtcacattaatgaggaacttttctcaggaatattcagtcaagtttcctcttggcaacagaaaggttattttatcaacaaatccagaaatggggaccctggatatctgtaacagagcaggctgcacaaagaatgggttctagtttagcctacagaatttagggatttcagacccttgagcccaattttcttcactcctcatccccttttatccttctaaagttttgtttgttattataaaagctctacatgctgtgtatgactatgagaaaatacaggcaacctgagacaatcctggttaacacaccatacacctttttttctgatctttccttccagtccttgcatcatacttcaggtataaatttggtatttggaatggattaccttcctccctgccccataaagtccagattagcttgaattgtgagattctatatcagcattctttccagggactcagttccttgtagttattcagccccttttatctaagaatttctaagtcccagaacaggcagaaatggcttccttctcttttctctcctatactttcatcattcaggcaatataagatttaaagctgaattggtaaataagtctaaacagtgctaagaggagcatcatcttagcttcaagctcctggttgagtcaaaaaaacaaatagagaaagatttttgtgaattagagattatagggcagatgttcttgtagtgaagcttaggaaatggagtgagggcagtggttaaaatgcaggactgccatgtccttaaaagatgcctgttgttcttgcatcaccaaaaaagtgggttatttaagagattttcatccagatacagaagtctgaactcttgtttttttattctggggcctagggcgactacgtgcacaagtctgtgtttatcattttcttccaaggcgatcagctgaaaaacagagtcaagaaaatctgtgaagggtaagagaggcatgcctctaccaggagtgcacagccatgctgcccaactgttgagtcttaaagttcacaatagtgaaatacaaatcctttttagtctacctcaacacagttaattttaataatgttaggggctattttaatcaattagaaatagcctgcattcatttttatttttatttttgttgttcagatgggggggtctcactctgttgcccaggctggagtgcagtggcatgatcacggctcacggcagccttgactgcctgggctcaggggattctcctgcctcagcctctagggtagctgggactacaggcgtgtgccaccatacctggctaattttttgtattctttgtagagacggggttttgccatgttgcccaggctggcctggaactcctggactcaagggatctgcccatctcaacctcccaaagtgctgggattagaggcgtgagccactaaattctttttctcttttttttttttttctgaccgagtctccctccacgcccaggctggagtacgatggtgcgatcttggagcactgcaacttctgcctcccaggttcaagtgattctccagccaccckagtagttgggattacaggtacctgccaccacacctggctaatttttttttttgtatttttagtagagatggggtttcgccatgttggccaggctggtcttgaactcctgacctcaggtgatccacccacttcagcctcccaaaatgctgagattacaggtgtgaaccactgtgcctggccctaaattcattttaaaaaataccatcagaaccacagttgtggccagatacaatggctcatgcctgtaatcccaacactttgggaggccaaggcaggaggattgcttgaccccaggatttgaagaccagcctggccaacttagtgagaccccatgtctataaaaaactaaaaactgaaaaaaaaggaccataatttccttaacttggggaaaaataactcttaaggactcatggtttataaatgccatattattctgggacagtgagtctccatacttagcatagatgctatgtccttaaattttctgaaattctgccttagggacagatcttttttttgagacagagtcttgcgctgccacccaggctggagtgcagtggcacaatcacagctcactgcaaccttcacctccagggttccagcgattctcctgcctcagcctcccgagtagctgggactgcagatgcgtgccagcacacccggctaatttttgtatttttagtagagatggggttttgccgtgttggccaggctgatctcgaactcctaatctcaagcaatctgcccgcctcagctctcaaagtactggtattacaggtgtaagccactgtgcctggccttttttttgttttrtttttgttttgaggcagggtctcactctgttgcccaggctaaagtgcagtggcatgatcacagctcactgcagccttgacttcctgagctcagttgattctcccaccgcagccccatgagtaactgggactacaggcatgtgccaccatgcccgactaatttttgtattttttgtggagatgaggtttcaccatgttgctcaggctggtcttaaactcctagactcaagcaatccacctgcctcagcctcccaaagtgctgggattacaggcgtgagccactgcacctggtctaggggcagaattttttccatgccatcttactccgttaatttacaatataatttgctttactttttttttttaatcacaaaggaatttcatagctacagagaatgtcaagatagttcggatgctataattgctccgtctgcaggtcattttacgtaagtgttgacttaggctgggcatgatggctcatgcctgtaatctcagcactttgggaggccgaggtgggtggatcgcctaaggtcaggagttcgagatcagcctggccaacatggtgaaaccctgtctctagtaaaaatacaaaaattagccaggtgtggtggcaggcgcctataatcccaggtacttggaaggctgaggcagaagaatcacttgaacccaggggcagaggttgcagtgagctgagatcgtgccacttcactccagcctgggtgacagagtgaaactctgtctcaaaaaaaaaaaaaaaaaaaaagtgttgacttaatacatcggtctgacctaatcctgttttggtccttctggtacattaggattactttctgagattatttaaattagataagttaagaaacttcgatgttcttatattccaggttccgagcctcactctatccctgtcctgagacaccacaggagaggaaggaaatggcttctggrgtgaataccaggattgatgatctccaaatggtatgcagaaggctggagggaatttgtttttgtgaaatactggaatacgagaccattatccttccttgaaatgctgatattctataaggtacctgtagcaaaccaggataccaaaaaaagaaatgtacatgggtaatatgtccttctgggagctgagaaagtatcagggaatgatggttaaaaatagcattagccatcctcaaacgagacaggaatgtaaagcatctagaatcgttgttgcctagcatattyaattcctctccacctcatgggtctgagattttttttttttttgagacagagtctcactctgtcacccaggctggaatgccatggcgctgtctcagctcactgcaacctccrcctcctaggcgcaagtgatgctcctgcctcagcctcctgagtagctgggattacaggcatgtgccaccatgcccgactaatttttgtatttttatttatttttttgagatggagtcttgctcttttgcccagggtggagtgcagtggtgtgatcttggctcactgcaacctctgcctcacaggttcaagcgattctcctgcctcatcctcccaagtagctgggatgacaagcatgtgccactaaacctggctaatttttgtatttttagtagagacagggtttcaccatgttggccaggctggtctcaaacgcctgacctcaagtgatcctcccaccttggcctcccaaagtgctgggattacaagtgtgaatcactgtgcctggcctaatttttgtatttttagtagagatggggttttaccatattggccaggctggtcttgaactcctgacctcaagtgatccacctgcctcagcctcccaaggtgctgggattataggcgtgagccactgcgcccagccaagtctgagatagttttttttgttttttgttttttgttttgtttgttcgtttgtttgtttttgagacggagtctctgtcacccaggctggagtgcagtggcgcgatctcggctcactgcaagctccacctccygggttcacgccattctcctgcctcagcctctcgagtagctgggactacaggggcccgccacacgcccggctaattttttgtattttttagtagagacagggtttcaccgtgttagccaggatgatctcgatctcctgaccgtgtgatctgcctgcctcggtctcccaaagtactgggattataggtgtgagccaccgcgcccggctgatagtttttatgataataattttttaaaagtatgcttagttaagacaaatatatatcaaacaatctaaaaatacatgagtagtcagttctgccctctcccacacaccctcctgaggcagctggtcccaatagctcggcatgcatccttgcggtcacctttgatcttaaccacacagactagccaaaaagctctggtgtgacttttgtacccaagaagagactgtgttggagttttgccaaattgcagtaagtgtggtttatgcacaccacggttatcacagggctctgagggaggagttgtgaactgtgtgtacatggaaggaaaggctggtgagtggggctttgttccctttgaaagaatgaaagtgatgattgcccccttagaatattaataaacatacttaatcccaaaggcagttccttttggcagtggcagaattgtcaggaattgtcaggggtatgttgtaacttccatttcttttttcttttcttttcttttttttttttttgagacagagtcttgctctgtctctcaggctagagtgcagtggcgcgatctcggctcactgcaacctctgcctcacagattcaagcgattctcctgcctcagcctcctgagtagctgtgattacagatgcctgccaccatacctggctaatttttgtatttttagtagagatggggttttgccatgttggccaggctggtcttgaactcctgacctcagatgatctgcctgcctcggcctcccaaagtcctgggattacaggtatgagccaccgtgcccagcctgtaacttccattttaactctcagtgacctccatcatatatgacccaccaacctgacctattgctggctcctttgagatacacttaacctgtttaagcagagagagagagttttagaactgctggtgagtgataggctatattagtatattctgggttctaaggctgtcttaatctccttccagacctatgggtagatttaaagagcatatgtggtagtcattataactgaccagaatttgattttttaaaaatctagctgtaggaactgaaagtttaaaaagggattgaataccaaggaatgggatgaggaaagagaacggcaaatagaacattgcttgctagtttctttagcatccttctagaagaagggttttttgtgttttgtttgtttgttttgttttgttttgttttgttttgttttaaagacagatctcactctgtcacccaggctggaatgcagtggcacaatcttggctcactgcagccttgaccgactaggctcaaacaatctgtctcagcctcccaagtagctgggactacaggtgcctgctgccatgcccagctaattattttttggtatgtttttgtagagatagggtctcactatgttgcccaaactggtctggaactcttgacctcaaacaatcctcctgccttggcctcccaaagtgctgggattacaggagtgagtaatagtaattgtgaaatagtccacaaccagaaggaaagaaagtagctatcttcaagtgatgtgtttcctagcatgacatggctttgcttttaaaaacaaagcaaaacaaaacaaaggaagtcaccttcctctgcccaagacaatttttcagggagtagttactgctttgttctgaactaacttgaagaattgtctatgatggagacttgtgctttgggttgcttgcctaatttcttccagttggaagcaacaggcttagccacacctgctattaaaaacttaaatatgggctggacatgttggctcatgcctgtaatcccaacactttgggaggccgaggtgggtggatcacgatgtcaggagttcgagaccagcctgaccaacatggtgaaaccccgtctctactaaaaatataaaaattagccgtgcatggtggcgcgcgcctgtaatcccagctactcaggaggctgaggcgggagaatcgtttgaacccgggaggtggaggttgtggtgagctgagaccacgccactgcactccagcctgggccacagagcgagactccatctcaaaaaaaaaaaattaaatatttggtattaagccagtggaatgtaaaatgttcctgtaccttcctcccaccttagtcttggcactgtaattcctctgagggaaatctgtactgatttcaaaaggatcaacactgaaccattttttcctctgatgagaagcctgacataaaggtaacaccttagctgccctcatgatggcagtggtatgtggcagtccaagccccctgtaaagatcacaggtgctcctgatcccatggcgtctcctggcccatgttcccagtgtaggctggtggtggtattcagcactgcctctttccaccctctcctgatgctggcccatgtgcaaaggattctgtgtggatttgttaatttgtcagctcctgggcttgtgatgcctactgagttacattccccacatagaaagtcgttgctctttaataagccaagttaaaggcagtgacctacatttgttgtgccttggattggtggtaagattgaacatatatagaaaagctaaactattttctcaggtttctttttaggttgaagctaaataaaagtgaatgttagtaactagaactctaatttcttgtaatttggaaaaaagaaaccattctagccagaggaagaaaaagacaattccctggcaactcttttcagaaagctatgcctctttgccattcataccctgagatctaaaactggtgttaaaaggatccctcgcttgttccttttctccccaaaggttctgaatcaaacggaggatcaccgccagagggttctgcaggcagctgctaagaacatccgtgtctggttcatcaaagtgcggaagatgaaggccatctatcacaccctgaacctgtgcaacatagatgtgactcagaaatgcttgattgcagaggtctggtgccctgtcaccgaccttgactccatccagtttgcactcagaaggggcacggtgagtccccaaagctaacaatgcagctcgtggcccrgaagagaggttcccatcaatagtaacattaatgtcatttttggccgggcgcggtggctcatgcctgtaatcccagaactttgggaggccgaggcgggcagatcatgaggtcaagagatcgagaccatcctggctaacacggtgaaaccccgtctctactaaaaaatacaaaaaattagcygggcrtgttggcaggcgcctgtagtcccagctactctggagactgaggcagaagaatcaagtgaacctgggaggcggagcttgcagtgagctgagattgcgccactgcattccagcctgggcaacagagcgagactctgtctcaaaaaaaaaataaaataataaaaaataaataaatagtaacattaatgtcatttttatggcatttcaccttcagagttcttcaatatatttatttgtcttttaacttgacagcacatttcatacatagcctggcatataatatgtatatcatagcgtagcatagcatatctttattttgcatatgtggagactgcagttcagagagctgaaataatttggtcatatgcccatgattcttcagggttgttcatggccagggcatcagtttcctgatgccctctctgtatatgactgtttctgtttagtagttaattagaacaactactctgtccacagaagtgctgtaagtgcctggaggagtacagagatgtataaaacatgccctcgagtatcttacagtttattaggagagttccaactatggagttggaaaaagctttaagcaggtggcatttgatcaggtctttgaagaatgataagttgttggtaagactgctgaatgaagagaagaaaacaaaggcaggaagtatggttagaccatgtatgtttggacaagaacaggatttacagtgggttagctgaagagaagtacctgtctgcatcaggtagtttggaacttaattgtgaaaggttcttaaataatagcttagaagatttaaattttattccagaggaagttgagagacattggaagttctttaggggtaaaggaacatgatcaaagcagtttgggtggttttttacatttttaattttgtgtttgagacaagatcttgctctgttacccaggctggagtgcagtggtgccatctcagctcacttcagcttccaactcctgggcttaagcaatcctcccacttcagactcccggtagctgggactacaggtgcccaccatcatgcgtggctaattttttgtagagacagggttttgccatgttgcccaggctgatctcaaattcctgggctcgagtgatctgccttccttggccttccaaagtgttggggccaggcgtggtgactcactcttgtaatccagcactttgggaggttgaggcgggtgcatcacttgaggtcaggagtttgagaccagcctggccaacatgacaaaaccccgtctctactaaaaatacaaaaaagttagccaggtatggtggtgggtgcctgtgatcccagctactcaggaggctgaggcaggagaaccacttgaacccaggaggcagaggttgcagtgagctgagatcacgccactgcactccagcctggacagcagagtgagactgtctcaaaaaaaaaaaaaaagtgggtcaccacgcctggtggatcaaagcagtttttttgttttttggtttttttttttttgagatggagttttgctcttgttgcccaggctggagtgcagtggcatgatctcggctcactgcaacctccaccctccacctccctgcttcaagtgattctcctgcctcagcctcctgagtagctgggattacaggtgtgcgccaccacacccagctaattttttgtatttttagtggagacggggtttcatcacgttgaccaagctggtgtcgaactcctgacctcaggtgatccacccgcctcagcctcccaaagtgcagggattacaggcatgagccacttctcctggctcaaagcagttttaaaagagtaatctgctgatagtatctaggttggattgaggagtgaagagattctgtaggtaggggttcagttaggaggttattgtagacatagagtagtaaatgataaggatccccaggtaggacttgacaatgggaaaaaaaatgatgaattgtgagatgttctgcaggaaaaatcaatagggctacctggttcctagcaaggtgcaggagaaatacaaggagaaagatttaaacatctttttgaggcatcaaagctgactggccaggagaattagggttccaatgagggaagtaaatgttcagccagagaagcttattgattggggagagatggtaagttcagttccgggcacattgaggtctatgtggaaatgtcaagcagacaagggaacaaagctaaggaaatgggagtcatgagaatggaagggaatgagacctccaagagggaggtcatagagagaaaaaaaaggttggggtcttgcaatgctatgagataggcagagcagaaataaccagcaaagatagaaaagcaatggtcagcgagcaggaggagaactcctaaggaagaaggattttcaccaaagatctccaatgtcaggggcgtgcatgggggagagaagctctttggtcaggagccagtcactttgcctaagcatgctcagccagactgcaagggatcaggaagttaagagaaggtagtgaagaaggagagccagagaacatactttgctttctccatgaaagggggagaacaactttcataaaaaggcagatatggaggcagttccacattttctttggtgacatattttaaagttaaatttttttcacattaaggatgtatttcagaggatctaatagaaatcttccattataaatgttataccttttcccagttttcccaaaagctgggaaagataatctasttttatttttaggtttattagttttattgagatataatttacatgaaagaaaatacatacattttatgtgtaccatttgatgagtttcaagaaatgtacacctgtgtaaccacyaccacaattaggaggataacctaagtttgataaatgtgctaatgtttttcaggaacacagtggttccactgtaccttccattttgaacaggatgcagacaaaccagactcccccaacctataacaaaaccaacaagtttacctatggctttcagaacatagtagatgcttatggaattggaacttaccgagagataaatccaggtaaaaaaaagcttgttatctttttcctctagagttttttttgtttgtttggttggtttggtttgttttgagacagagtctccctctgtcacccaggctggagtgcagcagcacgactgtagttcactgcagcctcaaactcctggcctcaagagatcctcccaactcagtctcctgtatagctaggaccacaggcgcacagcaccacacctggctaattttttattttatgatttttttttgactgggtctcattctgttgcctaggctgtagtgcaatggtgaaatcacggcttacagcagcctcaacctcgtgggctcaagtgattctcccgcctgaacctctggagtagctgggactacaggcatgtgtcaccatgcctggctaatttttaaaatttttttagagatgggttttgctatgttgcccaggctgataatttttaattttttttagagacggggtcttgttatgttgcccaagctagtcttggactcctgggctcaaggaagcctcctgcttcagcctcccaaagtgctgggattacaggtgtgacccactatgcctggcctttttgttcattgtttcttctaatgcctcactttaaatgctgttgaataactgaattaaaattaaagatgttaatcctagcactgtttttttaatttaattttatttttaattttttttgagacggagtctcgctgtgtcacccatgctggagtgcagtggcgtgatcttggctcaccgcaagctctgcctcccaggttcacgccattcttctgcctcagcctcccgaatagctgggactacaggcacccgccaccatgcccggctaattttttttttattttttttaggtgagacagagatttactctcgttgcccaggctggagtgcaatggcacgatctcagctcaccacatcctctgcctcccaggttcaagcgattctcctgcctcagcctcccgagtagctgggattataggcatgtgccatcacgcccggctaattttgtatttttagtcgagacggggtttcaccgtgttgcccaggctgatctctaactcctgacttcaggtgatctgcctgcctctgcctccccaagtgctgggattacagacgtgagccactgcgcccggccatttttttgtatttttagtagagacagggtttcactgtgttagccaggatggtctcgatctcctgacctcatgatccacccgccttggcctcccaaagtgctgggattacaaagtgctgggtggcgtgagccactgcgcccagccaatcctagcacttttagaggccgaggtaggaggattgcttaagcccaggatttcaagatcagcctgggcaacatagtgagaccccatctctattaaaaaataaataaacatgttgacacctcagatcttgtgtactccctgtgaagaggtgctcattctggcagggcatggtggctcacgcctgtaatcccagcactttgggaggctgaggcatgtggatcacatgaggtcaggagtttgagaccagcctggccaacatggtgaaaccctgcctctactaaaaatacaaaaattagccggatgtggtggcatgcacctgtagtcccagctactcgggaggctgaggcctgagaatcacttgaacccaggaggcaaaggttgcagtgaaccgacatcatgccactgcactccagcttgggcaacaacaaaaagatgcccatttaatgtaaggggcaggtttactgtcaggtagcgttcctttaagagttcatcggctgggccaggtgtggtggctcacgcctgtaatcccagcactttgggaggccgaggcaggtggatcacctgaggtcaggagttcgagaccagcctgaccaacatggagaaaccccgtctctactaaaaatacaaaatcagccaggcatggtggctcttgcctgtaatctcagygactcgggaggctgaggcaggagaatcacttgaaccggggagacggaggttgccgtgagccgatattgcattattgcactccagcctgggcaaaaagagtgaaactctgtctcaaaaaaaaaaaaaaaaaaagttcatcggctgggcgtggtggttcatgcctgtaatcccagcactttgtggggacaaggtgggaggatcacttaaggtcaggagttcgagaccagcctggccaacatggtgaaaccctatctctactaaaaatacaagaaaattagccaggcctggtggtgcatgcctgtaatcccagctactcaggaggcctagacaggagaattgcttgaacccaagagacagaagttatagtgagcctaaattgtgccactgcactccagcctgagtgacagagcaagactctgtctcaaaaaaaaagttcatgagactggattctttcatgtgccctcacagccctaaaacacctggacttctctagcaaatcatttgcaggaactgttttaagcaaaatgtttcttctaagatgtctgatatttttaaatggctttttttttggcttccctgttccaaggttagacagaaaaaatgtagcaagtattggccactttaggtacaacacagatttctcctatatttggagagttaattattaaatcaagagtgtgagtattcattttcagttggagccctatggaagaactgctttgctctgggctctctccatctgtacgttatctgatatttagctttatatcactgggacatggttgctgcacaaagagaagacagctggcctgccctgggagcagggtcccacgagttacaagagagtcagagaacaaaccaatgttgtcaaggttacaccttcatttccactgttctttgtttgaaatgttatcagagctgccaggcacagtgcctcatgcctgtaatctcggatattcaggaggctgaggtgggaggattgctcaaggccacaagttcaggactagcttgggcaaaatagtgagattccatctaaaaaaatattatttatcagtaattttaaaacaaaattaactgggcatggtggcacatacttgtagttccaactgtttgggaggctgaggtgggaggataacttgagtccaggggttgcaggctgcagtgagctgtgatgaaaccactgcactccagcctgggtggcagagaaagaccccatctctcttttaaaaaaagttatcagtagctcaaatttcattagctactttgtgaagatgtgttgattctgccatgaaagattttctctgagagtcctatctgtctggcagctggggagtaagtcaccttatattgatcttaagattatggaagcctgggcacggtggctcacgcctgtaatgccagcactttgggaggccgaggcaggtggatcacttgaggtcagagtyggagaccagcctgggcaacatggtgaaaccctgtctctactaaaaatacaaaacttagctaggcatggtggtgggcacctgtaatcccagctactcaagaggctgaggcaggagaatcacttgaacctgggagatggaggttgcagtgagccaagattgagacattgctggctgacagagcaagactccatctcaaaaaaaaaaaggggggtgggtatggaaaagaatgtaatatttgtggaattgctatggtttaatgtactttgtatttttctttttttggtttcttcatagctccgtatactattatcacgttcccttttctatttgctgtgatgtttggagacttcggtcatggcattttaatgaccctttttgctgtgtggatggtactgagggagagccggatcctttcccagaagaatgagaatgaggtaatgtttaagttacatctgcattgaactgaaattttataatttcccaagcattcattatgaaaattatgatctggaagtcttttatccatgaatttatcaaaaggaagtagagaagttatgttcattttaacaccaaagacgacatgtgcaagctggaagtggtagtgtgtgcctgtagtcccagctacttggaggctgaggcaggagaatcacttgagcccaggaattcgagaccagcataggcaacatagtgagaccccatctctaaaaaaataaaaattatttaggtttggtgcaaaagttattgcggttttggctgccaaaagaaatggccaaaaccgcagtaacttttgtgccaacctaataaaaaaatagaggccacatcctgtgaaagtgactgtctcattagcattgtattttggtttttacttcaagctctctgaatcaggatggggtaaagtagtgctggagaaaggggcaggtatattctgaataacattgtcacaatgtgagctgcagtgagtacattctcattacttctttcttctggttcccagatgtttagcactgtgttcagtggtcgatacattattttattgatgggtgtgttctccatgtacactggcctcatctacaatgattgcttttccaagtctcttaatatctttgggtcatcctggagtgtacggccgatgtttacttataattggacgtaagttgcagaagaagctaaaattcaaagcttattcctttcatgtgcagccctgatttttaagacaagtggtaaactgacacttctttaggaagtggtgacagtgtctcctcattcatgctccacactgtgagttgctttgtgatttgttcagcaagtatccaggaactaagattagaaatgattttttttytttttggaaactaaaaccagattccccagttccctacttgattgtgtgtttgtgtgtttaatttttctttttgtcattttggatccctcagtctcagctgctagtctctcctctttatttttcccctcccattttattgaagagacaagatagctacagtaatttattttggggtcagtttctggacccttgttgtttccctctcttgttcaaaaataatgtgactttttccctgtcatggtagtgaagagacgcttcgggggaaccctgttctacagctgaacccagccctccctggagtgtttggtggaccatacccttttggcattgatccagtaagaggacttccttcctatatgctaacctcaaattttttaacactaaccctgaagcaagagaattaaaatgaagataaatagttatgtgggctttcactgggcatggtcgctcatgcctgtaatcccagcactttgggaggccgaggaggtgggatcacctgaggtcagcatggtgaaaccctatctctactaaaaataaaatattagccgggcgtggtggcgcatgcctgtagtcccagctacccgggagactgaggcaggagaatcgcttgaacctgggaggcagaggttgcagtgagcaagctgcactccagcctgtgtgacagagcaagactccgtctcaaaaaaaaaaaaaaaaaaaagaaagaaagaaagaaacaaacaaaaatagttatgtgggttttcgttgacatatttttgggaaaccttgatgtatgtattcagaggacttctaagccataagagacccaagtgccttgaggagccacatacttttccctgcgctgcttatttctgaggtggttaataatatcgactctgggaagattgatttttcaagactccttcccatttcttaatttatttctgcttacttagtttggttttttatttttagcagacattttagcaaagcagaaatatatttttcctgtggattttagacttgcattcttatatttacgaacttacaaaaacttatccsagaattaatttttttttcaaatgcttaggcaaattaagtatgatcaagtcttctttattgtgtgctgtaaaaatggagtggcggcaagaatgtaatacagggcatctgactgctgaggaaaaaaaaaaataatacaggctgggcgaggtggctcatgcctgtaatcccagcactttgggacacagagtcaggtggatcacttgaggtcaggagttcgagaccagcctggtcaacatggtgaaaccccatctctactaaaaatacagaaattagctgggcacggtggcatatgcctgtagtcccagctacaggaggctgtggaagaattgcttgcgcccgggaggaggaggttgcagtgagcccagatcgtgccactgcactccagcctgggggacatagcaagactccatctcaaaaaaatagatggaatgacagcaccacagggctacaatcagcgaaacatagactgtgggaaaatatataagataaacaacccaatttcttcaaaagaaattttgtaatgaatgaaaaaggaaagatggaaggagaacctgtagtttagagactcaagagatatatctacaatcataatgtataagccaggcacggtggctcacgcctgtaatcccagcactttgggaggccgaggcagacagatgacttgcggtcaggaaattccagaccagccagggcaacatagtgaaaccccatctctaccagaagtataaaaattggccgggtgtggtggtgcacgcctgtagtcctaaggcaggaggctaaggcaggagaacagcttgaacctgggaggcagaggttgcagtgagccaagatcacgtaactgcactccggcctgggtgacagagtgaagaccctgtctcaaaaaaaaaaaaaaaaaaaaatggtttggacacagatcagakaaatttgaatattgactatatattttatgatattaaagaatcattgttagctgggcacggtggctcacacctgtaatcccagcactttgggaggccgaggctggtggatcacgaggtcaggagttcaagacctgcctggccaagatggtgaaaccccatctctactaaaaatacaaaaaaaattagccaggcgtggtggcgagcacctgtaattccagctactcgggaagttgaggcagagaattgcttgaacccaggaggcagaggttgtagcgagccgagatcatgccactgcactccagcctgggcgacagagtaagactccatctaaaagaaaaaaaaaaaaaagaaatcattgttaatgcatttacgtgtgatgacaatattgtggtcatgttttaaaaataagtcctggccgggcgcggtggctcacgcctgtaatcccagcaatttgggaggccaaggcgggcggatcatgaggtcaagagatcgagaccttcctggctaacatggtgaaaaccccaccttgcaataggccgagatttcaccactgcactccagcctgggtgacagagcgagagttcatctcaaaaaaaaaagaaaaaaaaaaaaagccttactggccgggcgcagtgactcaagcctgtaatccaagcagtttgggaggccgaggcaagcctcaggccagacctgaggtcaggagtttgagaccagcctggccaacatggtgaaaccccatctctactaaaaatacaaaattagctgggcatcgtggcctgtgcctgtaatcccagctacctgggaggctgaggcaaggcaggaggtggaagttgcagtcagcgagatcatgaacactgcactccatcctgggcaaaaagagcgaaattccatctcaataaataaataaataaataaataagtcttttccttttagacatccacactgaaatatttacaggtaaaatgacatgatatctggactttttagtaatgtggagatgagtgagtggcagtaatcttttttcatgactataaggtgatgttaatttttgaagcattcttctcaaaagcaagattaaaaaaaaaaattttgtcgaagcagagtgataggtgcctgggagtttgttgtaccatcctgtctgcttaagtatctgtttagaattttccataataaataatattgattaataaataaaaattgtcgaccgggcgcggtggctcacgcctgtaatcccagcactttgggaggctgaggcgggcgaatcacgaggtcatgaatcgagaccatcctggctaacacggtgaaaccctgtctctactaaaaatacaaaaaaatagctgggcgtggtggcaggcacctgtagtcccagctacttgggaggctgaggcaggagaatggygtgaacccggaaggcagagcttgcagtgagctgagatcacgccaytgcactccagcctgggygacagagcgagactcgtctctaaataaataaataaataaaaattgttttttaaacagaggaatatttttccctttgagaattctttataatacctatttgttttctcgggttatgacagatttggaacattgctaccaataaactgacgttcttgaactcctttaagatgaagatgtctgttatccttggtatcatccatatgctgtttggagtcagcctgagtctgttcaaccatatgtgagttgttccatttctgtcataagaatgtgcatagtttagagaatgcttttgtgtaaagaaatcatgacatctttggggagggattaataactcagaacctcattctacattatagaagtgcttttctaaaaatttaatggtgtggccaggcgcggtggatcatgcctgtaatcccagtactttgggaggccaaggccggtggatcacctgaggtcaggagttcgaaaccagcctggccaacacgatgaaaccccgtctctactaaaaatacaaaaatcagccaggtgtagtggcacgcgcctatattcccagctattcgggaggctgaggcaggagaattgcttgaacctgggaggcagaggtygcagtgagacaagatggcaccactgcactccagcctgagcgacagagtgagactctgcctcaaaaaaaataaataaataaataaatttcatggtctggccgggtgcagtggcttacacttgtaatccagcactttgggaagatgaggcgggcagatcacttgaggtcaggagttcaagaccagcctggcccacatggtgaaactccgtctctactaaaaatacaaaaaattagccgggtgtggtggcgtgcacctgtaatcccagctactctggtggctgaggcaggagaattgcttgaacccaggaggcagaggttgcagtaaaccaagataacaccactgcactccagtcggggtgacagagcaagactccatctcaaaaaaaaaaaaaatgttgatggtcttaaattagacttaatattagtcctttaacaatttactgttccagtaaagatccttgaaaaaaacttgagcaattttcatcaaaataagtgaggtctctttttttccttgatgtgcaactcacataaaattattagctgtggactgggtgtgggggctcacacctgtaatgccagcactttgggaggccaaggcaggcggatcacttgagcccaagagttcaagacaagcctgggtaacacggcaaaagaccccatctctacaaaaaaaaaaaaaaaaaaaagttatgaactgtggtctcaaaatgtactagatttttccattctctttctcatggagagaatggtggggatggtattggagccgttcaaggttcaaaagtttaaggcctggcacaatggctcacatctgtcatcctgcactttgggaggccaaggcgggcagatcacctgatgtcaggagttcaagaccagtctgggcaacatggcaaaaccccatctctacaaaaaaatgtaaaaattagctgggtgtggtggcgcatgcctgtagtcccagctactcgagaggctgaggtaagaggattgcctaagcccagggaggttaagactgcggtgagccaatattgcaccactgtactccaggctgggtagcagagtgagaccctgtctcaaaaaagaaaaagcaacagcaaaacaaaaccaaggttcaaaagtttgaccgtgatagttaatcctgcattgtctctgttgtctccagcttctggttgctgctgcttaaagtgataaagacagaattgagggggtattaagtagaaaaatctagtgaatactccattcagtgtaggagtggccctaggcccatttacccttaacatttttttctctctcctttttagctatttcaagaagcccctgaatatctactttggatttattcctgaaataatcttcatgacctctttgtttggctatttggttatccttattttttacaagtggacggcctatgatgctcatacctctgagaatgcaccaagccttctgatccatttcataaacatgttcctcttttcctacccagagtctggttattcaatgttgtattctggacaggtacgtcagcccagaggcagactgtctgagatgattatacttgatcaggaagccagatgtttctctgaccctaaaaaatttataactgcccttctatgggacaattctagggctttgccacaaaatgtgataattattttgagaaattggatagtgttattcatagattagtaagaaagtactgttgggggaaatttgtgccatatttggaaactgcgtatgtgatcggtagacttttatatgatgtaccttgtccttcttcttactctgcagaaaggaattcagtgtttcctggtagtggttgcactactgtgtgtaccttggatgctgctgtttaaaccattggtccttcgccgtcagtatttgaggagaaagcatttggtaggtgtatttctattgctaaaagttactagacttttgttttgttcaagatcaaggcaattccccagtggatataattaattgtgcacaaatctatatattctttttctttttctttttctttttttgagacggagtctcgctctgtcccccaggctggggtgcagtggtacgatcttggctcactgcaacctccacctcccaggttcaagcaattcttttgcctcagcctcctgtgtcactgggattataggtgtacgccaccacacctggctaattcttgtatttttagtagagacggggtttcaccatgttagccaggctggtttcgaactcctaacctcatgatccgtccaccttggcctcccaaagtgctgggattacaagcgtgagccaccatgcccggccacaaatctgtatattattaaaacggcatttgtggccgggcgcagtgcctcactgctgtaatcccagcactttagcactttgggaggccgaggtgggtggatcacttgaggtcaggagtttgagaccagcctggccaacatggtgaaaccccatctttactaaaaatacaaaaattagccaagcgtgttggcgcgtgcctgtagtcccagctacttgggaggctgaggtggaaggatcgcttgaatctgagaggcggaggttgcagtcagccaagattgtgccactgtactccagcatggggacagagtgagactctgtctcaaaaacaaaaaaccaaacaaacaaaacgcatttgtgttatgtcccagcacgagcactgggcctgccaagtcagagaaacatgtctgctgctcaagatatctggattcagctttgagtagctagaggagagaaaagtcacaaatttttacctttcctggtcatgcttttgctcacgctgcgctcaggaaaatgtaggcctatgcctgtctagatgtagcatcagccaaagccaagcaaagctgcaagagctgcagatgggtgaactcactcatgcggtttgcctgggcaaccacaggactgacattgagacattttcctttcaaatgagactgtgataactttcactgaccaaaacatctgggaaaaaggtttggtttaaagcacgttgattttttttctttttaaaaagcagcatatgtatatacgtttacttaatgtctgtgtgtatatgaattctgcgcgcrcacacacacrcacacacacagagttaaatttgcgagatgttcagtatcatgcataatttctgggtatccaatagcacttactttacactgcctgggaaaacccaaacgatcttgttgcatgactcttaaacggctgttagatgatgactcccgtggagagcagctgagttacaagaccctccttctcccttttctgaccatcttcatccttccatgtaccctccatttgtctccccacttcactccctccctcttttgttttctttccccttcttcttttcttccattcactatcaggaagggcaacctgtggaggccccagtcagcccaaacccgagccaacagggactagaggcagcagcggctgcaacagtgagtgaattaaaaccaacaaaccatcacatttcatttaaagaggtggcaaacagtgcagcagaattctttttaattaaattgagagcatgggacatgtgtacttttgggaaatatgtccttgttactcactgagatgatgacagaagttccacctcttaagaatagattctggcatcatctttagcattggtctactaagtttctattcaaaaatgtaagtacaggcatgtccatggcaacaaagtggcttgttgtaccctcactgagtcccatcatcttaatccaagatgacagctcttggactcacccactttcatgtctgtattttgtgaccatgtattggatgatttttcagcatggaagcgagaatatctctgtgattcttgaattgatttccctgcactttagagttctactttagagtgatgcttggacatttgatcttttttagtagtaacttaccttctttttgaaagtgaaagtttatacatgtttagttttttgtgagaaactcagaagacctcacatgtcctcagctgttccagtgagacctctgctctccgatgtgtcgtgtgtactgtcatctggtgtcataaccaaagtgatctgtcttgatccttccctcttctgatactaattcaagattcagtaacagcactttgaatatttgtccttaaaaacatcttttaaacaaaatcttacaatgcacaaatatattagcctaatatattctaagttatgaatgaatctataagattgtaaaagtctcaccagtagtgattacgcattacttctatgtgctcgaagcatatacttctttaaataaaatgaaagatttagatggataaccatttccttcattaagtgtttctgatgattttaaacttggaaaatttcttatggtcatccttctggaactagtctaagtcatccttctggaactagtctaaaagggctgacattttgagtcagaaaaaattttaatcttgctgcttaaaatacattttcaagtagggacttccctgtgagacatttaacaaacctttagaacacatactacctattgtcaatgtccttaacacatactcttttttctgctagtcttagcatatataagatgtgcttctgacaagatcttaatgcatttaagtctkgcgacttcttctgtgataaattctaagttaaaagttccccgtttggaaacctgcacattcatagggtcttcttaccccactggttctttagccaaacatctgttcctggagagcagcctgaaggcatcaggatgatcagtctacaagaaagtctctggatttttgaccccagagggctgaggatatgaacagtgatctggttttgttctgttctttgtccccttggttgtctgtgagtgatatatcacagtttaatttttcttttcttttttctgctgacatgtgtctctcatcccccttcctgtaactctcattcctgtgttctgaagagatcattattagtgtctggctgggagatttaacctgtctgctcctcagtttatctgctagttggagaaagcttcagaaatggccttctactttgggagccttgaaccttgaagccttcctcctatatcttataacccagccgaggttatgcaggagtcccctcctgtgcccttcgttgcattttcagtccaccttctgagggttgccaggtggaatatgtgcatgacctggaggtgtccaggctctggtggcccacaagtctgactgcacatcacagtcacctggtagactttgaatttgtttcttagggtattaaaacaaataagtggaagaagaaataaaagtggcccataatttcatggtcctgacaatcccctactgacattaaaaaaataaagcaataggtgcacttggctagagaatgcatatagtgctaactaagaagaaaaccacctgcccccactacagtcctcctcttcagggggcattgttaacaggtgggggccttgcctctgacagatatctgcctgtcttctattgataggtgtgtgtgtgctctatgcatctagaaaaagacacatgaggaattgtgttttaaactgtggcactgttctgcctctcgatctattacgttttttaaaagttagtgtatcttgaagattgtttcatagtgataatcacttttttttttttttttctgagatgaagtcttgatctgtcacccagckgtagtgcagtggcacgatctcagctcactacaacctccacctcccaggttcaagcaattctcctgcctcagcctcatgagtagctaggattatgggcatgcaccactacgcctggctaatttttgttttgttttgtttttgagatagagtcttgccctgtcgcccaggctagagtgcagtggcacgatcttggctcactacaacctccgcctccccagttcaagcaattctcctgcctcagcttcctgagtagctgggattacaggcacccaccacctcccccggctaatttttgtatttttagtagagacagggtctcaccatgttggccaggctggtcttgaactcctgacctcgtgatccacctgcctcaggctcccaaagtgctgggattacaggtgtgagccactgtgcctggactaatttttggatttttaggagagacggggtttcaccatgttggccgggctggtctygaactcctgaccttgtgatctgcccgctgtggcctcccaaagtgctgggattacaggtgtgagccactgtgcccagctgactatcactcttttttatggttgcctagcattccatagaatattccactggacatgccaaagtcattatctctttgatggatgtgttggttgttcccaattctttgctatcacaaacagcaattcagggaacatcctttttcatatgtctttttttttttttttcttgagacagagtctcgctgtgttgcccaagatggagtgcagtggtatgatctcagctcactgcaaccatcacctcccgggtttcagcagttgtcctgcttcagcctccagagtagctgggattacaggcgcccacctctacgcccaactaatttttgtatttttagtagagacggggtttcgccatgttggccaggctgatcacgaacttttgacctcaggtgatctgcctgactcggccttccaaaatgctaggattacaggcatgagccaccgcgcccagccccttatccatataccttgccaaagttttgcaagcctagatgttccagcagtgggattgctgaatctcaaagggttcatgcatttaaaattttgataaacccttcmcaatgattatacaatttgtacttgggaatatatttttaaaatacagatttattgggccccaccccagaactactaaatttacaatttctgggagtagtatttgagaatttctatttaaaatgcagcttttggggtaattctaatgcaactagttctctgaccagcatgttaaggaccactgctagagtaggagggaggatttgtgcaaataattagatctgaggtgggcattaaactgtgatgagagctgtggcaaaaaatggcacaccaggaggtggagctgaggatgaggagcgcagggcagctgcgcaggcctcctgcaygctactcatgctgctgcccgaaggccaggttgcaggagagctgcccttgagctcttgccttgtttggccccctggacagaaaccatatgaagtgattctgggggctgctgtttaaattccttttcacgctgtggcaggttagcactaattgggatctgtgagacttaactcatttctgcctgkttttttttcccaaagagtcttttttgctttgggtttggaaaaactcaagttttttcaaatcaagttgactttaaaatctacttttggagaccctacaaaagactgtgtttgtgaactcagaagaagcaaatgccccatcagcgtctgcccacgtgcctgtggaagaattgttctaacattccagagctgtctgctgaagaaaaggagcccctactcatctttttaagctcagcattctctagccacaagtgaatgtacattaagcatttttttccttctctgaccttggaagctttttgttcctgggcagagacatggtacatttctggaagaagttgctggaattcttgggctcctgttaaaagcttatcagactagggtacaatcacaatgtcacttggccccccttcctcttagaaagtctaatcgttagggccagaaaagcttaggcccttgcagcctttacagatagagctgtacttgttgtgagaatctgttcrtattaaggttttcattcaagcaggattctcaattagtgttgacccaggtgaggctggtgcctcttggcacagcagacagaactgcatatttcctctgaagcagggtaaggtggtaattgtaggttgggctggggctggggaggcggtggttggggtggaacagttgtttgattttacttagccgttcagtcagtgggttttgtttttgttgttagacatatgcttttctgaggtttgtgttactaaccatcgcccttcccacctcacagaatgtcatgttaaagcccaggcaaattctactctttctgttcatctgtgtagggaactctcaactttggtgggatcagggtgggcaacggaccgacagaggaggatgctgagattattcagcatgaccagctctccacccactcagaggacgcagacgaggtaagatcccgtggtgtgggctttctctccttccacctcgggtcagccctagtcttgtgtacctaagaggcctcactccagtcttctccttgaaaaakaaaaatactaattaatattcagcctgccttctggacctcttagggcaccacagctttttccagtgggccctgccctaagctccagctgttgcccccagagcccgcagcagttttgctcctatcttgaattccagattttgcccgcagtgctctgcacgcaggtctccattactgactgctctctcacctgaggcagagcaggcctcagcatcccagctcttatgacctgaaacacaggtcactaagcacagcttcttcatccattgacccttccaaggatcgttccaattacattactgaccagctataatcactggtacttttgaagtcctacaccactgatgtgttcttgctgcagatattttgtttgagcttttttggtgtcatttgcctactttttacagggagagagagaattaggccaaactagacttttccttaagataccacctccaagcccactctccttgcctgaccccttgtagcacaaagcctctgaactgaactattaaatctcatctactcattatgttctttttaaagcaaataaaataggagttgaggactcaagttggacttttcagtctgtctgaccactttcactatatatgattttttaaaaaagaaatcacaagggttgtggatgcctttaaaaaatatgtatcttaatgctctaaattcctgctgatttcgctttgtgtatatgctgaggaggcctgcctccaacgtgctagcccatttaacatgaacagtcctccccaagaagcattcagtagccttgtgctcctaacttgtgaccttgtgtgtggcgtggctccccactaagtgtaaatttgtgttttcaagccttccgaggacgaagtggtaagatgaaagctggcgttgccttcgtgtttatccgggcttctctcttcccatccttgtgatcactctgctgaccctgccacaccctggggccatacacatgactcctgtgcctctgcatctcactggccatttcaaaccagttcgtgagcctgtgttctaaaaagctcatctccattaactgcatctcatgtcggtcacctctgtctttgtttcattgactttgctgatttaacacctctgagaatggctttgaaaggagctacaagtaatgtcttcactggcattcttgaagtgactcctcttgggggttaagtcccattggcctctgccttcctctcctgtgatgttgtggttgatctactcccagccaccgggagtagccgtttcctccctgctcctcctagtgcttgtgagcaaaccttacccttcctccctgtctgagccagcctcttcctgctgccctcctcagcttgatgatgcttcaacttagaagtggtggacccttctcggggtcagctctacctccatgtgacccaggtgagagggagacagctttcaaaaggaggctttgccttccagatgcatcccaaaggaaataatccatctgtgtgaaaggagttcatattatatcagccacatagagaataacggagactggaaagcaaattggctaactgttcaggccacatctcgagtagaaggccctctggctcagcagtaattcacttagcaacatacactctttaaactgggtttttaaaacaccttgctgcactgtttgcatcttcccccagcacttctctctaaaatgcctagacccacaaaccatacccttcccttcctgactctcggtcctctctaggagggcagtgggatgggaatgggaaagcctttgctgttctgtgtaaacacaggtagggcctgctcttcctgaagcctagagaggctcctttgctggcatcaaagagtgtctgtgttcctggactgctcatctatgcagtccctggctgagctacctggcagggatgggtggggcgtgctccatgttaatgaggagcccaaccctttccctggctcactacctccaacaacactgccttttaaatgttttcctagccgagcacccacattgtcagaatggtctgaccaactattgtgtaccagcgttctcgtttgtagccatgtcccaggaggttggacatccaacaagatagactctaattcagcctccccagtctctggccacccagctcactcagggattcagctacccttggctacccaagtagtctaaacattttatctttatcaggcacatatacagtctggttctctgtagccaaatttagatacccatgacatttatctaatgatttcaaaccaaacaggttcctaaaaaaacattcagcctacttctagaacttccccattttgcttggctgtgaaaatgtatttgtcccatgcaggcccttgctccagcccagtggaagcattagtacctcttcctagcgggaactcagtccagctacacaccagagccaggccagtggttgtctgggaaatcttcaaaggccgtgaccactcagcaagggtcagtggcacctctccccactgtctcctcaccaggtgcattcatcccatccatccatgcattcactcaccctccgtgttgtccagcactatgtatagtgctgcagaaacaagaagaatatagtgcttgccttcaaagacctcccaaagtggggagatagtctggatgacaggtgctgtaatagaagtgtgccccggatgctataggagcacagaaagagggcaactgatgaacactggggtgagagtggaagaggagaccctggaagactccctaaggaagttgtcttactctggtcaagcaggaggccctgtagagggagtggtgcagacccaccagcatatgcagcttcacaggggcaaaacacctgtaggtccatcacgtgttggggactagcaagtattcagcttggctggagcagaggcaggagtggggaactggggacaggtgagactagaggttggcagaaaccagccatagtagtttttgcctcatttggacaacaaggagccatccaagagagagcggtgaagctgatggtgacacagccatggcgcattgaaatacccccagtggctgtgttgtagggtatattgggttggggagggacaaggtcaggaggcatagactcgacatcatctgatgtgattcaggacagaatggcgagcctgaagtgaagtgtctgtaggataagttggaaaggaaggaaccaatatgagatattaaagaagtgaaagctataggtcccagtgccttaataaaggtaaggagtaagagaagattcgagattgactcccagactctccagtctgctggacatgggagatggaatagaagttgatctcggtgtggtcagaggagagcagttactgtgttgagcatggagagcctgtcgttccccaggagaaggagtacagctggctggaaataggcaaggcagagatggagagatccaccttggagtcactcctaggggcgacccttgaagccctgagtagcaatcccaccagaaagatgcaagggctgaagctgaaacttcagagagcatcggcatttaaggaagaaccttggctgggcgtggtggctcacgcctgtaatcccagcactttgggaggctgaggcgggcggattgcttgagcccaggagtttgagaccagctggccaacgtggtgaaaccccgtctctactaaaaatacataaattagctgggcggtagtggcatgtgcctgtaatcccagctactcgggaggctgagagaggagaatcacttgattctcctgggaggcagaggttgtggtgagctgagatcgtgccactgcactcctgtcttgaaaaaagaaaaaaaaaaggaagaacctcgatggagactaaaaagaactgtccagagaggtaggaggaaaaccaagggatggcaggtatttcaaaaaggaggaagaggctatggtgacagacactgcaggagcatggacaagggcacagaacatctgttagctttaacagctgggccaggcgcgggggctcacgcctgtaatccccagcactttgggaggccaaggtgggtggatcacctgaagtcaggagtttgagaccagcctggccaacatggtgaaatcccatctttactaaaaaattagccgggtgtggtggtgcgtgcctgtaatcccagctactgaggaggctgaggcaggagaattgcttgaacccgggaggcagaggttgcagtgagctgagatcgcaccactgcactctagcctgggtgacaagtgaaactccgtctcaaaaaaaaaagtaacaactgggaggttagggtgaccttactaagtagaggcattttgtggaggagtgaaggtggaagccagggtgcagtagggtgaggactggctgggcagagaggaaactgaggcagaagatgtggacagggactctgcagcgattcatggttggtcatggccgattgatacgggcgtgtgctgagtggcagactcataagtgctgagctggatttctcacccagtccttgcttctcctgagaacacctgcaggaagctgggaatgaaggagagaaggcaagggtaaggcctggaagcgaggcttctctcctgtcctgcagtttattcggtgggagaaacttgaggtagaataaaaacactgaagggattggctgtaagggagcccagtggtcactgccctcccagcccataggagtagagatcagcactcctgggagccatggacttcttcctctcaatgcgggccctggggcggcagccagcagtggtaggaaagagctcttaaccacggtgttgggatttagggaactcagggaactaggattaccctagttttcagggtaagtaaggaagcttgaagagcctgttccggaagaaaagcccagaaataggctaggtgtcsacagaggtgagggagaagcagacgttcgcccagagatggcatggtggagccagccccctccacgctggctgcacccctgtggcctgggctgttgtggctttaccagccaagccactttctcccatccccatgttctcagtgatttcccaaggcatttctggtgtcctttgggagtggaatcacgtgggttttgaaaggaactgcggtgaaaaatagaccctgacctgagggcaggggccgatggggaggccactgagccctcaggagtgtctgaaagctcagaagattctggtctgggctctgcggggggaagccccataagggagcgcctcctggtctttggtcagcttgacagagaggcccagggaaagtacctggggcttccagaatataccaaattcagaagcccacattcacccctgactgtgcttggagcaaacctgaaagttcactcccaagagcttgttccagcccattcctttattctggaaataattcttggtattgaaaggaaaactgggacaaagggagcttgaggaaaacgaaaacaaacaagaaactggagatatgctatttagtcttaacccaaacagatatgctgtttggccttaacccatgtggaaatttgtaaactttgtcaggatttccctgtgcatggtggtgaaatcatgtagggaaaaaaaaattcaccgtgtaatctctttagaagtcacaaaagaaaaagaaggttatcttgctcccaaaaggctgtaaaaagaataagtaaagtggccatagaggcctagtcttctcaggacagtgtccgggttgagagtctgtctcctgaagcgcactctggggaaaatcccttcctgccctcctgcaggtccttagggtcccagacccagacagtcactttctcaacagagtgccgtcaactcagcacacactcctctcttgagcacagagccccagagggagaagaacaaatgtgttgaaaagaatcttattaagatgtagttaattaaaatgtaatgtattgaggggaatggaggtgtcccaggtgagggctaagtcaggcaggatttttggggaaggcattgccgaaatcaccacctgagctcaacactgggtgcttctggcccctccagagttgaggtgccatccatgggaagtgcagtcccctgccctggcccaggttcaaagcgccaagtagccacaactcagaatgcctgcacgttcccctcctagccttatatcttctctctggtttcctcccacgacagtttgactttggggacaccatggtccaccaggccatccacaccatcgagtactgcctgggctgcatctccaacactgcctcctacttgcggctctgggccctcagcctcgctcatgcgcgtgagtacctctctccgggctccggaactctagtttccccctctgtgggcgcactgtcagttggggggcttaagtcaaatggaaattacatgaaggttctggaattattcaggttcctgaacccaaggagaatgagtacagacaggaggctcagcacttgtgccaggttagctctgcatggtggtcccactaaggcagtgggaagccaggatccagggaaccctagagcagggggatggcagagcaaaattcatggcctacagctgcctcttgccaaactgcactggattttgtgtctcccattccccagagctgtctgaggtgctttggaccatggtgatccacatcggcctgagcgtgaagagcttggcgggaggtttggtgctgttcttcttcttcactgcctttgccaccctgaccgtggccatcctcctgatcatggagggcctctcggcctttctccacgcactgcgcttacactggtgaggggcagtggggcagggcgggcatgggggtggatgtgtccttagctgcggtgagagggcagcttttctcccacacacagccctgcagctctgtgcaggaaagatgagctggccctgcactagcttcacctcaggacaccccagcaccggcattgccacagagtttcggaaaatggtcacagaaaagcacagctcagccttccctaggctctagggagatgtccctggtgagtggtgtcaggtcccgctccctgcctttagctgtccccagtgctcctgattttggcttaaaggggctgctggggtcttagggtttctggttttctctctgatgtgtaactcttctgtcttcagaacagtggaagcagctctggaatgtatgttaagtgcaggaaaggctagaacacgctgcaccccagctttatcctctttgttctgtcattgtgccaggggtctttgagttggacccctggcagctccattgtggaccggagggattcctggctctatagggtggaggtcggtacactcacgcagcttcttcacatgggcaggtttggggtggttctgtttgttttctttaatgaagcttgtgactcttaatggctgtgtgtggagagagcatgagttcagcctctgggactgggagagcgggggtgtggtctgggctgtgaccacctcaaaccagcgttgccagatgtagcacataaaagtacagtttggctgggcacggtggctcatgcctgtaatcctagcactttgggaggctaaggcaggtgaatcacctgaggtcaggaattcgagaccagcctggccaacatggtaaaaccccgtctctactaaatatacaaaaattagccaggtgtggtggcacgtgcctgtaatcccagctactcaggaggctgaggcaggaaagaatctcttaaacccaggaggcaggggttgcagtgagctgagattgtgccactgcactccagcctgggcaacagagcgagactctgtctcaaaaaaaaaaaaaaaaaaataggggaggggttgggggccaggcacggkggttcactcctgtaatcccagcactttgggaggccgaggcgggtggatcacctgaggtggggagttcgagaccagcctgaccaacatggagaaacgctgtctctactaaaaatacaaaaacattagccgggcatggtggtgcatgcctggaatctcagctacttgggaggctgaggcaggagaatcgcttgaacccaggaagtggaggttgcattgagccaagatcgcgccattgtactccagcctgggcaacaagagtgaaactcggtctcaaaaaataaaaatacagggtgtatttcacataaacaacaaataatttttttagtatgagtatttcccaaatgtgcatgggatatgcttatactaaaaactggggcagtctgtattttctgtggctgttccacctcagactccacttctttgggtctctattttctcctttatgttgtgattctctttttgggggtctcaaaaccccaatgtctctggaagttctggcccctctccccagaggagcactcacacacttctcctgttttacaagcataggggtctgactcactggtgtgccttagaggcccctggatgggatgctctgtggtgttcatgatctcaaggccagaagaggactatgaatgtctctcttcgttctcaaaacctgaagaaaatccagcatctgaacctgagaaactcattccccactcccctttatctttgattattctcatggctgggtgacccctgagcctcctcaaagattcagctgtgggtttttctgaatgatgggcggagagtgaggcatggaagggcaagacgtggctagggtgcactcttcttcaaaagccctgctgcgtcagtagacctggcttcctctggcctggctctctccctcctggcctccctcctccccacccagctcatctggctggcctccctgttctaagcttatcagccgacccccgcaagcacacttcctcagccctcctcagtgcacgagaacctctgaggactcactttttcttgccccttggcctcctttcttttcttttcactcctgtctcttgagccctgggtttgagggaacagtgaccacctcaccttgattccagcccacgtgggtagccggtcatctccctgggcagggcgggagcaaggcactgttgcagagcaaggccgcctgggcttgagcctcattttgttgccagaagattgcttcctcctcaggctcacctgtggcctccccgtgtcttcccaggtccccctgaactgaagtgatgagtggcaggacagcaggctccggaattgggcgacctgggttggaattccagcactgtcacaccaggcagggaacctgagcagaacattcactgccaagattactgtgagcaagtaggaagtaatgcacacaccaagtgctgccacagcaaaagcaggtgctctaggatgggtagtggctgctctgcttaaaagtgggatgcccttactgggtgcgatggctcacacctataatcccagcattctgggaggctgaggcaggcagatcacctgaggtcaggagttcgagaccagcctggacaacatggtgaaaccccatctctactaaaaatgcaaacattagctgggcgtgatggtgggcgcctgtaatcccagctactcgggaggctgaggcaagagaatcgcttgaacccaggagatggaggttgcagtgagccaagatcgcgccactgcactgcaacctgggcgacagaccgagactccgtctcaaaacaacaacaacaacaacaacaamaaaaaaacctgggatgccctagagagagggtgtctgcctggggtcccccataaaaagactgcttttagcctgtctagagtgagagaagaccccagaggaggcagaggataccatcagaatgccctcaggtgctgtttgcaaggaacagcctccccatatatgtcgtatttattttggcaataggagtattgggtaggagaggaaaaaacagtgcaaacctcctttgtgcaacttccagaatctcgtctttggagggctgttcccgtgacacgagtggggcgcctcccccaccactaaaacagaagtgaatgaaattggtgcttgtgcgccccctcctggcaaaatgcggctgtgcgtccaggatgcctggatcttccctgtggcccaggactgcaggaggcgttctgagctgtggccctcttaccaggggtggagcctctggggctgctgaaccagctgtagggatggtgctgctgttcttcctggcatccatcctaggcatcttcatacctcccactttatccctgctgtttcctgattcaagggctgccccattatacaagttctggtctcctcagtggggacaataagaaaaacatttgattcgataacatataaaccactagtgtgagattcatgcagcatcataggaaggggggtgatgtgtttgaaaacagtgagcaggctaatgtattaatctgctaattctgtctcctgagttttctctcttttcctccctcctgccacatgaagtgtgcttggcttcttacctaccataattagacatcttttcttcctcagagaaggcatgagacagggatttgattgtagttatcactgtaaacatcaaaytgatttttatgcagaactattgccccagggcataccttccaaggaacctggtctstccttacctagcgaattccacatacacatagatgtacacctacctgtacactcacagattgggtggtgattaaagggacagaatcggggaccagcttcttgttaggaatgcagtgttgccacggcatgacagcatggagcagttgagggaatggctgcccaggagaactcagaactcttgaaatgtagttccaggctgccatcattgccctgatattcaggccgtcagacagatgtgtgttgtaggccctgaacggcacagagagtggcagaacaggctacataaacagctcagcccagaattgtctttccagactgcctgccctcagtcacaacccccaccagggaagggaagcggccccaagactccttcctccttcacccactcgaggaaacagagttcctgttacgtggcatgaatgatgtcttttggccccagttaatccctctgagtcaccaggtggcctttgccaagtgctggagctggaagagatgatagagacactcatctggcgtcctgaggctctcctcacagctgttgaattctagaggtgcatttcagtgtcttggggcatggcaagactttggaggctccctgagcagagcagtggagatgcccaaaaagaaggaagaacctaggatggcagatggggccccccttgccctggggaacttcatgtttgtactttctcaggaagcacacatttccccagttcagcgggagagagtggggagactagcagggaaattgctttccagctttgtgctgggtggttggggtgagggtggccacggaaggaggtgaaatcaggctgacctcaagatagacccaagatgtcccagttctggccgctctaagtctctaaagcagcagctggtgggaggggcagtattgggcagtatgtcagggaggccacctgtctgctcacacagtacaattgatgtgcccctcccaggcatatatccctcttcctccttgctgggcccccatgggtagataaggtgactggaggggtgccaagaaaagggcggtgcccccacaggcatctgaaaacaaagctgctgctccatttgcccagtttgaagattagaatggttttgtgattagccaggagggggtgggggtcagagttctggacacctcactggagtcgggggtcagcataccctaccaaggctgacattcactcctaggtaatggcctgggaccctcaggtgacttgtccactctctggctatgtattgttgaatgaaaaggggacatgtaaatctcgtttcagctgttctgaaataacccttgccacatgggaacacagtctattcaacatgaagaattcaaacctaacacaagtgggtgagaagcaggaacccactgctaggccccaccgcgttccctcagaggtggtctcagtagctggaacttggagaagtagttttggtggggtgttgggacgtgggtgaatccaggtcctggtttggaattgctctggtgggaaccgtcagctaacgtcagttggaagctctgtgtcctccccctcctgagtcctgtttttcctggaggaccttggcccacccctgtggaatgtggggatgtggggaagaaagctgactgcttttactcccactcagaaaattcggttgcgctcttcttcaagggggtgctcctcagcctgcaccccagtgaaggggcctctgaggaactcccagtgccactggcaaacagtctgtaacytttgggccccagccacctcccagcccctgttctcttaattcctgccttcttggcttggagggaggaatctccatttgtaaaagctgagttagggaactagagggttcctgaagctttaaagcgcctcaaagccctcaccctgcacgtgacctgtcacctggagcctgccccagcccccacgcctgcctgttcttataggggctccggtgcctccagggtcacacagcaccatgtggaaactattcctcagggcagctctccttggcctttttatcccctgaatcatgcatttttctgcccttatttggtgtggtttggttgctgggcagctgtccagggtgagtttgcaggaggaagcacagccaagcagcctcgctctgcttatgggacagtcttcctcccaccctccctgagagtgaaagggccccacagagaccatcaggcatggatgctgaactgctgggaagggagctcaggctttttctttttagtccccaagagaagaattctttctcagatgtttttgtggttggagaatatttttgccattgctttgagaagacttcccctcctaactccccctctttccttggaatttccttccttaaatggaaagccttcaacattcactccaagctcgcccttttgctcccccaaggaaaaataacaagcaaacagaggtgcttgcccagtgtctctggaggggcttcccttagaggtgggctgtgtgatcccctgccaggagggggcgatgggggccacttgttcattaacgatgttaggctcaaggtaactgaactttttttgcacatgcctctctgcagagagttgtgcataaacacactgctcggcaggacagagcaagattgggaactgagggcaaatcccttcctccgtgcgtcgaactcttgatcccaggccttaaaagtgggatctctgcactctgggctttctctagctyccccagggaagggaggctcggggtgaggtgggcacggggcatctttcctgcccaactgtgaagtcctaaaaagcttcacaaagtttctattgaatgacagctttcttcttctctttctccagggttgagttccagaataaattctacagcgggaccggtttcaagttcttacccttctccttcgagcatattcgggaagggaagtttgaagagtgagtccctgtgagggccrtgtgccccatgctaccctccccgcctccctccacagtgatcagctgtgcctctctgcctgttggttgtgatctgtgggcaccagctcattcgtgtcaccctgtctgtgagtcatttagatagaatagtcctccttgggtctcccaccacccctagctttgtgtgtagtgtagtgattttctggctgtcactcatactcactgggcaccagccttgccctcttagcctccatccatccagacagcccttcccacctcctggtggtgagccagtctgcattcccacgccatcccaaagccctttcatcttccccgtgcattgtagatggaaggagcacccatgccattcacatctagactttgagttccctgcatctgccaccgtagtttctagcaggagtagtggggggagtaatacagattcttccctagaaggggacactggtaacatgtcccactcttggattagcaggggtgggtccaggaagatgatatttgcgtcttttgcccacccccctggcattcagctggacccaactaggccatcatgagtggcttctccctgtcayccccaggggtcataggatatctacaccgcctttctgaccccaccctgcactcccatcctttcctctctccccgttcatgccctgcactacatagcacagccgggatgcttggaacagaggccttggctgctccgcagtgcacagggcttccctctctcggggttggcttcttcccaggccttgcatgggccctgcccacaagcacaccctcaggccgagggtgcagactgatgctcttccctgatggagaccctgagatcttccccacccccaatcatgatgtcttcagtgtgggactggggtcctcttggttctgcctgcagcctgcctggctccgcccctagtgccccctcctcaccacactggccccaggtctcaggaggggtgtcctgggcagggaaggtcagtgtcactgatggtttgctgtttggaagccattggcagggctgccgtgcatgtggctgtgagggctgcacagtcctgccaaggggcttcctccttgtcaccccgaaccttgtaatcgtgtgctggcgtggcagccctggctaagttaatccccaccgctttcagtggtagaaagaattccctgagtgggccaggctggtgccctcctcctaccctggcttttytgagtgagctgcctggagccctcatcccctctcccaggctgggctggccctgggcggggccactgtgtgctggcccactgtgacctgacccgaccttgtgcagcccccctgccctggtgtcctgggttttcgtgatgatctttgctctgtttccagtggggtttgaagcagagttcagggaaccmtgcccaaggtcctcctgttcagacattcctatgttgaataaagtatgtttgacttccccggagaagctgcctgtcactgtgcccacagcccctgcgtcgctccaggctcagccatcttgagcccctgtggacccctgaccttcgcctccctcctccagcattgctgcttttccttctatcaaaggccacagcttcagtaggcctggctgggcagttggtttgggaaattctcaccttgtcccaagtttcccaggcgccttcccactcacaggatccaagtcagctctgcagacactacctgtgggaagaggggactgggcagcccatcttcgtctcccgtttactcattgcacatccagacagcatgggggcagaggggcactgggtatctccccacgcgcctctccctcttctccaagtgtgccctccagggcccagtggcctggctatgttgagccctgataccccggccttagtgtaagtggaggctccacacaggttcctcagggcagctggggaatgtgaggtgctgggattggcaggcggcagggtggagagcaggcagaccgtccagggtggcaggctgggcaggaggccccctccccactgcctagtgaggcactgcattctcggtaccctccctcttcactcctccctccaggggcctccagggcaggggctgcccaggaatgtgacctgggccccagacaggtgaaggggccacaaccccctgttcattccatgttccagcctaacctaaagcccttcctcctccctaacagtgctacctgtccctggtgtcggccctgagaggcccaccccacccagctcctcaaagataaggtcccgagtggaaactctggtcattgaggtctcagcttctgctcagtgggaagggaaggcctcataagaatagatatttggaatcattggattcgaattgagagtccaggaataaatcctaacatttatggtcacttgatttttgataaaggggtcaagataattcaatgaggaaagatctctctttttcaacaaatgacactggtacaatggggtttccacatgcaaagaaacaaatttgggccactatccccaccatatgcaaaaattacctcaaagtggattccagacctaaaatgtaagtgaaaacgataaaactcttaggggaaaccataggagtacatcttcctaaccttgagttagccagtgatttctagatatgacactcaaagcacaagtgataaaaaataaaaaaaaacacatagataagttagccttcagcaaaattaaaagcttttgtgcttcgccgggcacggtggctcacacctgtaatcccagcactttgggaggccgaggcaggcggatcacctgaggtcaggagttcaagaccagcctggccaacatggagaaaccccgtctctactaaaaatacaaacaattagctgagtgtggtggcgcatgcctgtaatcccagcaacttgggaggctgaggcaggagaatcgcttgaacccgggaggcagaggttgcagtgaaccgaggtcgtgccactgtactccagcctgggcgacgagtgaaactccatctcaaaagaaaaaaaaagggtttgtgcttcaaagatcagaatctagaaactgaaaagacaaccctcatagaagaaaatatttgtagatcatatatctgataaaggacttgtatctaggatatataagtaactcttacacccaataataaaaacaactcagtttttttaaatgggcaaaggggttgaataggcatttctccaagtaagcaatatgaatggccaataaacccatgaaaagatgctcaacaccattagtcattacagaaatgcaaatgaaaaccacaatgagataccacatcacacccactaaaaaggcaataagaaaattacaagtgttgggccgggcgcggtggctcatgcctgtaatcctagcactttgggaggccgaggcgggtggatcacgaggtcaggagatcgagaccatcctggctaacacggtgaaaccccgtctctaccaaaaatacaaaaaattagccggccatggtggcgggtgcctatagtcccagctactcgggaggctgaggcaggagaatggcgtgaacctgggaggcggagcttgcagtgagccgagattgcgccactgcactccagcctgggcaacagagcaagactccatctcaaaaaaaatgagaaaattacaagtgttggcaaggagaaattggaacccaattcactgctggtgggaatgtaaaatggtgcagctgctttggaaagcagtctggcagttcctcaacatattaaacagaattggctgggcacagtggctcatgcctgtaatccgagcactttgggaagccgaggtgggtggatcatgaggtcaggagatcaaggccagcctggccaagatgatgaaactccgtctctactaaaaatacaaaaattagccaggcgcagtggcaggtgcctgtaatcccagctactcaggaggctgaggcgggagaatctcttgaacccgggcggcagaggttgcagtgagctgagatcgcaccactgcactccagcctggatgacagagtgagactctgtctcaaaaaaaaatattaaacagaattaacgtaagacccagcaattccactttcttatctaccccaagaaaaatgaaatcatacccacaaaaacttgcacagaaatgttcatggaagtattattcataatagccccaaaatggaaacagcccgatgtccaccagctgataaatggatccataaaaggtgggatgggcatgatgaatattattctacaattaacaagaatgaggtactgatgcatgctacaacatgaatggacctcaaaaaccagccacagaagaccaacaatttatgattccgtgtatctggaatgtctagaatagacaaacccatagacacagatttggtggataccaggagctggctgccagatggggctggggagagagttatgatggggagtgactcccaaggagtatggagtttctttttgaatgatgaaaatgtaaagttaggctgctgatggctgcacaattatgtgaatatactaaaacccattgaattgtacactttacattggtaaatttttttttgagatggagtcttgctctgttgcccaggctggagtacagtggcacaatcttggctcactgcaacctctgcctcccaagttcaaaggattctcccacctcagcctcctgagtagccaggattacaggcacgcaccaccacacctggctaatttttttttttcctgagatggagtttcactcttgttgcccaggctggagtgcaatggcacgatcttcactcactgcaacctctgcctcccgggttcaagcgattctcctgcctcagcctcctgagtagttgggattattggcatggggcaccacaccctaatttttgtatttttagtagagacggggtttggccatgttggccaggctggtctcgaactcctgacctcacgtgatctgcccgccttggccttccaaagtgctgggattacaggcgtgggccaccgcgcccagccttacattagtaaattttatggcatataatctgaataaagtgggagtggcctaggacttccttgggaagaaattcctcccatgtctctctgatgaactgggaggaagcagggccagtgagtccttggctagactgagttctcagaatctagtggccttgggctccttccagctaaagatgggctgaccaagactgagctgtggagtgtgcaggaagtcccagagccctgtggtagggggtggggaacaggatggctgcatccacttgttcctgggggtttttttctttgtttttgttttgttttgcttggttttgttttgtttgagacggagttttgctcttgttgcccaggctggagtccaacggtgcgaccttggctcactgcaacctctgccttccggggttcaagcgattctcttgcctcagcctcccaagttgctgggactacaggcgcctgccaccacgcctggctaatttcttgtatttttagtagagatgagatttcgccatgttggccaggctggtctgtaactcctgacctcaagtgatccacccaccttggcctcccaagtgctgggattacaggcgtgagccactgtgcctggccatttgcttctgttttttttttgttgttgtttgtctgttttttgttttttgtttttttgagacagagtctcgctctgacacccagtctggagtgcagtggcgcaatatcagctcactgcaagctccgcctcccgggttcacgccattctcctgcctcagcctcctgagtagctgggactacaggcgcccgccaccatgcctggctaattttttgtatttttagtagagacggggtttcaccgtgttagccaggatggtctcaatctcctgacctcgtgatccgcccgccttggcctcccaaagtgctgggattgcaggcatgagccaccgcgcccggctgctcctgtttttaagagatgtgcctttaccctgatccccctcttgtggaaccccaggaccccagacatctgtctgatgagtctgtgccccggtccaggaaatgcccctcatcttgaggtcctagaaccagtgtgggagagggtggccttggcatgcttggcctggggagtcccaagctttgtagagataggggacaagtctatcaccaccttcactggatgggactatacttctttctgccccaggaaccttgggtagagggggcattggacctcaaagccagctggcagcctcagcatttcagatcaaagtggcctgcctcttcaacgtctcagcctacccaaggcatgtcctaggtgtaggctgctcyctggtggccagatagggaaggactcattcatcctttggcaaggtgggctgcgatctgagctgggctgtgtgataggcaggcaactggattagacgggcagagacaaagcaatcctggggtattctggagcacataagcagaggggtaggctagccaggagcaaaagatgagatgggctggagagcacgcagagagcccagccaacttgcttcacacacactactggaaaagtaatgagttgtgtcacaactcaggctgggcgcagtggctcatgcctgtaatactagcactttgggaggccaaggcgggtggatcacctgaggtcaggagttcaagaccagcctggcgaaaccccgtctctactaaaaatacaaaaattagccaggcaaaaccccgtctctactaaaaatacaaaaattagccagccaatgcatgacagtagtcccagctagtctggaggctgagacaggagatggcaccactgcactccagccatgggggacagagccagactccatctcaaaaaaaaaaaaaaaaaggcgatcaaacagtactaaaggccctattatcaaataaataaataaataaataaataaaggctttcactcacagtgtgactctccccctccctcccacaaccactgtttacagagccttaaaaaaaaagcaaacaaacagatgataatgtgttatcttgctctgtcactctgtggcctggcctgcagtgctgtggtgccatctggactcactgcagcctcgacctcccaggctcaagcgatcctcccctctcaacctccctagtagccgagaccacaggtgcatgccaccatgccgggctaatctttgtattttttgtagagaaggggttttgccatgttgcctaggctggtctcggactcctagattcaagtgatccgcctgcctcaacctcctaggatcaggggccaccgcaacgggctagacttttttttttttttaagtcagggtcttgctttgttgctgccgagaccagctgggtcagagagaccctaacccagcggcgctagaggaattaaagacacacatacagaaatatagaggtgtgaagtgggaaatcaggggtctcacagccttcagagctgagatccctgaacagagatttacccacatatttattaacagc

SEQ ID NO: 93588 - DNA, 14158 bp, Homo sapiens
aattgacaaatgggatctaattaaactaaagagcttctgcacagcaaaagaaactatcatcagagtgaacaggcaacctacagaatgggagaaaatttttgcaacctactcatctgacaaagggctaatatccagaatctacaatgaactccaacaaatttataagaaaaaaacaaacaaccccatcaaaaagtgggccaaggatatgaacagacacttcttaaaagaagacacttatgcagccaaaagacacattaaaaaatgctcatcatcactggtcatcagagaaatgcaaatcaaaaccacaatgagataccatcgcacaccagttagaatggtgatcattaaaaagtcaggaaatgacaggtgctggagaggatatggagaaataggaacacttttacactgttggtgggactgtcaactagttcaaccattgtggaagtcagtgtggcgattcctcagggatctagaactagaaataccatttgacctagcaatcccattactggatatatacccaaagcattaaaaaacatgctgctataaagacacatgcacacatatgtttattgcggcactattcacaatagtaaagacttggaatcaagtcaaatgtccaacaattatagactggattaagaaaatgtggcacatatacaccatggaatactatgcagccataagaaatgatgagttcatgtcctttgtagggacatggatgaagctggaaaccatcattctcagcaaactattgcaaggacaagaagccaaacactgcatgttctcactcataggtgggaattgaacaatgagaacacttggacacaggaaggggaacatcacacaccagggcctgttgtggggtggcgggagggggaagggatagcattaggagatatacctagtgttaaatgacgagttaatgggtgcagcacaccaacatggcacatgtatacatatgtaacaaacctgcacgttgtgcacatgtaccctaaaacttaaagtgtaataaaaataaataaataaataaataaaaaatagctttattgagatataatttacatacaattcatgcatttaaagtataccattcaatgggttttaatatattcacagagttgtgcaatcatcaccacattcaatttcagaacattttcatcactccaaaaaaaaatcctgcacctcttagctgttaccccaagcacatcagtcatggccctttccctgcatccctgctaataatctacttttaatctctatagattttcctattctggatatttcatataagtggtatcacaaaatatgtggtcttttgtgactagcatctttcatttagcataatgtttccaaagttaacttaccaaaatatgagagtttgaatttctctacatcctcaccaatattgttataatctgtattttttattatgaccgtcttagggggtgtgaagtgatatatcctccaactgtgtaactgttccttgtttatttttttccaagattgttctggctattctggatcccttgaatttccatatgttgaacccttatagcaaaacacattataatcaaattgtaaaaattcaaagacaaagaaaaaattttgaaagcagcaagagaaaagcaactccttatgtacaagtgatcctgcatcatattatgagtgaatttttcagcagaaatattacaggccagaagggaagggggtaatatattcaaagtgcttaaagaaagcaattgtcaaccaagaatattgtacttggcaaaactatctttcagaaattaaggacaaattaagatttctccagactaaaaaaaaaacttagctggagtggtttgtcaccactaggcctgccttagaagaaatactaaagagagttcttcaggttaaaataaaagaggttaaacagtaacacaaaaagcatatgaaagcataaaactcactgttaaaattaaatatataagcaaatagagaatggctgattggaagcagctagtgcatgactctcatggagaggaatgaaaggagcaagtaaatacagcacgttgaaatgaaacatccaggcacttgcattgggactaatcaaggcaacaactcgacgcacggaggatggagaaaacaaggcaagacaatggcccacccagaagtgatatggaaccagaagaacctctgccaaggaagtggtgagtgaatgtgctaccccaggaaatgatgcttctcccacagatctttgcaactctcaggtcaggagatccccttgtgaacccacttcaccagagccttcagtctgacacacagaaatacctggagtctcagcagagcagtcacttgggcacgagcagagacttgggaacagctctgggcaaagtgggagaatcaatccctgtacatacccctagcaaagaggctgaatccagggggccaagcagtgatggtctgcgggccctacttctatggcacctcacaaaataagacccactggcttggaattccaaccagccactagcagcagtgttgtgcctacctgggacagagctcccgggggaggggtgggctgccatctttgctgtttgggcgacttagcaattccagcctgcaggctttggagagtccaaaccaactgggtgcagaagggatcccgcagcagagcacagctgctctatccaaatgtggccagacaacttcattaagtgggtccccaatcccactcctcatcactaggcgggaccccgcaactgaagcctccagccaccctcactggtgttctctggctaaaagagatttgaaaactccctgggacagagctcccagagggaagggcaggctgtcgactttgctgtttgggcaacttatccattccagcctccaggctttggagagcccaagctgactggggatggaagtggcacagatgctctatgaaagtgtggtcagacttcttctttaagcaggtccctgatcctgtttctcatgacttggtaagacatcccaatcgggtctccagccacctcctacaggtgcgtttgggccagcaacagatccatacctcctgggccagaagaaggaacagattgttctgttcccagaagaaggaacagattgctgtctttgctgtttcacagcctttactggggatactttaggatactagaagatccaaggcaactagggattgaagtggaccccaagcaaaccacagcagccctacagaaaagtggccagactgctaaaagaaaaaaaaaaaaaaaactaaaggtcagcaacttcaaagattgaaggtagaagcccacaaagatgagaaagaatcagaaaaagaacactgaaaactcaaaaagccagagtgtcctctttcctccaaatgagtgcatcaacttttcagcaagagttcagaactaggttgaggctgagatggctgacatgacagaagtagaattcaggatatggataggaacgaacttcattcagcaaaaggattacattgtaatgcaatgcaaggaagctaaaaatcatgataaaacattgcaagagctgacagacaaaatagccagtatagaaaggaatgcagtcaacctgatagagctgaaaagcacactgcaagaacttcagaatgcaatcacatgtattaatagcagaatagataaagcagaggaaggaatttgagagcgtaaagactgactttctgaaataagacagacaagaatacagaaaaaagaatgaaaaggaatgaacaaaagctctaagaaatatgagattgtgtgaacgaactgaatatatgactgactggtgtactggaaagagataaggaaaatagaaccaagttggaaaacatgtttcaggatgtcattcatgagaacttccccaacgtagctagagaggctaacattcaaattcaggaaatgcagagaaccccagtaagatactccatgagaagatcgtccccaagacatttaatcatcagattctcccagtctattctcagagtatttgctttaataggacactcccttacccaaaactctacaatggtaccacactttaatcagggtaaaagtaaaagttcttataatggcccacaaggttatctatgatctggctttttgttgcctctcttacctcatattttacttttcttcccctcaatcattccatgccagcctctttagcctcctcactctttctcaaacgtgcagcaacactcccacccatggcttgccattgctgtatacttggaatatccctacatatgttaagtgtgcctagaactactgggcactcaaaagtgttgaattgaatttacaaagtgcataaattaaacaacagattttctgaatgtaggaggtataagagcacctaatggagtcaaacaatctcttcattgtacattgcattttgtcttcattctttctcttgactcttctttcatgtgttcagcaggcagaggaggtaagacgctagccaatcctaagccaaaagaacaaagctggaggcatcacgctacctgacgtcaaactatactacaaggctacagtaaccaaaacagcatggtactggtaccaaaacagagatatagaccaatggaacagaacagagccctcagaaataatgccacatatctacaactatctgatctttgacaaacctgacaaaaacaagaaatggggaaaggattccctatttaataaatggtgctgggaaaactggctagccatatgtagaaagctgaaactggatcccttccttacaccttatacaaaaattaattcaagatggattaaagacttaaacgttagacctaaaaccataaaaaccctagaagaaaacctaggcattaccattcaggacataggcatgggcaaggacttcatgtcaaaaacaccaaaagcaatggcaacaaaagccaaaattgacaaatgggatctaattaaactaaagagcttctgcacagcaaaagaaactaccatcagagtgaacaggcaacctacaaaatgggagaaaatttttgcaacctactcatctgacaaagggctaatatccagaatctacaatgaactcaaacaaatttacaagaagaaaacaaacaaccccatcaaaaagtgggcgaaggatatgaacagacacttctcaaaagaagacatttatgcatccaacagacacatgaaaaaatgctcatcatcaccggccatcagagaaatgcaaatcaaaaccacaatgagataccagctcacaccagttagaatggcaatcattaaaaagtcaggaaacaacaggtgctggagaggatgtggagaaataggaacacttttacactgttggtgggattgtaaactagttcaaccattgtggaagtcagtgtggtgattcctcagggatctagaactggaaataccatttgacccagccatcccattactgggtatatacccaaaggactataaatcatgctgctataaagacacatgcacacgtatgtttattgtggcactattcacaatagcaaagacttggaaacaacccaaatgtccaacaatgatagactggattaagaaaatgtggcacatatacaccatggaatactatgcagtcataaaaaatgatgagttcatgtcctttgtagggacatggatgaaattggaaatcatcattctcagcaaactatcacaaggacaaaaaaaccaaacaccgcatgttctcactcatagatgggaactgaacaatgagaacacatggacacaggaaggggaacatcacactctggggactgttgtggggtggggggaggggggagggttagcattaggagatatacctaatgctaaatgacgagttaatgggtgcagcacaccagcatggcacatgtatacatatataactaacctgcacattgtgcacatgtaccctaaaacttaaagtataataataattaaaaaaagaaaaaaaaagaataaagaatatctctacatactgccaaaaaaaaaaaaaaaaaagattcagatcactcccctcccgcccccgccctatatgttgcctgcctcggcctctggggcatggagcacgcggcccagccctggcgatggcgacggcgacggcgacggcggtggtggaggagcgcctgctggctgcgttcgcctaccttcagtgcgccgtgggctgcgcggtcttcgctcggaatcgtcagacgaactcagtgtacagccgccacgcgccacccagccgcaggctccgagtgccggcgcgggccacccgggtggtgcagaagctgccctcactggccctgccgctctaccagtacaccagtgagtccaccccgcgcctccgcagcgcgcccagctgcatcctcctggccatgttcctcgtccactactggcatcggtgcttaatttacccatttctgatgcgaggaggaaagcctgtgccactgttggcrtgcacaatggcgattatgttctgtacctgtaatggctatttgcaaagcagatacttgagccattgtgcagtgtatgctgatgactgagtaaaagatccccgttttctaataaattttggcttgtggttaacgggcatgttgataaacatccattcagatcatatcctaaggaatctcagaaaagcaggagatactggatacaaaataccaaggggaggcttatttgaatacataactgcaggcaactattttggagaaatcatggagtggcgtggctatgccctggccagctggtctgtccaaggcgcgacttttgctttcttcacattttgttttttatctggtagagcaaaagagcatcatgagcggtacctccggaaatttgaagagtatccaaagttcagaaaaattataattccatttttgttttaagtgcattttcaacgaattaccttcaacttgaagctttccaatggtatttttcaatggactttgtaaataagttatatctttgtaattttcctgctacttcatcattttcaagatgtcctctaggaattttttttctagtaattttgcaagctacctaataagtacctaaataaactgaaacggaggttgaggtatcctactgtgtaacaggtcagaatttcaaactccgggtaataactgctgacattttttctaatttcaaatttacctcttttggctatgtcttgccaagggtgtacaagactagaatttgcaactgtctgatggcattttcagtcaaactccaggtaataactgctgacattttttctaatttcgaatttacctcttttggctatgtcttgccaagtgtgtataagactagactttacgactatctttgatggcattttcagaacaataaatgtcacaatcccttctatagccccctacggtgatcccttcaaggtcaacggcagtgttgcttccctttccctgtagggctgggatctgtcttggagtcctctctcggaggccacagaggccgggggtagccattgtgaagtcatggcctgggggaaagttgccaaacttcgtgtcaggtgctgtgtgtaagtggagaacttggggatagaggaggaagctccttgtggcccttctaaggcggggcaaaggcatctggacttgttccagcccagcccaccgggtgacatcaccgggcagggaggggtgctggtggtggttcatagggagtaagctgctctgcctgtgtgagtggctcctgggccctaaacaagcacctttaggccatgggtcactcaccatgagccatcaatatgctctggtctgacatggtttctctctgtcttctagtctagacctagtcttttgttctgttccccaggtatggatatactagagattgttgtctgtgaaatttctcctttgtagagtttgagttttcccttgtagtgtaaagaatgatcaccttctgtaacgatagcaagaccactttttaagatttatcctctttgttctttgttgattgaaacataataattacattgttaaaattctctacagccttctttttcttccatagctaatcttccaatagtttttgctttctgtttcgctgttgttgctttgcaaagctttcccctcatagcctgtatctgttatcaatataaaataatcttcctgttgaatgcttcatgacttgaattctactttgataaaaacattgccatactgctttaaaaaaaagattcagatcacagcttctttcttcattgggagaacgggcactcagtctgctctgcatggaaaccaacgtctttgctcattcacatgtgcattcttgggcatctttgaaatatgagtatcatcttcctttccagtttgcagagtaacaaatgtgtttagagagcacattcagtgagttttctgtctgaacattctttctgaacataatcagctatttagaacatgactcactcatcaaaaacattggtgtagtttggagaaacaatgttcagattgcagtttccctcatcctgctgggtaaaaccattgcctttggtctggcacatgtgtacttgcattacatttaatttaataaatactcatagctgaatgctgatttaaaacctgggaagacacacttgggtgtttacagttaaaaacattgcatacaactaattaaactcattcttaacctttttttctcaattgacttttcctcattgaacatttatgtgcttacagggtcattctattataatcctctgtaatcttctgatgccagatctgacattcaaatacgactgtcctttctgttggttaccttttaacattgcaatgaaattcagtggatatttagttttagaccccaagctgcattaatctaatggatctccacattttagaatatccttcatgtatatatcataagtgagagaaataagtgataaagaatgaagagggcagatttgtcagagtatcaatgccttggggttataaaaatgaatttttaaggacactgctcatattcatcatgtctaagagaaagtgacttcgtgtcaaatagctattggtagtactttggaatcaaagatgtcagtggggatgtaacaacttatataaaaaatttcttctgtaaacactcgtattggtgcaatcatcactttttttttaacctttcaattttttatcttatttgactagcctgtaaaaagtgttcagataggggcaacctcatttatcctgaagaaaaagcatttactattaaagagtttattaggcaacgagccctgggacttttaaaatggaagaactgatgacacgttcttattttctgggtaatttgttttctctttgctgtgttctaacctctatctcagaagtgttttcttagtaagctaaaaagatcgtaggtctctatgtggttgtggcacttcattatagttgtaaacacttttaaagactccaaactctttcacatacacaagaaatatttctctctgaaaactcaaggaaaatgccatgatcatgttaaataggaatcaggttagagaattatgatctatttttctcagcaaagagttgcaagcatatatgtgttagtcttggaagattccatgattacttcctttcctatgctccttcgttccactcccaaatccagtaagtcatctatccaaaatctttcctaatgatagcttttacacaaatcaactcctttttgttcctaataccttattcttatgggttgaattgtgtcctaccccgcaaaaagatatgtttaagtcctaacccccagtacttttgaatgtgaccttatttgaaaatagggtcttttcagatttaatgaagttaagataacgttcttgtaagaaaagagacacagacatacatagaggaaagacagtcatgtgaagacagaggcagagattggagttatgctgccacataactccaggggacaggggcggaagatgggagaacagtggggaatctagtgcaataaaatataaataaaagatgatggtggcttagactaggatggtagtgatgggtgataaaaagtcagattctagaaggaaagaaaaaggaggagagggaaggagggaaggaggaaagacgggtagatattatggtagagtcaaactaattttctggtggattgcatgtgaggtataagaagataagtagcagagaagaatcaagaagcgctccaaggttttgggcctgagctaataaaaaggaaggatggagttggtattaaataatatatggaagactgttagtggagcaggtctgagggatgggtgaagctcaggagttctgttttcatcatgttagttttgagacgattatgagatatccaggtagatatgtcaagtaagaagttggatatacaaatattgagtttagtggagaaatttaggcaagagctatacatttggcagttagaagcacatataaggtatttgaaacaaacaagataatgaccttcagaagaacagtttagtagaatggtgagggtgaatgcctgtttggagtgggttcaaaaaagaatgggaaaagatgaattggagacagttagtgtagacaactccatgaattcttatgtaaagggaagacaggaaatgggattataagtggggtcaacaaaaaattactttaagctgagaggactaatagcatgtgtttatgctgaagaaaaatttatccaggagaaaggcaaaaacacctgagggagaaaggaaaattgctgaagtgatgtctttgagtaggcaagaggaggatctaatgtagagttggaagggttggccttggataggcagaagcaataagagttcatcttttgcgataggatagacagcaaagaatatgggttcacacaaatgcatgtgggtagatgttttagtaggagtctgcagaagttttcttctaaccatttcagttttctcaatgaagtaaaaaatatgaacactaactgacagagaagttgagagaggaggtgttgggtgcttgaggagagagaagaatgtgtgaaatagtcatctgggagagtgagtgtacaaactagactagaaaaaagtggtgggatttgctagatggtactaagggcccacttgcagttcaggaaaccagtcaacaaggctgtgggttgtctccagttattttcagttgcacagttgaatacacagagaagttggatttagccaggattgtagttttgccatataagagatggaggcaattgattagagggtatgttttacaaaggatccatataatgattggccatgcaatttaaactgggaaaggaagaagaagaggatatgagacaggcgaaggacagcgaaccatggtagagcataccatggctagactcttaattccatctccagtgctgagaagaactaaaaaaaaaaaaaaagaagaggggtccagtaaatcatgggaattgtattaatgccctttagcttgtagagaatgtgccagtacataggtccccatgggacctcagcaatatgatgatccatcagaattcaccaccttttccaaaggaatgtgttgagttgaggagatgagttaatactcacacaagtgaaatgcaaccctggcttggtagaggggtcctgatatgtttaacaggactttaggagagaaaatcttcaacatagatttttctgcaaatacccatgtagcaccaactgaatctccaccaataataccaattcacctaatagaacttcagcactgagactacagaaacaatacccagagctcatactgcatgcaactggggttaaaaagatgaacctagaaaaagtggtaataatgtcaaagttcattgtcatgcattaataaagagcaaatagaaggttcagccaaagctgccaataataagcaagggcaaaatgtaaaattataaagtaactatgcaaacatacaattacagaaaagtagggagggaggggaaggaagaagagtggaataaagggaaaacttaatcattctggagaaaaatataactaaacaaacagaaacaactttttttttctggaagggtttcatgctacaacaacaaaaaggaaataaaacacaagttaaaatagaatataataaaaccagagaatgaaaagagagatgatggagctaagaaaatgaagtgatatgttcttaatacaggctgtaatatataaattggaaacaggaggaaaatagagtcaatctaataaaggaaatttttttaaatgaatgcaaatgtacagaaaaaaggtattaaacaactaggtgaaagataaggaagacagataaaggtgatcctatgattgggtccctgaaataaggaacatttccatgaaggaagaattggatcgtctaatcaaaagggcacaccatatattaaggaacactcacacaatgcaaacatcatcaaaacatattctggttattaaaactggagtatgaataacaattatttaagtagtcaggcagaaaaagcaagttatgtgcaatgggggaaattctccctagcctcagactcttctgtagaagctttccatgctagaagatagagcaaagtcataagggaaagtaaatgtgactccaaaatactttacccagacaagttgttcaagtgtaaaagcaacaggtagatattctcagatatgaataaattaaaatttcaggaaatatagccctaatgagctcctctttaaaaaatactacttgaggccaggcacggtggctcacgcttgtaatcccagcactttgggaggccgaggagggtggttcacaaggtcaggagattgagaccatcctggccaacatggtgaaaccccgtctctactaaaaatacaaaaattagctgggcttggtggtatgcgcctgtagtcccagctatttgggaggctgaggcaggagaatcgcttgaacccgggaggcagaggttgcagtgagccaagatcatgccactgcactccagcctgggcgacagagcaagactgtgtctcaaaaaaaaaaaaaaaattactacttgataatgaaatccagccaaccaagagggaagtccaataaggaactcagaacaagataaaataaaataatgggacagtaagtattgaatccaattaaatatagaacttcaacaactgaaagaactgtgattgcagaacagcttgtaaatagtataagccctgatgaaataaaaccaaaacaagccaaaaaaataaaaaatgaaagctagaggggagggaaacggaacaagtggcaagataactaagtagctgattttataaggtcgtgagctcagtcatgttgtttaaaattgagatatggaaaaaagtaattcactaaaataaataaataaaataaaattgagatatggagccctacaagaaagcattacttcagtctcctagtgcatctttatactgtgtctgcttgccttaaagggatattttaggaaccaatatctcttatggcaaatacaggaaaaaaaatttaataggttttattattaaaataacatgcttctgtatcatctttttcttttttaaattttttattttactttaagttctgggatacatgtgcagaacgtgcaggtttgttacataggtatacatgtgccatggtggtttgctgcacctatcaacccatcatctaggtgatccttttcttttaaatttgtttctatctctgcacacctacacatccattcatccttctatctgtatatagatcactatctataattatgtccacaatgtatgctatcatcactcacctctaaacattgtgatttgatatttttaaaaatatattctttgtactgttttatattgcttgcttgtgtcatttttaaaaattcctgcctattaaaacgaattagagggtcactgatggtcgagaggaaaaggagaaagacagttggcaaactatttatttttgactctaacatgagactttataagtttcccatgtcaraactctttacaaggtcatcactttggtcaatttcaaattgatttgttattaaacatgtgctgcctatactgttccaacatgtaattctttctccttctgcttgtagtaaaacaaacccttgccaagagaacactgacagaagacataaattatcctgtgagttaaaggggcaaccaaggtttctattgtttgcagcagtggttaaggagctgttcagaggtagaaaacaaaaggatcctggtgacatgataa

SEQ ID NO: 93589 - DNA, 13212 bp, Homo sapiens
ctctccctgctggctacatacagtggggcagagaacagccggcctgagatcctctgcatttattccattcatttctctcctccctccttccattgcccacccaaccctgccctcctcctgcagtcctccaaggctaggccagctccagctggcagcttttgagtggactcagggtgctatttgtggtacgtgtgaaggtgtccacctcaggcacgaacctctcagcaggcacggtcagcttgcgccgygtgtccatgcacttggtgtccagcagcatggagttggccttgcaggcaatgtcagcctgcagccgggccaggtgcttgcacagggcgtccagtgcgtccctagggaaggacattgacaaccccccagcccccatgaggctgggaggcctgggctgcgtgcatagccttcagtcaggaagacagccccagggagccagcagccagcaagaggccccatttgtgggcagcgtctcactgctccttccgcccactcccgagacctactgtgcttgcgccagcttctgcttcagggcagcgatggttgcctctagctggtgaacctcgtcggtgaggccgtactgtgcctggaggcagaggggttgggagttccaagtcagccacactgtcctttacctgagtgctgccccttgacagcagtgcccttgctccatcaggaatatgagaaaaccttggctagggggcccgtgcgccactgggacaccctctcacctggtcccggcagagttccacgttgggccggtaggttctggcctctagccgggtatgggacagcttcaggctcaggagctttgtgcgcagatcctcctccaggtgccggatgtcctcctgcagctcagcgatctcctccaaggtctgcaggggacagagtgactggtttccacctgctggactcacgtgcatgcctggtccagtgcctcctggcgggggcatgcggcttctcatcccacagcaggaagtccaggcccctggagatgctcacattcttctcttgccacttgagctcactgtacactttctccatctcccgcagccgcttcctgaaggcaaattccgttgcaactctctgggcttcaagctcgttgttggtctgaaggagaaaacacagggcaaggggagggtctacactcagggctgcctgaggatattactcaagcgaggggcagggggccacatgcacagcagggaacagaagataagggctgagcgcacactgggaccatccattagctgtgggtggcctgtcacctcagcaatagttagagcagkggcctccctcagctctgtggctgccttcatctcagcctccgctcggtccttgttgaaccgactgaagtcatcccactgctggagtgtggtggagctgcaggtggcagggaaaatgggggtcatgagggtgtggcctgggaggggaggagaagagactggctgaaacactcttcttaccyatcaggtacacgtgtggggtcaaccttcagcgagatgtttggggatctgaggttgagagagagacagcctctgtcgatctctagtgtctccattttgccccgatggtcggagttgagctgctgttggacttcctgcaagaggctggggaaagcgcagactccatcaggaccatcccccaagggccagaggcaggcctcactgtactaaagggacaccacaggaagaggaggctggggtgacccttcccagcagaagacaatggagcttcagccactgagaccaagagcagcacagctggatgaaaatgctgcccccacatgccctacacaccgtaggataaaaatgctgcccccacgtgccctacacacccgcaggatgaaaatcggatgaaaatgctgaccccacgcgtcctacacacccgcaggatgaaaatcgagtggaaatgctgacccccatgagccctatacacctgcggggcacacggatgtagctgcgctcacaaaggctcatacacacacactcacaggagctactcaggggtggtggcaaacgggtgtcacctctcatgcttccaatcagtggataccggctgcccagggcagggtcgtgagaagtattctgagcccatgtccaggcagtgggaagagtgctacaattgattagtggtttctgtcacaggcaccagagggccaaaatgtagcacgagagccagttgctcctcatccacaatacctgtgttccacattgaaggcacacagcctccaggggcccatgaacatgcggacgacctgcctctcccttaccagagctgctcgaaggcctggctgaccttctgttgcaaggccttcttggtggcctcgatgacctccacctctttatgcagctcatcctccacagggtccttcaccacatcaatgtctcgccggctttcccgcagggtcaggcactcartggccacatccagaggcaggttcttggcctgcaggttttgctctgctgactccttcatctagaaaagagggcgcggccgggcacggtggctcacatctgtaatcccagcacttcgggaggccgagttggatggaacacttgaggtcaggagttcgagaacagcctggccaaaatggtgaaaccccgtctctactaaaaatacaaaaattagctgggagtgatggcgcacgcctgtagtcccagctactttactcaggaggctgaggcaggagaatcgcttgagcccaggaggcggaggttgcagtgagccacgatcacaccactgcactccagcctgggcaacagatccagatgctgtctcaaaaaaaaaaaaaaaaaaaaaaaaagaaaagaaagaaagaaaaaaaaagaaaagaaaagagtgggcgggggtgctggtggggccatccatggggaagtagcgcttgtccccactttagcagggggccagtgactcggatggacatgccactcatgaccccccatcaagggcttctcaacctagctgtggggaaggaggggaggtttcggcagcagcccccgggcacccagtcctggatccctgcctgtgtcagggcatcgatctcggcatctaaatctgtcagacacttgtccagcatctccttccaccggttgacagtatcaatcctctccaccagtcgagtcctgttgtcatgttcatcccaaatggtctgagagagacagagccagatagagagggtgtcaaggggttgggggctatccctttgcccacccagctgagttcccatccccaacctggttgttggtctcgttgcrgagcacccgggcctcctggcggatctgatgggaagcatctcgctgcagctgggcattggtggatagcaggtagctgttagtgtgccagtcgggcagctggaagcgccgacttggcttgacgctcagcgtggccatggcacagaaaccagaagggtcagaaacccctaggcctgttcacagacaccacctgcagagggaaaacactgctgcgggagacctttccggagacctcctggatcacacgccccctgcgcaggacttgttcctgtccattttgctctgagccctgtcctgctggaagcctgcttggagacagcccttgctttactcaactttgtgtgaggtattaactaagtttccctccctcccgtccccaggcggacacaaacccctggaccttgcaggtcctggagcaggtaaaaaggaataatggagtcccggaagcctcgaagtgtgtgtgaagtgccaaatgcctggggggtaggcggatggcagaaaaaaattgcccttaatgcattttccacacctgcccccagccaaccatgccttgttgatcttcctttcctttcttccccaggctgcgggccagtccccgtgggggatctaagggcaggagccctgttctgtctccagggacgcgtgcctgttggcactggggagctggggggcggcccccggggcggccccctccccgtctggtagccgccacgccctcccgcccctccgccctcgcctactgttggaggggaaggccggacagggagagccccgtgggaagagctggggtcagtccggttccccgtcaaacccctttcttcccctccgcaggatgatcgcctttggtttagatcagtaccccggtccagcgcggaggaagggggcgcccccgcttccctagctcccttacctcctttcccgcttcgctctccgcgccccccgctctgagctccagtgtttggcaccaccggttgctaggcaaccacccctcccctacccccccaaccccccgcggccaacgcggcctgggcgcttcgcttggcaaccgcggcggcgtcgggcggcgtccccggaggcctttagggtaggcgaggggcggccggccgagcctgggagaggtggggggcatcagggcagcgctttcacttgatttacaaattaaatgaacatttgttgtcttttcagacaggatctcgctctgtcgcccaggctggagtgctgtggctcagtctcggctcactgcagcctgaacctccccgactgaagcgattctcccacttcagcctcccgagttagctgggaccacaggcgcgtgccaccacacctggctaaattaaaaaaaaaatttttagtagagacagggtttcaccattttgcccgggctggtctcaaactcctggcctcaggcgatccacccatcacaacctcccaaaatgctgggattacagatgtgagtcactgccccggcctaaacaattttattttgataaaggtatgcatagacaygatagaaaatacgaaaccaagtgcagtggctcacgcttgtaatcccagctactccagagacccaggcgggaggagcgcttgaggctaggatttcgaggtcagcctcagaaacatagtagttgccagcaaacgaacagtacatagaaaaagtaggctgggcgcagcgactcaggcctgagatcccagcactctgggaggccgagaccaggtggatcacttgagtccaggagttggagaccagcctgggcaacatggcgaaaccccatctctacaaaaaatacaaaatttggccaggcaaggtggctcacgcctgtaataccaacactttgggaggctgaggcaggtggatcacctgaggtcaagagttggagaccagcctggccaacgtggtaaaacgctgtttctactaaaaacacaaaaattagccaggtgtggtggcaggtgcctgtaatcccagctacttgggaggctaaggcaggagaatcacttgagcctggaggcagaggttgcagtgagctgaggtggtgccactgcactccagcctgggtgacagagtgagactccatctcaaaaaatagattaattaattaaaattaaaatcaggtgcactccccagcaggtcccctccagcaatggatggatagttaatgttgtttacaacatttcttctattctgtcttgcccaacaactttgcccatcttgaaggtcatacaaggaatgataaagggatgataatcatgtttggagagggcacaaccctgagagaggtaactggggtatgagaagcaatgctctggtggcacacgcctataatcccagctactcgggaggctgaggcaggagaattacttgaccctgggaggcggaggttgcagtgagctgataacacgcctctgaactccagcctggggaacagaacgagactctgtctcaaaaaacaaaatgaaacaaaacaaaacacaaaaaaaccagagaagcaatgctcaatattcaaccatttctttaaaaaaagaagggaaaaaaaatcatgtttgtcttattgtctagtactgtattgtctggtattgcctagtatttctaggggttggaaaaatattaacatttaatcttcacaactaataggtgaggtgggcattgtccccactttcttaggtaacaaaagagacacactgctaaaaagcagggagggaaacccaggtgttctggccccacccagaggacactctgctgtgctccacactgcctctcatggggggctgggatagagaggaagacaggtgtgcaggcctggtcctgttctgaggactctgctgaaccggatcctatgaggtgggtactgttaccatcttcactttataggcagggagactgaggcataggccagtgaggacgtgcccaggtcacatcactaacaagtggtacagcctggattgaaacccaggcagttgggcccagggggaaagaagtcccagaagggtccttcagttgtaaaacgtcactggggggatgggaagaacagtagagaagcaagggcttggtaggcaattgggggatgaggttggcttttgagcagtttttgagcagtttgaggtgtacacagtggatccagctgctgcctagcaggcattggggttgtttttttttgttttgttttatttggttttttttttttgacagagtcttactctgttgcccaggctggagtgcagtggcatgatcttggctcactgcaacctctccttcccgggttcaagtgattctcctgcctcagcctcccgaataactgggactacaggcatgcgccaccacacctggctaatytttatatttttagtagagacggggtttcaccatgttggccaggctggtctcaaactcaaactcaggtgatctgcccagcttggcctcccaaagtactgggattacaggcgtgagccaccatgcccggcctgacttgttaattgcaagtctgtcgttcagcaggactgaagccagaacactaattcccaaactcccttcattacagagtatttttttccacaggttattttgtaaactctaatatatgacttgtaaactggacatgaacaagaatttgtgatatagcctctttaccaggattgaagaagatagaaagaaaaaaatcttggacaaattaattgcaggaagaaatgatcaaattttggcttacatattttgcaacagtggtataayacaaagaagtaagcaaatatggcagaagtgtggtggctttggcgtctacttttgaccatagtggtggccctgttattcgtggctcccggggttcctacacatccttcccgatggaagaaggggttggccaaaaaggtcagccagctgatgggttggaccaagaaagacagagtgataagaatgagtgacaccatgttctatcattttgtattagatgcaccaaaaaactattctgttattgtgatgcttactgctgctctccacgcgttcagttcatgtgtcatgtgcaaaggtgctgctgaagaatttcagatcttggcaaattcctatcaacgccctggtgcattcaccacaaaggtattttttgcaatggtggattatgatgaaagccctgaggtctttgaagcgctccaggtaacgtcagttccgagtttcttccacttttctgcccaatggaaatttacaacagatgacatttataatttgagaggaagggatattgttgctgaccaaatggctgaatgggtagcagaaagaacacatgtcagcgtcagaatcagacagcctacaaataaattatcatggtctcctcaagccagggatacttctggctctcattggtggacttgggtatttcttgaaatggaataggaaatctatttcttgcagaattttgtgcgaagttttaactctgtgctttgtgattgtgatgacgtctggtcaaatgtggacttatataagaggagaaccatatgtccaaagggaccctcacacaggacataaacattatatcagtaaatttagtcaggctcagtttgcagcagaaacattcattatttccctgtttaatatgtgtgttagcctgggaatggtgctgttagacaaggctgccacctctacgatgaacatcagaaagagaaagatgatgtgtctggctggtatgtgtcttgttgccatattcttcagtcggctgctttccctctttagatttaaagtacctgactatccatacagctttgtctgggattaaaaaggatcctacagacatagacaatgaagcaagaaatttgaaaaaaaaaatgtgaagcagaaaaatgcaaactcatagctttttaaagtaattgagatttcaccaaaagagaccataagtgctttaagtgctttcaaaatctgtcaagtattatggtatgtatcttctctgttcttaatttttctccccgagtgttatagattacctcaagtccaattattaaaatctttagagagtacaactttcatcgaatcagaacaatgttttacaatgtttaaaagtaccttagttaatattaatatttggtcagctgatcttattctaatatgaaaaataatcttttttcttttctttttttttttttttttttttgagatggagtctcactctattgcccaggctggagtgcagtggtgcaatcttggctcactgcaagctccgcctcctgggttcacgccattctcctgcctcagcctcccaaaaagcggggactacaggcgcctgccaccaggcctggataatttttttgtatttttagtagaaatggggtttcaccatgttagccaggatggtcttgatctcctgacctcatgatccgcccacctcggcctcccaaagtgctgggattacaggcgtgagccactgcgcccagccaaaaaataatcttttttctttttcttttgaggcaaggtctccctctgttgctcagactggagatcagtgacacaatctcagctcactgcaacctccgcctcctgggttcaagcgattctcctgcctcagcctcttgagtagccgggactacaggcgtgtgccactacgcccggctacctttttgtatttttagtaaggacggggttttgccatgttggccaggctggtcttgaactcctgatctcaagtgatccacccctttgacctcccaaagtgctgggattacagacattagccacagtgcccggccgaaaaataatatcttgacaaggtattcccacacctggccactgaagataattattatccctctatggcagtgtacatttgcagtctgttttgtgggcagtgtacatttgcagttgtattatcttgtcccctgaagtttaaatacctatgtttagagtacacttccaaagctcagaggcaaatacatacttcttagtactactacatatccgtctctcctattggaatacactagtatgtttctttttgtttttttcttttaccgtgctttttttttttttttttttcttaagacggagtttcactctgtcccccaggctggagtgcagtgagtggcatgatctcggctcactgcaacctccgcctcccaggttcaagtgattctcccacctcagcttcccaagtagctgggattacaggcacacgccaccaagcccagctaatttttgtatttttagtagagatggggtttcgccatgttggcccggctggtgttgaactcctgacctcaggtgatccgcccgcctcagcctcccaaagtgctgggattacagacgtgagccactgcgcctggctcttttactacgcttcctgatagttgtagaaattacaaaccagttaaacaccagattacaatttatctttgattattaactaccttttatctggaaatatttcagatatgttatcttttcttatttttctttcatggggccaatctctaacaaaatagtatttcctatttctgtgttgactttgttgacttgaggttgttttccatttactttaaatctaagagaaaaataggtataaagacaattgagaagataaataataatttcattcacccattctatttaggagcctgctaaaatatcaagtcatttccaaaatggagaaatacaaagctgaacaccctaatagtatttttgtaattttagtaaaatctgttccatttcagcctttcttccctcttagtggaaaaacaaagtacaaatttaaagacgttttccccctttatcctccttctgtcatatgtaaagtcctaaacatcttactaacatacttggcaaattatagcaaagatttaagtggaggatttttttgttgttgttatttatttattgagatagagtcttgctctgtggcccagcctggagtgcagcagtgtgatctcgggtcactgcaacccctgcctttgccttcaagcgattctcctgcctcagcctcccgagtagctgggattacaggcgaccgccaccacgcccaactaatttttgtatatttagtagagacggggtttcaccatgttgaccaggctggtcttgaacttctgacctcaggtgatccacccgcctcggcctcccagtgttgggattacaggcgtgagccaccgtgcccggccctggcctgttgttatttttaagacagagtctcactgtgttgttgcccaggctgcagtgcagtggtgtgatcttggctcactgcaacctgtctccagggctcaaacaattctcctgcctcagcctccctagtagccgagattacaagtgtgcaccaacacgcccggcgaatttttttgtatttttagtagagataggtttcaccatgttggccaggctggtctcgaactcctggccttaagtgatctgcgtgcctcggcctcccaaagtgctggaattatgagccactgtgcccgacctgaggtttgttattaaatcaaactccacccttctctctggaaactgccattttaagaaatgtgagaactgtccacgtgaaaatgtttttcaagcaacaacaatataatgtcacattagaaggattctgtcttaaattgggactggcttggctatttacagtcaagtaaccctctttcaaggtctggtagaagatttgaaggttttatgtgagtgtttgccaagggagttgagtttaattattattatttttaatatttttattaaaatattaatatttttattaaaatattaataatatttttagcaggaggtgactgggaatagttgacctctctcacagacattttttgttgttcattactccataggaaattgcttaactttgaccttttttccagcttgcttttctgctggtcctgtacttgtctcaggccaaagaaattcatgctgagattgtcaaggccgagatttgggtgaggctaactcattttgcatagcatactagtcagagaaataacggcccacttcaactacacggctgcagatgatttgctctggaggttaaaacaatgattcctaccaccccatctgcccttcttatcttcaaaacccactctttttccataagaaagaaaagtcttcagggtaaaataaatggcaagtaactttgctgcattcagtaaagtgatatacttttgtgcagattttcagattaatatctaaagaatcttagacaacagtaatagttttatgaatggtctagatagcacctatgaatatgtatttttaaatacgattcaaagggataccacagatggcaaactttcatagtctaaaatctttatacaagcacaaatataaattggaaaaaattaagattaaacttacaaaacaaaatataaaaagatggttaatctttttttttttttttaaacagagtctcgctgtgtcgccgaggctggagtgcagtggtgcgatcttggctcactgcaacctctgccttctcgagactgcctcaggcaacatggtgaaaccctgtctctacaaaaactacaaaaagcaattctcctgcctcggcctcctgagtagctgggactacaggtgtgcaccaccacgcttggctaattttttttcttttttctttttcttttctttttttttttttgagactgagtctcgctctgttgcccaggctggagtacagtggcgggatctcggctcactgcaaactccacctcctgggttcatgccattctcctgcctcagcctcccgagtagctgggactacaggtgcctaccaccacgcccggctaatttttttgtattttcagtagagacggggtttcaccgtgttagccaggatgatctcgatctcctgacctcgtgatccgcctgcttcggcctcccaaagtgctgggattacaggcgtgagccactgtgcccggccatttttatatttttagtagagacaatacaaatacatttttgtatttttatacaaatataattatacaaatacatttttgtatttttagtagagacagggtttcaccacgttgcccaggttggtctcgaactcctgacctcaggtgatccacccgccttggcctcccaagtgctgggattacaggtgtgagccacgacgcctggccagttaatcttaattttacatgtgtataaaatacatgtgaaaaccatctgaatgctggtgctgactgaaatcctgtctggtgcagcatcagaccattcctatggtttttttttttttatttttgctttggaatataatatgcaaattctatttagcaacatagttacagtaaaggaagagtaatattatacatttaatagtttcaagtgcttttgttttgtttttgacactgggtctcactctgtcacccaggcttaagtgtagtggcacatgcagcctccatgtcctgggctcaagtgctcaagtgatcctcccacctcagtctcccatgtagctgggactacaggagcatgtcgccatgcctggctaatttttgtagtttttgtagagacggggtttcaccatgttgtctggggtggtctcgaactcctggactcaaacaatccacccaccttggcctcccaaagtgctgggattacaggcatgagccaccatgcccagcctcaggtacttttgaattggcctatttttaaaatcatttagcaaagcctattaaaattttgtttcagttgagaactgaacatattggacttcatgatactaagccactaaggtatctgttttgtttataattataaattttgaaccccagcgttattcttaagaaaaaaagtctttttttgagactgggtcttgctctgtcaccacactggagtgtagtggcgcaatctcagctcactgcaacctccatgcactgcaacctccgcctcccaagctcaagtgatcctctcacctcagcctctcgagtagctgggattataggttcactaccatgcccagctaattttttgtattttttgtagagatgggatgtcatcatgttk

SEQ ID NO: 93590 - DNA, 53114 bp, Homo sapiens
taaaatttagataatacatatatttctcctacacaccacatatctattacacaactgccataaatttaacaattgagcttacattcatttgtattattacctatatctcatctattaaatctgtaacagagtccattgccttcaatcttctggtacctaccatttatgctaatgacttccaaatgtaatctctccagctgaacttctccctggaatcccagtctcgtatatgcaaggtagctccacttaggtatctaattcatatagaatctacatatccaaaactgaactctcaatatctacccccaaatctgttcgtctcaaagttttcacaattaatggccttccagatgctctggccaaaacaccttgcatcatccttgacttttctttctgtcatacctcactgccaatcagtcagcacaactctttggatcctccctcaaaatccatgcagaacctgaccacttgtaaccacaccactgctaccaccctagtcttagccaccactgacttttatctagtttgttataatagtctcctaactggcctcttcctctaccttgcccagaagctaacccaagtcagtccatgtcacttttctgctcagagccctccagtggcttcccatctcacttcagagtaagagccagtgaactaccaaatgctacatgctttagccctctgttacctcctagcattaacccctgctcctcatccacctacccctattcaaactcctgggggccagatgcattacaaatgttagggttttttttattattttgaaacatgctatggtaaacatactgtatataatacataatttccagaaaaatctaggacagaaccccatatttaatcacatgcatatttatgtagtaaaatacatgactacgatcccacataatttaatctcatattaaatgggataaagactataaacagctttaggtctgttattgctgccaaactagttactgcaaactagaaaacaaataaatgaacaagcccaaaagcaactatttttccccagagatttttagattttgaaattgcagagtaagtcattgtggagctatgtcttctccctgtctccattccctgggccctagtcccggtgcctcctcattcctcagtcacagtaggctctctgcttccttgcagagtcttgtgctttccttccctctgtctggaatgctgtcccacacatctgcatgcggtttgctcctctcccccccaggtcttgatgcaaatgctaccctggacaccctatttaaactgcaaacccctcctcacctaaacacacaaacaccctcatcccttccctgctttaggttcctcctagcacctgtcactgttttaatgtagccatttttgaaaaacgtattcttatttattgtctgtctctacatcccctaactagattatatactccatgagggctagaattgttttctccaatgctgaattccagtgctaatagcatctggcaaataataggcacaaacaaatatttcttgaatagattatcgaacctactttccagcttttctatgtctttggaaaagcctgctcacagtaagatagagaagtgactcctttagagagtggaaattaggaagataagaactaatatgccaatttacatgatttcttaaccaattaacactagcttcatgtaatgtgctgtttttcaaatgtttctttaaagaattcttaggccaaaggggaaataaagcatttcaactagagaatatattaaaatacaatgactcaagaactgaagaaactggaaaataaaataagtaaaggtgaagaaagcatttaagtaataaaaataaaaatataagtagaagtgaatcatacaaacaggaaagatagaattcataaacctatgtggcagttgcttaataaaactaacgatgccatgatggcaaatttaaataaagtgaaataacctcagatgtggatgaagttaaaatgactagactttgcataaatttatggtaaaagaattgaaattctagatgaaagtcttactacttacaccagaataaatcccaggtgggtaaacattcaaaagtaaaagataaaacattagaaagaagtatgaaagaaaagtgtgtaattgttaatagtcttggagtggccaggcacggtggctcatgcctgtaatcccagcactttgggaggtcgaggcgggcggatcacgaggtcaggagatccagactagcttggctaacatggtgaaaccctgtttctactaaaaatacaaaaaattagccaggtgtggaggtgcacacctgtaatcccagctacgcgggaggctgaagcaggagaatcgcttgaacctgggaagcggaggttgcagtgagctgagatcgtgccattgcactccagcttgagcaacaagagtaaaactccatctcaaaaaaaaaaaaaaaaaaaaaaaaaaaaaaaagtcttggagtgaggaagccttttccaaacaaaacaaaaccccaaagccactaagcaaaagcctgataattttgattgcataaatgcaaaatttctaaatgacaaaagtaaagtaaaacaaaaatatagacaacaaatttgagtatattttccagatatctgactaaaaggaagcaaatttctctactctttgaagagtttttacaaataaataagcaaaaacaaactttagaaaaatatgcataggacacaaagatctcatccacaaaagaggtacaaatggctagaaatgcacaaaaggatattcaaagtttctgataattaaataaatgcaaattaaaataacaacgggttttcattcttgtaggacatgtaaggttgtcatactggtggtacttacagaaactgaaatctacatacccttccatagtatgtagattgtattgttgttccccatattgactctccatccctttaagaccattatacacattcatctttgaccacatgacatggaagagagtattctaagtctagacacctttaagagcctttgcatggttccacagttgcatcattttcctttgccccaacagacacaggctcaaaacagagcctactcatttagcttggatcctgcaatgcagaaggctggtaaatcagagctaggcccaacctaaaaccactgcagccaaaggataacatgagcaagaaataaaccttaatttttgtaagccagtgagatgtgaggggctgtttattaccataaagtaacctagcaaaagctaggctatatctcccaattccacttagtgatagagtgaccggcataagggttcaattattttcctgccacaaatagcaatacatttctcttagatcatcactttttctaagtcttcattttttcacatgtatgacacataaggctaaatctgtttttggtattttttattagcagtagtaagacaaaaagaaaaaaccagactgggcatcatttggtaaagaagtactctttctctccttttgtgacctttttattattataaaggtaattcatatttattactgaaaatttgataacatagacaagtataaatgagaaaattaaaaccactgggattcaccattaatattttggtacctttcttttaattttacttttttccattacagatattattacaaattctctataaacatttttaatggctgcataatattcctcaataccataattttaaaactatatcctttattattggccacttaagttattgacccaatttcaatgtattaactttatagcaaacattatttttacagaactattaatctttcaatcttttcttaagtggctttaataccttataatattgctcactgtgctttatcacatccattttcctttaactttacactctctgtgagcattttcttatggaaaaaagagcacagtggtagataaccctggtaagcgataaacatagaaaataaggactagttataaaaatcttcattttaaaatccatagactgaataatgtagttgaggacctggagaaaaaagcaacagaatgcaaaaaataagggcaactgggcattctagggaaaacagaaggctgttttagaaagccatgatccaactatgaagtcactggttcaaattagaaaaggatcagaatggattccaggcaggagaaatattaagaagctgcaatataataggaatatattgaagaaggcacatgttcattcttccaggaagagaaaaaaaggcaaccagagaatataggaaaacacaaacagtacaagagaggcatgatccaaatatggagtaacctacgatgacactgatcctgagtaattcaaatattaggaaagacaattcatttgaatcatctcctttgaagagaatgagtgtctgaacaatggaagtgcagtaaaggaaatgtaattatagcatgcgagttgattgaagccaaaaatatttatctagttataataatataaattctgttcattgattttcaactttttggagtcagcatgcagacaaaacatagaaggattaattttgcttatagagcaaagtctgaatattatcaattttgatagtatgaaaacaacattatgaagctgacagaccttggaagctggaagggaggaagagagggagagtcagtacctctaaaatcttcctcttaggaaactgggagtcaggttctaatgaatatgttgtatggatcaaaaaatagaaggttactgtttaaatttataatagaagccaataaatgagccaaaaaaaaaaaaccaaccaaacaaaaaacaaaacagtgtattgaccgcattggaggaagaggtgagacaaagtgaagagtgggatgcgctgggttattgagctgttatctctcggcttcaagcctgcccttctggctgagctttgctgaggctggaatgtggccagtaccatcctaacaagtgtgggatgatatctcattaaggttttggtttacatttccatagtgattcacgatgttgagcatcttttcatatggctgttggccatttgtatgcttcttaaggaaaatgtctgtccaggtctttgcctattttaaaatttagttatttgctttttgctattaagttgtgtgagttccttaggtaatttttttacagaaatagagaaaacaatcctaaagttgttgtggaaccacaaaagactccaaataacaaagcaatcttaagaaagaagaacaaagctggaagcagcacacttcctgattcaaaactatatttactacaaaattatattaatcaagacagtgtgatactgacataaaaacagacacataaacaaatggaacagagtagagcgtgcagaaatacacccatgtgtatatggtcaactagtctttgacaagggtgccaagaatatgcaatgaggaaatgattggcttattcaccaaatggtgttgggaaaattggatatccacattcaaaagaataaaattgaacccttacgccatatacaaaattataaacctgtgtgtatatggtcagctagtctttgacaagggtgccaagaatataacaatgaggaaatgataggtttgttcaacaaatggtatgggaatattggatatccacatacaaaagaatgaaattgaacccttaccttatgccatatacaaaattaacttggaataaagacttaaatgtaagacttgaaattataaaactcctatgagaaaacatacgaaaaatctccttgttgctggctttagcaatgatcattttggaatatgacaacaaaagcacaggcaacgaaataaaataaataaacaagtgggattgcattaaacaaaaaagcttctgcacagtaaaggaactagtcaacaaaatgaaaaggcaaccctatagaataggagaaaatattttcaagccataaatccaataaggggttaatttccaaaattaaattctactttaactcatagtgagaaacacagcctctctctaagcctggttcctctatactgacactccacctttctgctgcaggaaaagaagtttgctatgaaaggttagggtgtttcaaagatggtttaccatggaccaggactttctcaacagagttggtaggtttaccctggtctccagagaagataaacactcgtttcctgctctacactatacacaatcccaatgcctatcaggtaagctaacttgcagccttcacacatggattattctaaaatataagatttgcctatagatacagaagacatagatacagtaacctattctgacataygctattgacttaaatgcaaasatttcttttcagtattatgagtcagattttttctatgttatctgttctatattatctgttctgatatatctgatttaaatatgaagattgctcttatgttatttcataacaggtaaacttgatattatgttcagtcaatgtaccaactgagaaccttccatctgtaagactgaataagcaacaatgcctattgtctattgaattgaataaacagaacagtcttgactttattrcagtgggagaaatgacatgtacaaacaaatacctttcttgcaacacaaattatgatctgtgatgtaagatgcaactgaaagactctgggaacaaagtgaagaagagctcaccttgaggtcagggatggaaccaggtaacattttgaggaggacatgtatttgaggtgtatcctgcaggatgggcaaagtgctcacaagcagagataagcagggtaatggcaaaggaagtggcatgaacataaaggagagaaaccacaggcctgtctgatgaatgacgtgttgggttagtctgtgggcagagaaggagtcttcaaaagtaaggttagttagaaaagtagttgaggaacaaattgtatagttccttcctgtggagtttgtacttcatcctgtaagccatgggrccccattgagagcttttcagagatgctttagggcatttactctggctgctgttgctctcttgtctgaagctggaagagactagaggtgactatgaggccatttagaactgtgctgtccaacatagtagccactagccacatgtgactattaaaattacaattaaataaaattaaaaactcaattcatcagccacaccagccacatttcaagtgctcaatagccacatgtggctagtggctaccatactggacattacagatatagaatatttccgtcatcacagaaaggtccatttgacaatgttaaatagaaagctatagtgcagtttggatcacacacgggaaacagcctgaactgcagtaatgaaagtggttatgataatagaaaatcaacatgatagacatcataaactagtctgagatttcacacgtaaatgattgggaaaatgataaccctcttatcagaaaaattgaggataaaagagaaggagttagattctggataggtgrggcttgagcaggctgttggagatgttagtctaacagcgaagcaggcagcccagagctggagaaaaagattcaaaagtcttctggctggggttgcaaattgaaacccaaagagtacatgaaatctcagaagcagagaaacgagggcaggactaggagtggttggaggatctatatttagggagcaggaaaaaagtggggccagagaagatcatttccagtctttacctgaatctgtaacctcagggcttactttccatcaggcccatcacatactgctgggccttgccagccagggcagtcttctcctatgcactcctaccgtacaaatatggtctgatttgtagctctctactcaccagacacacatacatatgtacacactactctttactgaaatctgccagctatctgtagatgagtatttccctaaataatgttcttcacaccttctccacttccctccatttggaaagaatcatgtgtagttaaaccagatctgtacctgaattttgtaatggatagaagcctgattgtttgctgttaaagtgtttttcaacaaccaagatataggataaatcaaggtatgtacttaaaacaaggatttccacaggcctgacccatatgttataygagttygaccaattctgtagatgtggctgtctctagaacaaggaaaaaagttcttactatgggtatagagacacttataaagaaacattcctcaaaagcttgagttttataattatcaagaagtaaagagaggaatattacttagctttaaaaagaagtgaaatgccaatacataatataacatggatgaccattcaaaacattttgctaataagccagacacaaaaggacaaataatctatggtttcatttataggagatatctggagcaggtaatggagagttcctgtttaatgggtacagaattttagtttggggtgaaaacagttctggagaaagatggtagtgatagctgcatgacaatgtgaatgacttaatgccactgagtttgcactttaaaatggttaaaatgttgattttaatgttatgtatattttgacttcttttgcattttcatttttaaaatgtttggaaatacgtacaactttcatacagtttcagggtgctccagacacccgtggccacttcttgtaaaccactgactatttctagagcactttgagagactacaatatgatcatgatcaaattttgtaattaaacctaatgagggcaacagacacttctcagataagaaatgtgtcaattacagagctcccctactctaagtattcacaaggagacagataaatagtttctttattcctcctcctcctcctattcttcctccccgtcttcttcatcctcctcttccacttttttccgggcaactttagcaggacgctttgcgccatcaaactttactttcgacttatagtcagcaacatccttctcatactttttcagctttgccaccttagtgatgtaaggctgctttttcgctgycatttaagttattccacatctcacccagcttttttgccacgtctccaatagagaagccagggtttgtggatttgatctaggcgcagaattctgaacagaacaggaasaatccagacggtggccttttaggggcattaggatccttcttcttgcctcccttagctggttcataatccttcatttcccgatcatagcgcactttaatcacctttgccatttcatcaaatttagatttctctttcccggacattatcttccacctctcagagcgcttcttggaaaattctgcaaaattgacagggacctctgggtttttcttcttatgttcttctctgcacgtctgcacgaagaaggcataagcagacatcttgccgtttggtttctaggggtcacctttagccatcctgactgtattgttcgctagtagatcaacttttttttaagtgaagagaatctatgtagaatacaagtatttgggggcaccttctctgccttttaggatgttcagggcatatttatccacttaggactaactctattccctgatcttcactcttaggactcatcaggctcattgatccttttatccttttatataagtggccatgcacttgaattctgtggagcacggtcagtaaaacrgaaggtgataaagacagtgtttaggtgaagctgggtcctactgccaatgaagagaaaattggaaaactaagtacttccctaaataatgttcttcacaccttccccacttccctccatttggaaagaatcatgtgtaattaaaccagatatgtatctgaattttgtaatggatggaagcctattgtttgctgttaaagtgtttttctaacaactgtgatataggatgagtcaaggtgtgtaattaaaataaggatttccacaggcctgactcatatgctatatgaattggactcatttataaacaaatcagaaattaactctacacagttaacatactctcttctccaagtgaggaattgtcaaaggtaaatgtggtgtggtacgataaacttggtcttctggaggtcacaggtctttacagttacctttctgtaagaataaaaccaaccgacttcccccatgaatccatgacaccttaacctagagtgacttatacagtcactggtggtgatggacatgttgcacacttccggtagtttctgtgtctgcagctttagtcaaggatagaacatacctaactggtaactattttttacttgctagagatgatatcactggaaatgtagtcatcagaatggattgatctcgtacctattatgcttcatgtctgctcagtcaaagaatgctaaaaggcccagataaaccttgatactttaattaacccttcctctcgataacctattctgtacaatattgacatcatttcctcgtttctatccttgtggcagcagaatctaagctgtcttcttttgatcccatgatggtgtatggagtttcccacatttatgttgaaaagctgctttagagggttgtgccagagtgaatgtgaaagtgttttctctacctattctacttgattaaactcctcattgatgtcagacaagatcacccatatcagcatacctggatggaaaacagatggcagatggcagggagacatgtgcaatgtatgatgtgaataaactcctttttacactagcatgacaacagatgctcagaccccacaatgcctgtcagaatgctattctcatgttgagaaaagaataaacaatttttttcggactaaattccctccaaaaggtttttcagatgtagaaatgggactatagtaggtgtttgaggcgctccagctgggcctaagagagttgaaatgagtgagcacctggattatcttagagacatagatggaatcatgtttttgtacttggattggattatttagcagaaaaatgcttcctagaaggcctgaagatgattgattttattgctcacttcagcaaatcccacatctggtttgggccctatcagcagagaacactataatcagaacatcgcttgagagcccagtggttaagcacctaacttcaaaggccatgtggatttgaactctggctccaggattcattagctgcagtactttttggcaagttacttggcccctcagagtccccttttctaatttttaaaattagtacctacttcacagtgttttgagagttaaatgagctactctataaagtgcttagaacaatgcctggcaaatagacagataggagtgttagctattataattactgagcaagccaacttatgactctcataaccattagcttacagtcttggagacactttacctagccagcaaattgtatgattaattgcattactattaaacacaggtagccagaaataggctctttgtttgaatttcataaatatctaaatgtgttgcttccaggttataggattcaccactgtcagacttgctatttgctgatttaagtattcattttttccaatagaattgcttatacttgtgccttttattgttttaaataacaaaatcacttaaatttatagtctcctaaagtctttgagagttttgttattaaggcaatccaacaaaatacaagaaatacaaaagaatatttgacataatcatataaaattatctccaatatgctggtgtatttcatgtgatgagattctaacctcaattccttactcataaagtggggtggacaacctccattttgccatgtttttggcatgcttctaggcatgttttaattctcatgaattacactgatcactgagaaatgttatacaaaaataagatttactgaaactatgatttaaacttcccaacattgtcttgcaaacattactttaaaaatcaaagattttttcctcgtgttgaattcgtatactgcattttataatgcattaactttttgagctagatgtggtggctcgtgcctataatcccagcaacttgggaggctgaggtaggaagatcacttgaggccaggagttcaagatcaccctaggcaacatagtgagaccctgtctctaaaaaaattgtttaaaattagccatgtgtggtgtcatgggtctgtaatccaactattcaggaggctgaggcggccagatggcttgagcccaggagtttgcaactgcagtgcgttatgatggagtcattgcacttcagcctgggcaacacagtgagacactgtctctaaataataataataataatttttggtacttttataatatgtagccataactatttagtaaaaatatattaaagaaggttgctaaagatcaaatttagtgaaaggctttcgagcagctttagaataggtctactaactattaaataatttttaattattatttttccttaatctctttctgcttgaaacaggagatcagtgcggttaattcttcaactatccaagcctcatattttggaacagacaagatcacccgtatcaacatagctggatggaaaacagatggcaaatggcagagagacatgtgcaatgtatgacatgaataagctcctttttacactagcatgcgagctttatgtttaacatgaatgtactttgcaaggtattgatgtatattcatggaaatcttccattcagttatccacaattatccgtgttctggggcctcaaattagttatccatttcccatttatttttattataaattgcacagattacaagggaagcaaatttgtataatcactcttgaataaattcttctcttgacaggagattaaatggtatgatcaatttctcatttaatttaagaaaaacaatttccaagttaactccatgaaattaatctttctctcctatacttaagattaatagactgctaacatcataagcagttaaatatttataaggccatatagtgaagataacattagtacctatctcacggagtgagaattaaatttatatatatgtgttttatatatataacacatatatataacacatatgtgtttatatatataacacatatatataaacacatatatataaatttaattctcactccgtgagataggtactaatgcataggtgctaattactaatgtgtgtgtgtgtgtgtgtatgtgtgtgtgtgtgtgtgtgtatgtatgtrtgtgtgcatatatatatatatatatatatatatatatatatatatatatgggttaggacatacgtatatatatgggttaggacagagcttagcctgtggtaggttctctattaacacctamgtattactccattttcatactgctataaagaactgccctagactgggtaatttataaaggaaagaggtttaattgactcacagttcagcatagctggggaggcctcaggaaacttacaatcacggcggaaggcaccgcttcactaggcagcaggaaggagaagtgccaagtgaagggggaagaatcccttataaaaccatcagatctcataagaactcactatcacgaaaacggcacgggggaaaccacccccatgaatcaattacctcgacctggtctctcctttgagacgtgcagattatggggattatggggattacaawtcaagataagatttggtcggggacacaaagtctaaccatatcaacctactagtataatttcytattatggaatcaagtgttgagacacgtcggtttccttgaacacttatttatttaatatttatataaatctttgtgccaggtgttgctacagctggaagatataaattgcattaatttagattggatcaacggttcacgggaatacatccatgctgtaaacaatctccgtgttgttggtgctgaggtggcttattttattgatgttctcatggtaagaagagttgatttttttttaattatattgaattggttttggatattaacactcagaagttgggacaatttaatgtctttttttattagcttagacaggtactgaacatgtgaaataataagcatttgtatatggcagacaaaaaaggaaaagtttcttcgcagtaaagagtctgtggttatttgaagcaccactaggtggcagtgtgtctacacaggctcatcactaaaaactgcccccgcaaggtcactgccttggtcagcatgttagaccacctcaatcagtttcatcaattgtaaatctatccttagaattataaattgttaccatccttcaaatattatttgtttagaatatgacatgtattttcacacaaaaacagggttctgtgcctgtgaattagttaggtctgtaggccagtccagacacaactatttaacacacatattctctaaaggaattaaatagaccttgctatttattaggcctatactctgcgacattcacgaatctccaaatgctttctaaaaagtaatttcccaccctaaaatgcagtgtagtaaaatctaaagatgcataatcctttcagatttttaaggagggttcattcattcattcaacaaatatatattkcactctgcacttactgtgggctaggcatggaagatatgacttgtaagtaagacagtgtttctgctctgacaaaatgtacactctagtaggcaatggaggcacacacagaaacaaatgaacaagaaaatgtcagttggtgacaagtactgggtgaagaaaatgcaaggcagtagaatggagaatgrcagaagcagaaacaaattgtatgarcaaccaggttaggtgatatttgaacattgaccactgtcagtaaacatcctgaagaaggaattagggatccaaagactcatttatgccccgacacttctctatcttctctttccactctatcagggaagactaaggtacaagatctttagagaaagtctttgaaaggatgaaatcagattcatcttcatcttctctttataaaaaaaaaaaaaagccagctgtaagcttttgtgagtttctttattgaccttagggcctgagctgtgggctttcctatgtccaataaataaataatagtggttcataggaagctgacaggagatgtttgcagaactgaagggaaaaatgtttgttgaattaaaatgttcattgaattgaataggcagccttgaagtgggaaaagggtttagggtgagtgggctccagggcctctggggataattcaggattcaagcttaaagaaggagcagctaaaggaacagctgagtctcttctccacctctctttctgtcatctcatcacaagttactagcccaccacaattcaccacctggattggtactgaggcaagcaggtgcttgggaatggggtaggaagatggggaagaaggagaagaatgaaggggataagggctgagagtgatctcaaataccaacctatataaggagataggaaagaaaatagtcatttaaaatagcggcaacagtcggccgggagtggtggctaatgcctgtaatcccagcactttgggaggccaaggcgggtagatcacaaggtcaggagatcgagaccatcctggcgaacaaaatgaaaccccgtctttactaaaaatacaaaaaattagctgggtgtgttggcgggcacctgtagtcccagctactcgggaggctgaggcaggagaatggtgtgaacccgggaggcggagcttgcagtaagccgagatggcgccgctgcactccagcttgggccagagtgcgacgctgcgtctcaaaaaaaaaaaaaaaaaaaaaaaaatagtggcaacagtagaggaagggatgtyctaatgaccatgtagcattcattggcagttattcacatatgtaaatgagagagaaaatattctttgttctgtgacttataaaactgtcataactggtggaaaaaaatggaatatttgatcaaatgaaaaatgtatgcaagtataaatcaattgcttgattttcatgataattatgagagcctgaaacttaggtgaaactaaaaatgcttgctcaggagtgacattattaagataataggaatagggagacctggatccttctttctctgacaagcacactgattcaacagtaacagacaaattttctttgtgagaaattaagaaactagttgagaggctcttacatcctgggtaaatataaaaccagctacaacgaaggccagaggaaaatttgagataccttcttgtcttaacttctacctctgacccagcaccatatgatctgaaggaaactcctagcttcccgcttcaccttgtggacagaaaaagtgggacgtcatatccaatgtttcagcttttctgggggctgcttagggtaatcacttcaatctcacatgtcttggagcactgatagaacccagaatattttagtatctaggggccaatgagaacaaagatgggaagaaagatgtcattcaagcagtcactatagccccttcccctagctcagtgcagacaaacaaagtgattgagtagaataccctagatcccatgttctccttgggaggaaaagagttaaactgcaaatcaaaagttccaacttttccaggggctgcctgagagactgatttctgtcttgactctcttggaagtgctgatggcactcagcttattctagatgcttgagggctgctaagaatgaagatagtagtttggaccagcacaaagttttgacaggtgcccagaactgttggctaggctgattggtgagagtcttctcccacaaagaacaatccatgaacaccctcgcagaggtggctattttttctaatgtgcaaataccaacataaagagtcaaggaaaatgaagaaacaatatataccaaagaaacagattcatctccagaaactaaccctaatgaaacagagatatatgatttaactgacagagaattccaactaaccatcataaaaatgttaaatgaggtcaggagaatgaatattgcatgaacaaagtgacaatttcaacaagaagattaaaaaaatataaaaagtaccaaacaaatcttggagcaaaagaatataataattgaaggctgagcgtggtggcccatgcctgcaatcacaacattttgggaggccaagacaggcagatcacttgatgtcaggaagtcgagaccaacctggtcagcatggtgaaaccccatctctactaaaaatacaaaaaagtagctggtcatggtggcgcgcacctgtaatcccagctacatgggaggctaaggcataagaatcacttgaacctgggaggcggaggttgcagtgagctgagatggtgccactgcactccagcctgggtaacagactgcactccagcctgggcagcagagtgagactccatcaaaaaaaaaaaaaaatgaaagaggaaggaaggaaggagagagagagagagaaaaggaaggaaggaaggaaagaaagaaagaaagagaaagaaagaaagaaaagaaacagaaagaaagagggaaagtatgtggaaatataaaactctctggtaaaggtaaacatatagacaaatacaaaatactgtaacatgtgtgtgtaaattacttttaattctagtataaaagttaaaagacaaaagtattaagaataactataactaaaaatatgttaatggatacacaataaaaaagacgtaattatgacatcaataacatgaagcatgtgatgtgaacaagtaaaagtgttgactttggcgtatatgattgaaattaagttgttatctccttaaaatacactattatactattataagatattttatgtaaaccctatggtagtcacaaagaaagtacctatagaaaatacacgaaagatttaaaaaagctatcaaagtatattaacacaaaaaatcaacaaaacacaaaggaagacaacaagagaggaaaagaggaccaaagaactataagacagaaaggtaggaaacaatttttttaaatggtaatagtggtccgatgtggtggctcatgcctgtaatcccagtactttgggaagctgacgtgggaggatcacttgagacctggagttcaacacaagcctgggcaacatagtgagaccctgtctctataaaaaggtgttttgttttgttttgttttgttttgttttgttttgttttagggctgggtgcggtggcccacacctgtaatcccagcactttgtgagaccgaggcaggcggatcacttgaggtcaagagttcaagaccagcctggccaacgtggtgaaatcccatatctactaaaaatacaaaaattagctggccatactggtgggtgcctgtaatcccacctactcaggaggctaaggcaggacaattgcttgaacctgggaggcagaggttgcagtgagccaagatagtgccattacactccagccttggcaatagagcaagactccatctcaaaaaaaaaaaaaaaaaaaaatttctaattagctgggcgtggtaacatgcacccgtagtcctagatactcaggaggctgaggcaggaggattctttgagtccaaaggtttgaaggtacactgagctgtgataatgatcttgccactgcactccagcctgactggcagagcaagaccctgtctcaaaacgagacaaaacaaacaaaaaacaataagtccttctccatcaataatactttaaatgtaaatgtattaaactctctaatcaaaagatatagagtgattgaatagattttgaaaagatttaactacatgctgtctacaagagattcattttatattttggagacacacataggtttaaagtgaagagatggaaaagaataatcaacacaaatggtaaccataagaaaacaaatgaatgtacttgtatctgacaaaatagactttacgtcagaaagtatcacaagtgacaaaggtcattatataatgataaaagaatcaattcaccaggaagatataataattataaatatatatrcacccaacaccagagtacctaaatatataaagcaaacattgacagattggaagggagaaatacacagcagtgaaataatagtaggagccttcattatctgattttcaataatggatagatcacctagatggaaaacaaataagaagaaaacttatttgaacaacaacttcagcaacactatagaccaaatggacctaacacatgtgcatagaatatttcacccaacagcagaatacactttcgtctcaggtacacacagaaccttcgccaggatagatcacaagtgaggtcagaacaaaatcttagccaactcaagaagattgcaatcataccaagtatctttcttgaccacagtagaatgaaactagaaatcaatagcaaaaggaaaactggaaaatacacaaatatgtgcaaattaaacagaaaacttttaaacaaccaatgggtcaaagaataaatcaaaagagaaattataaaataccattagacaaatgaaaacaaaaacacaacataccaaaacctatgggattcagcaaaagcaaactaagaaggaagtttatagtgataaacacctaaatttaaaaagaaaaaagctctccattcaacaacctaactttayacctaaaagaactagatcaagcttgcccaacccacagcccagaacagctttgaatgtggccccacacaaatttgtaaactttcttaaaacatcatgagatttatgcatggaccttatttttaagctcatcagatatcattagtgttaatttattttatgtgtggcccaagacaattcttcttccactgtggcatggggaaaccaaaaaattggatacccccgaactagataaaggagaataaacttattctaaagttagcagaagaagggaaataataaaaattacagtagaaatgaacaaaatagtgaatacaaaaacaatattaagaaatgaacaaaactacaagttggtttgttgaaaagatgaacaacatttacaaacctttagctagactaaaaaaaacttgagaagactaacatttaaaaaataagaaataaaaaggagacatgacaattgagaccacagaaataaaaggaacatgagactagtataaataattacacaacaaaatttaagataacctagaagaaatagataaattcctagaaacatacaacataccaaagctgaatcatgaagaaacagaaaatctgaacagacctgtattaaagaagacacaaataaatggaaaaacatcctgtgttcatgaatcaaaagagtcaatattatcaaaatgttcatactacccaaagctatctacagattcaacgtaatacctatcaaaattccagtggccttttttttaacagaaatagtaaaaacaattgtgaaatgtatatggaagcacaaaggaccctgaatagccaaaacaatctcgagaaagaagaactaagctggaatcatcacagttcctgatttcaaaatttattaygaaagtacagcaattaaagcagtgtggcactggcataaagacagaatagagatctcagaaggaaactcatgtatgtatggtcaactgatcttccacaagggtgccaagaatacmcaatgaagaaaggataggctcttcctacaactggcattgggaaagctggatatccacataaaaatgaattaaatttgacccttgtcttacactatatacacacacacacaaatcaatttgaaatagattatagacaaacataacacctaaaactataaaactcctagaaaaaaacatagaagaaaagctttatgacattggacttgacaatgatttcctggatatttcaccaaaatcacaggcagcaaaagcaaaaatagacaaagaggaggatgtgctttggatgcgtgtcccctccaaatcttatgttgaaatgtggtcatcaatttggaggtgggaatagtgggaggtttggaatcatgggggtggatcccccatgaatggcttagtgccatcctcttgatgatgagtgagttcttgctcagttagttcacacaatatctgtttgtttaaaagarcatggtacctccccacttactctcttgctcctgctcttgccatgtgataccccagtcccacctttgccttccaccgtgattgtaagcttcyggacataagcagatgctggcactaygctttatgtatagcctacagaaccatgagccaattaaacctcttttctttatgaattacccagccttagatatttcttcatagcaacacaagaatgaactaacacaaaaaaaaattagtaaaaaggagcagggcattgctataaagatacttcaaaatgtggaagtgattttggagctgggaaatgagcaatgttgggagagttgtggggctcagaagaatacaggaagatgagggaaagtttgaaacttcttagagacttgttaaatggttgtgaccaaaatgatgatagagatatggacagtgaaatccaggctgatgaagtctcagatagaaatgacaaagttattgggaactggagtaagggtcacccatgttacaccctaccaaagtgcttagctgcattgtgtccacaccctggggatctgtggtatgttgaacttaagagtaatgacttcaggtatctagcagaagaagtttctaagcagcaaagcattcaagatatgacctggctgcttctaacaatctacaatcagatatgggagcaaataaatgacttaaagttggaacttatatttcaaagggaagcaaaacattgaagtttggaaaatttgcagcctakcctakccatgtggcagacaaaaaaagctttttcaagagcagaatgtaagtgggctgtggagcaaccacttgctagagagattagcatgactaaaagggagctgggtgctactatccaagacaatggggaaaaggcctgaaaggcatttcagagatctttgaggcagcccctcccatcacaagcccagatgtctaaaaggaaagaatggtttcagaacccaggcctagggtgccactgccctgctcagccttcaggacactgctccctgcatcccagctgctcaggctccaccctcagcaactagggccccagatacagcttagaacacagctctggagggtscaagccatgagccttggcagttttcaagtggtgttaaatctgcagatgctcagagtgcaagtgtgaaggaagcttggcagcttccacctagatttcagaggatgtatagataagtctgtgtgcccaggcagaagtctgctgcaggggcagagcccccacagagaaactctactaaggcaatgccaagaagaaatgtggggttggaacccccacrcagagtccccactggggaactgcctagtggatctgtgggaaggggctcctgccctccagatcccagaatgttagatccactggaagatccatgattataaaaactggcaggcactcawctccaaccccagagagcagcatgtgggttgcacccagagaagccacaggggcagggctgcccaaggccttgggatcccactcctcacaccagaatatggaacatggagtcaaggattatgttggatctttaagatttaatgcctgccctgctgggtttcagatttgcatggggcctattacctctttcttttggccaatttctcttttttggaattgaactgtttacccaattcctgtacctcccttatgtcttggaagtaaataacttgttttttattttacaggctcataggtaaaaggaacttggccttgagtctcagatgagaactttgactttgagctttgagttgatgctagaatgattaatatgttgggggaagagtaagaagggatgattgtattttgcaatgtgaaacggacatgaggtgtaggggggccaggagtggaatgatatggtttggatgtgtgtcccctccaaatctcatattgaaatgtcatccccaatttggaaatggggcttagtgggaggtattagatcatggggatgaatctctcatgaatggtttagtgccacccccttggtgatgagtgagtacttgctcggttagttcacacaagatctgattgtaaagagcacggcccctccccacttgccttttactcctgctctcactctgtgatacaccagctcctcctttgccttccccgatgattctaagctccctgaggcctcaccagaagcagatgccagcactatttaagttctgggatacatgtgcagaatgtgcaggttttttacataggtatagacgtgccgtgatggtttgctgcacctatcaacccatcatctaggttttaagccctgcattcattaggtatttgtcttaatgctctccctccccttgtcccccacccccaacaggccgcacgatgtgttgttccctccctgtgtccatgtgttctcattgttcaactcccacttacgagtgagaacattcagtgtttggttttctgttctggtgttagtttgctgagaatgatggcttccagcttcatctgtgtccctgcaaaggacatgatctcattcttttttttttgagatttgagacggagtttcgctctgttgcccaggctggagtgcagtggcgtgatctcagctcactgcaacctctgccttctgggttcaagcgattctcctgcttcagcttactgagtagctgggattacaggcacacaccaccacgactggctaatttttctatttttttagtagagatgggtttcactatgttggtcaggctggtctcgaactcctgacctcgtgatctgcccgcctcagcctcccaaagtgctgggattacaggcgtgagcccccacgcctggcagatgtaccattttttaataatgagagtgttttaaacctactcttagcaattttgaaatatacaatgcattactattaatgctaagcaataaatctcagaaacttattcctcctgtgtaactgaagctttgtacccactaatcaatatctccctattcaccacaccccaatctcagtccctgataactactattatcctctacttacgtagtttgactttttaaaattccacatattaagtgaggtcatgcagtgtttgtctttctatgcctggcttctttcacttagcatgtcttccatgttgtcacaaatgacagaatttcctttttcattgtgcaggtataacacattttctttatccattaattcattgayggacacaggttgattccatatttcggctattgagaataatgctgcaatgaaatggaagtgcaaatatctcttcttcagcataatgattttgatacctttgcatatattcccagaagtgagattgatagatcatatagtaattctatttttagtttttcaaggcacctccatattattctccatagtggctatacctatttacgttccctccacagtgttcaagttttcccttttctccaaatctttgacagctcttgtttaatttataagagacattctaacagatgtgaggtgatatctcattgtgatgttgatttgcatttctctaatgattraggatgttcaacattttttcataaatctgttggccatttgtatgtcttcttttgataactattcaaatcctttgcccattttcaattggatcatttgctttcttgatattgagttatttgagtttgtgaatattcttaaaagctcctgttttaaaaccaaagttatcccatacattttctagtgttgccttaacctgggatacagacacaggcaaggtggataacagtgtaggaatgagctgcctttgatgcatgttgtgagcatgctgaaaggatttgggcctcaggaaggatcagcatggagctagaagccacgaatatagttgttagggctgttctcctgtttccaaggaccacaggccagccccttagcacaaggaggagagctcctatagaaggcattcttccaagctyatctgttctccttcagttggataaggatgtaggcagaggtgtcactttgtgactttaccagtccctgtcttatgtgcaaaagggagaaccatgttgatcctttttttttttctatttttaaagcatatttaagctattccaccgctgtttttaaaatacttattctgttaaacaattctttcagaaaaaatttgaatattycccttctaaagtgcacttrattggccacagcttgggagcacacctggctggggaagctgggtcaaggataccaggccttggaagaataactggtaagcatgccctgcagttgggccttgagtgtgtttaaatattgtttacacacactaccaagtatctgaacaccaagtaatactgcagaagaaaatataagatactacaaaatgtgattccaatgaaataaaacgtgaacgtgttttcagagcagaaatgtgcagattcgcttcaagggggttcattgcagcgttgtctgtggtgacaaagtaagagaaactatgtgttccctcacccgcaattgaatggttgaagcaattataacacattccatcctttgggatttcataccagtaatgcaaagartgaggtttacctagacgtaggagtagaatggtggttatgagaggctgggaagggaagaagagaggggaggctaaagagaagttggttaacaggtacaaaaatccatagctagaaggagtacattctagtacatgatacagaaattacagttaacaataatttrttacatgtttcaaaatagctagaagagaaggactgtaatgttcccaacacgaagaaaagatgaatgattatggcgatggatgtcccaattaccctgatttgatcattacacattgtatacatgtctcaaaataccacatgtgcccccaaaatatggacaactattatatatcaatttttaaaagttatttttaaaaagaatgagtttgaatcccactgattgtcctggacgttcctgacacacttggactgcagcttactcagttgttaccatttttaatattatccctggatataccgttaagtctaaaaataagttgcggagcaaagtatatagcatgaattgggtttgggggtataataattaatcatgtctcctccccacattctgttttccaaaccaattgtgtgagatggatgaaggtcaaagcaacagctcctttaccaacaggcggggctggcctctccytctgcatccccccaccaacagccagtaagcaagccccacgtctccttcatctgccttttccctgtccatcctctggtcattgtcctggctcagtccctcatctcttgcctgcattttggccttggtccccgctggtgccccagcctagtcttctacaaatactgccaggcttatctttccaggtgcaggccatgccactccactgctccaaatctctcagggtgtctccttgtgtgaagcctcttagcttgtcacgtaaacttgtcatgtttcatcacagtttttcatgctctgtgcctttgcacgtgctgttgtccctcttgctgagcattcactgtccatttgtcaagattcatctcaaatgtttcctcctcaggcaggaattaattctctgtgcttctcataccctttgacatgtgcctcttttgtgtttgaaaacacaaatattatatcacatggtcttataattatggatgagcctgttatttttaacagaaagcctccttactgcattgactccaggcttggccacagaagcgtattttctctttgttaaactgctgtgctctgtgtgcatgtgtgagtacgtgctcgctctctctctcacacacacacacatacatgcacactttaaattcaaatctcaatttagaacacagtttttaaaaaaatacctagaagtccaaattgggattattttgtctctgcaatctgttgatataacaggcttattcctgctataagtcatctctcttctcctaactctctgctcctaaatcctcctcactcacctccaccaccaccaccaccattcttatttagaataataaaaactgaactttttcactgaagtcattatgtgaccctttgtggtcaattttcaagcccagaaaaaagaaggaatgagttcctcttttgaagatggaacctcatggggcctcacagcctcaggcaggctgagtgaagcagaacacataactgcatttacaattcatactgggttatgatcaattcaaagagattttgtttttattaagttttttcaaaaatcagatactatttaactctagtttttcccatcaggtgaattatcctgctgggtaaatagaaaacagatttttaaaggttttctgaatgtccaaagaattaatattatgtggatgttttaatctatattcctctgagaaattagtttttgggcaatcatgttccttgagtaatagaagaactgagacctcacaaacagattttagctgtataattaaccacttaaaaacaaaattaatatgataaacatattaaggacatacataagtttttatgtctttggtatttatgtataagtggtaagtagttgtcataataaatatagttagggggttactcagctgattctgcttttatttatttttatttataaacagtatcaacgcttttcttatttgaggaaaaattactctcattttgctgacacacacgtaccaaaatacacatacatactacacactcagatcctaaacgattagttctcactcatgtagtaagaggtcatgtctgtctccctaaggttaattaataggttgaacctaataattctcttcccttctgtagacttttctcctgagatatcctagaacaacaaattcaatgttccctcttccttacgtcttggaaagactgtctttttttttttttttaatctgattgccttgtcctccaatcaataagatctgaggtatacctatcttgggatgtttctctccaggaatcctgactttattagaaagttgtgtgtaatcacactagtaaaataaaaattcttccaagagttgaagattaattgtgagataaatactttttcctctttgttaagcgcgaatggttcattcatatgcatgttgcattacttcattgatctctttgtctaagtgtctttccatctgtgctctgagttcccccgctttgtggacttaagtcatttgttcactttttttcaggtcttgtcaatagaagcgctgtgctgaaacgaaccccttccctcctggcctctcatttccttctaaatgatgccctagcctattgcattcctctagatccaagctccacaaagttgaaagtggagtgattgcatttccttagggttcattctctccttgacccactgctacctagcttctttccccaaaaccactattgccagatcactagtggctttttgtggaactctatcagacattttgactctgtgttttacttgacccctctgcagaatttgtcccagtggacccctcccgccttgctgaagtgctcccttctcttagcttctatgattccgcatcttcttggttgtctttgtttttttgactccctctctccaggctacttcatgaatttcttttcttttgcctttgcctatctgttcatattcttcaagtttccattctaggcccactcttctctcctgttgcttttctataatcactcttttagtgattatattagtcagaaaaataaaaaaaaaaaaaaacacatcctatgacaagctaagtgtgctgagcacacaccccagactgtgacacagacattccttccttgctgatgccacattcccagaggtgtcaayggcaatgctactctgcatccttcccactccgggatccagcctctatatcacagcaaagggattttgctaaaatataaatctgatcataaatctcccctgcttgcaagcttacaacagcttcccattgatgaccacatcatgtccaaactccttgacatggctcagctgacatctggctcctgctagcaatactaccttcatcttccaccgaatcctagaactmtacacaccagccttagcaaactagttacagtttcccaaacacgatgctttcatctggaggccgtgtacttctctgtcctcccctgggttgctggccaccttacctttgccctggccaattcttctggcccttcagatctctactagtgtttcttttctttttctttttttgagatggagtcttgctctgtcacccaggctagagtgcagtcgcacaatcttggctcactgcaacctccacctccttgattcaagtgattctcctgcctcagcctcccaagtagctggcgttacacgtgcccactaccatgcctggctaaattttgtacttttagtagagacggggtttcaccatcttggcctggctggtgtcgaactcctgacctcgtgatccacccgcctcggcctccgagggtgctgggattacaggtgtgagccaccgcgcccagccatgtttcttatctcttgcagaagcatgtcctagttccgcaagactgggttatatgtggcttctctgtgcttggataacacttatgatcaccactgcctctgcacggaggacactgactggggtgcctttcccatcaaatggaaaatcccttgaagacaaagcaaggtcttattcctcatatctgaatgctaaacctagttcctggcacatactaggtgcttgacaaataattgtcaaatacagaaatgattgaatatgtgaaagatcataacattttaaagaattccagctatcttgcccttattttacgaaacatttgaacatgacgcaatgggatgagagtctggacacctggcctcttagtccagtttgcctctaacacatgataaccttgtccagtcacttcacttccctgggcttcgggcttttcatttgtattactattaatgaaagtagaactaagtgagccatagctcaggacaaggattctgttattttaattgtgttgctttgtagattcatctttacacatcaaagagtggttgtgtttttaatttaatttaattttttgcctacaaatgttgcttttcaagaacctttgtaattcataaccttattgtatatatggtattccatatacagaccctagaatagccactgtgatttttttaatttgttagctgttttggcattgtctcaacatagcattacttatctgtagatacttgacattgcaatatatagagaccctacatttatagatttaggttatgtatctgtactttttcctgagtgatctttgattgatagaaataatgtaggaaaggacacatgcttccaaagtaacaacaatattaatgtgcacttccatagaacatgtcttggttgtgctttctctagggttggacccagctgggccatttttccacaacactccaaaggaagtcaggctagacccctcggatgccaactttgttgacgttattcatacaaatgcagctcgcatcctctttgagcttggtaagttttaacagaatcagaaacttcattgaagcatagaggagatttttagaggcatttaccctgtttttatttatttcaggtgttggaaccattgatgcttgtggtcatcttgacttttacccaaatggagggaagcacatgccaggatgtgaagacttaattacacctttactgaaatttaacttcaatgcttacaaaaaaggtaaataytttctaaactatgaatgctactgatgcatattcacttagctctctccttagatgggatccacctacttttgtgtataatatacatataaaatgtattttctctcaaaacacagttgcatataagaagctctcccacctgttctcagatccacaagatcgggtaccgtgtcttcattaactttgtatccctggtgccttatcaatctctagcatattgcagtcactcaatataaacaaggaaggtgtgttattcactcagcaaatatgtattgagtgtttactatgtgctaggcattattctaggaacagcaaatatggaaatgaatacaaaagacaaaggtgcctccctgatggagttcattttctaacttgttaggaaaccaataaatagtgtaagagctaaggggacaaaataaagcattgaaggggaatatgatgtgttggtkacagtgaaggtaaagtagaagaagaaaattgttgacaggatggtaagggagtcyttactgaaaagatgacctaaaggagttagccttatagacaccaaggggagaggcattccaggccaacagggggaagcaagtgtaagggctgaaaacaggagtcagcctggcaggttcacgacagtgaggagcctgttgtggctgaaactaggtaaaaggaaagaagtagggcataaggttggagagggaaccaggcagagggcaataacacaggactttgtggatggtagaaaagacttaagctttcactcaaatgagataggagccatgagtggattttgagcagagaagagacgtggtttgagttacttgtaacaagaatcactctggatgctgtaattacaaattaaacaagtagtatttaactttttatagtagtttccaataataatagttacaatatctatatggcatcaagttaaaaggcaccgaaaggttattatttgggaaatttgttcttccctatctctacatttcatcatataattaatgaaatacattacccataatatataataataataatatatatatatatgatgatatgataatggatacctggatgattctgaatatctcatagcccaatcccctgtagtcaagatatcaaggagttgaaattacttgctctttcatttggctgttgtagaggaaagatacagagatcatagtattgagtgtaactcaggtatctacttcactagaaataaattacaaaggtttaatatttgctctgaaagagaaaatgtgatcagaagtatatatttgtaatgactatattttaaaaacccacacaactgtctaatctacaggtgcaacaaataagaattaaggccaatttcacctagttcagataagcaaaattcatacaaaagaggcatattataaaattgattttccccattattttctatattacgactatgaatcctttctattaggacaaaatatagmtcagaagacttcattacataattaattgttatacacagatcatatgaaattttatgaaagattaattcaactaaaatatacatttatcataagctatcattttgagacattttaagatttcctataactttattggattaaaagaacatttatcattcatgttaaacctttggatgagttttaagacttcaagatgttctattttacttaaatttattactaacaaaccattacttttaaaattaatagtttgctatattctaatgaaccgtcttgtctaaatcacaattaattgtgaatataaatctatagatatacagagacctaatgtaagagaagtctttgtttaataaaaatggatgatgccaattattaatctgtgctgacgatattacattatttctgaaactattctgtctcagttctctattgtgtaacaaaccacagtgaacaattacaagaaaaattatgttattgcccagcgttctgagggtcagaattcaggcagagttctcctgagattctgcttcgtgtggtgttggctggagcaactcaggtgactgcatccarttgggggctgagctgggctaagctggatgaggaggtctgagatgaccctccgtgtcaggaaccctgggacttgttctcctctgtcaggtggtctgtcatccttcaggacctctctccccagacaggtagcctggatttcataatattgcaactgggtttcargacagtaagagtggatgctggaaggtcttttaaggccttagaacttaaccaatgtcagtttctccacagaactgatcttggttctttgctactgggcaaagcaagttacaagatcagcctgtaatggggcaggggtatttttaacatggcctccatgttgagagaaggaatggttacataatactgcaaatgggtgaggacccaggaaggagtcatttgttggaagcaattattacataataattatactgcatatgctaaaaccaaaatctagtttctcaaagattggctaagctgtgtaggtcattcaaagaatagtccacgccattcagtaaaaatattgttatgtaaaataaaagaaagcataaatggctgggcacagtggctcacacctgtaatcccagcactttgagaggctgaggcaggaggatcacttgagacttgaggccaggagttcaagaccagcctgggcacaacaagatagtgaggcctcatctctaaaataaaaaaagaagaagaagaagaaagaaaagaaagaataaatgactagaatgttatgaaaattttggaatgtgcagatgtatttagatcttattattattccaataatcctaactattgatggcaataatgtcatgcttgataatgacaaaactaattcatctttagcattctttataaaaccccccacttgttacacctttaacccagcactggttcacaatgctgactgttttgtgattgaataggagggagttcagttattcttgcagaaacagagaggcagagtcttaactggtctacartggagatactatatgcacagggatattgtgtcagaggtcctagtgatacaggatttttttccatgctgcttcaccagccagagacctccacagcctgcagtgcctctgcttgagtttcacttgcacctgctgggctcaccactggacttatctcacccacttggcctggcagcctgtgctcagctcactctgctgacctggatctcacacctgccaagggtgagccaggcatgcccactgctgtggtagggcaggtggcttcaggccagtacaggcactggttccacacgaggctgtggctggaccaggcatactgcaagcagcttccaccttgggcaccagcttctgaacgagggaaatgtggtggtgccaaaaaaacttggagatggcaggaaccacgcagccccaaagggggtgttacatacagcatgttacagctgtggcttagggagccttgaggtctaagcccccaggaaacattacggcttgtttgtgttacagctcatttgttcccaccctctgcacagttcagcgaataggggtgtgtctcacattgtttgatcccattgctgtactccagaccacagctcttgggctgtcccagccccactgcagcttcctgatgcgtggggtgggatggctacagtgtttcagcagctcctttggcacctgctgtttggtgggtctcaggttcttgtcccacgtccaggaagaaagaggttacacagacaactgaagagtgagcatggtggagaagagttttatcgagtgaccaaacagctcttggatragaggggaacccaaagtgggtagcccctatctgaaggcaggtagttcccacccaaaggcaggtagtccccagagtgtggcttagtctgggctttttataggctcagaatgagggaggtgttggctgtaggtagccttggaaaaagcaacattagattggttaaaaaaccttgttcaggctgggtgcggtggctcacacctgcaatcccagcactttgggaggcctaggtgggtggatcacgaggtcagatcaagaccatcctggctaacatggtgaaaccccgtctctactaaaaacacaaaaaattagccggcgtggtggtgggygcctgtagtcccagctactcgggaggctgaggcaggagaatggcgtgaaccccggaggtggagcttgcagtgagccgagattgcaccactgcactccagcctgggtgacagagccagactccatctaaaaaaaaaacaaaacaaacaaacaaacaaacaaaaaaccttgttcagaaagaaccaaaaacgttgttcaggaaagaccaggcaaacaggaatcgaagttctcactctggtcagggactttacctggaactggcagcttcgttttcaggcttcacactgtttttggcttaaaggttgggtttcactgaggacacgcccctatctgcctaggaaattgtctgcctcctgccactgtcactaggaagtgactcagtatatttgtgtcaaagcacaaagtcattcacatttgcttttgcttatttccacttmttgaatgtcccttttgagtcacataattctttggtacaaataaaattatatgtaactttgataaatgtacaatatccaagcctagacaaaaggtctggccctcccaactcaagaagactgccacttacagttactgtttctaagatatggtttatgctaccagttatcagttaattgctatcagttaattgggaattgttttcacagaaatggcttccttctttgactgtaaccatgcccgaagttatcaattttatgctgaaagcattcttaatcctgatgcatttattgcttatccttgtagatcctacacatcttttaaagcagtaagtaaatcatcttacttggaatktaattataaagtaattttttgaaacacaatcatccagctaaacattagggctttgtgtaggtagcaaaaaaaatgcacctgccattttgggaaataatggattgtttctgtgctgagtactgaacagtagctgggattgctggagggttgaaataactcaaccaactatttgtattctggttgtttcagctcctttgaaaattatatacaattttgcttttttggccatttgttatgcagtaattagatgttactgtgtaacaggcataagtctagggcaaaaatatttctgcatatatattttaaatgtcatcttcaaagatgccctaagaaggctgaaccaatcaatagctacaaccaaacatattactatttacttggaacatgaaaattattttattaaaatttaattatttatacagagcagaactaaagcatagatagctcacaggagctctacacagatcaatatgtgacaaactaccaaatctgattttacttgagtaaaagaaagaaaatctattttgtagtgggaagtggaaaagatcttcattcttgtgctttagagacctaatcccctgttttatcacggtagaaaatgtgggctgttcagctgaagtttatggtaagtaatagtacttcgtgaataagtgctgtgttgtgacatgaagaagcatgtcccttttgctacagagcttggcagatggacgggtttaggccatcctgtcagtttcctgccattcttggaaagcttgacagccaaacagtagcattttccacatatcctccttgtccccgacctctctcttcttcctgcctyggctgctactctgagcacccacgggatcctggcatttacttctaggagaagcaggcccttggagtctttgtatatttggagataagagttaatctgccaaattggagtacccttagaagctagctcatgccacatggatgctacttgtggttacaaactattagaatgaatcaatttccttgacgtactttattgtactgtaccctaatagtcatacaatcaaagtgtgtcagagccagctgtggcatgcacctgtagtcccagctacttgggaggttgatgcaggagatctcttaagcccagaaatttgaggctacagtgtgctatgatcatgcctctgaataacaactgcattccagactgggtgacaaattgagactccatctcaaaaaataaataaataaataaataggatgttacagtagccctagcctaaatgtctatggtttattaaattaaaagttcaaagcctaaaatagcaaatactcaagcactgctacccatgtttttaaaatgttcacatttcattccttttcctttagatttttaaaacatacaaataaaattaaagaagcaaacgaccttatattcccttcaatccttcccctaaggcagagttgaatttgatatgtatcaaataaatgctttcatattatgtttctggatttgctgttttcattaaatattataaatataaaatttgaaatttacattgatgtagatagatctaatgtatttattttataggaatcaggcataatttattgattagttctcctactaatgtgagtttttattgtttccagtttttgttattaaaagtaatgtcggccgggcgcggtggctcacgcttgtaatcccagcactttgggaggccgaggaaggcggatcactaggtcaggagatcgagaccatcctggttaacatggtgaaaccctgtctctactaaaaatacaaaaaattagccgggcgtggtggcgggtgcctgtagtcctagctactcgggaggctgaggcaggagaatggcatcaacccgggaggcggagcttgcagtgagccaagatcgggccactgcactccagcctgggcaacagagccagactctgtctcgcaaaaaaaaaaaaaaaaaaaaaaaaagcaacgtctaccaactctgccatctttgtatgtctctttatgtacttgagtggaattccttcatggcatacaacagaagtgaaattatcaaagcatacatgcatttccttctttattagacwttaccaaatcactgtttaaaatgtctatcgattgctaaagaaaaataaaaatgaaggccacaatttagatataacccaaggccrcccatgaccacatagccaaaaccaagtcatcctgattttccagaaacactagctctaatcataaatgaaacacaaaaacataagctttacctccttgtccgcgtgattcagggaaatgaaaccaatcagctgtagacaaatcaacataaatatctctacttgccctagagaagaatgttaatgcataatagccaatcaccaaaaaaggtcaaaatacttccgcctttataaactgtcttgtgactgctgtaagcgggggcttcttacmattttcagtttgaagtctcccagctcaaggactgttcttttgtgtgcagagcaaatttttaaaaattaaaaaatttgatctgattatatttttgacattttaaaaattatattccaggctgggaatgcagtgaagaacaatacaactttccatcagaagcaaatgagaattcccctattacacgtattcagtgttgccaattgctttaatgtttgcaaatctgctgaatatgaaattttaccttgttttaattaacatatgcttgacaactagtaagactgaacatcttgcatagttattgactatttgagtttcctcttccgtggattgtctattcatatcatctacccatttttctaatagggagtttctctttttccctcagttggttttgttttatttttgaaaacagacatggtggcctgttaggcacttttaaaatgcatatcctttatttagatcctggagatttattattatttaataatatatagcgagtttattgaaggacaacatttctaattacataagtaatcacctttcattttctgtcatcagggaaattgcttcttttgttccaaagaaggttgcccaacaatgggtcattttgctgatagatttcacttcaaaaatatgaagactaatggatcacattattttttaaacacagggtccctttccccatttgcccgtaagtatcatagctaagtttaattgtaatgctttaaggtacttatctttaaaaattcaacagtttttattgagtgtctactaaataactgggcattaggccagactgggatttcagtgaagaacaacacagtgaggtctttaattgagtttaggctagtgggaaagacagcaagtaaaatctcagttccaatcctgcgtaataaactttctcttaggaaacattcaagatatgtgcagagcataaaggtcagagagcctttcgaggaaaagagatttctaagctgactcctgaaggatgagtaagagggagaagggaagtattccaggcagaagtgaccacgtctgtaaatgcctggaagtaagagagagcagaaactgaaagaaggccctgccaggattgtagagacygggaggacagtgatagcagatgaagtgggagagacaaatcaggtcagatcatgaggcaagggccttgtgtcccaagtggagaggttgggctttgtctgtgggtgaatggaaagccattgaagggtattaagaattaccagattatttttatttttagaaaaatcactttagtttctgcatggattagaaggccacaagatggaagcagggtgcctgttacacaattattgccacaattcaggcaaaaaaaaaaaaaaatagaagtagagaggttgcaaagatagttagaaggtggaagcaaaatggacctaggtgaatggatttaaaaatgcagaaaagcaaggagtcaaggacaattctggctgtggatgagctgtcattctctgagcttgacgacacaggaagaaaggctagtttggagcaagatgataggctagtttctcacatgttacgttggagctgcctttagggtttgagagtgtgtgtgcaccatgaggcaggtagagatacggatctcagcctctggaaatggatgtgttctacagatagagagttgggagtcactcagactgtagtcagtgtggtgaaagtggatgacatcattacccaagaagaatgtgccagataagaagtaaagatagcagagaaagaggcccctgcaaaggagactgaagaatgggcagagagaaggaagaccagcaaagcttatcgttaaaagagccaaggaaagaaagttgagcaggaagagaggagacatacaccacagcaaatatatatatatatataattttttttttttttgagatggagtcttgctctgtcgcccaggctggagtgcagtggtgcgatctcggctcactgcaagctccacctcccaggttcatgccattctcctgcctcagcctcccaagtagctgggattacaggcgccgccaccacgctaggctagttttttgtatttttagtagagacggggtttcaccgtgttagccaggatggtctccatctcctgacctcgtgatctgaccgcctcggactcccaaagtgctgggattacaggcgtgaggccccgagcccggcccacaccaaatatttttatgacttctaaaaatggaagtcctgtgtcttcttttgtctatttcctttgtattgtggtcaaatgagacagggccccatagaggctcattggatgaagaaacagttcaacccttagtgagcttggctggggtggtttcagtggagagacagcagggggagccaggttccagtagaatgggcggagaagagaaagaaaattctttggcaatgattaactcatgaattaaaattcctctctgrtaggtttctttcccctttcaattattttcaaataatcatatgaagaattgcattttttcagtttgttattaagcgtacagtaatttcagaattcagartaaaagatctgtttagctctagatgtaaaaagtcacatttggccatttgcaagggaatgatctactgacagatactatattgatctgtatctacgtgtactgggcattcttagcacatatccctgcaggagaagaagaatgactcactttgcctctaaatgattataaaagcatacatcttcttgcccaattggtttcctagatttttctggattaattgtcacattatggcaaataaaaacttggctatagaaagtatacatactatatatatgccacacaatacaaaggaaataggcaaaagaagacacaggacttccatttttaaaagtcataaaaatgcctggaaaaataaataattttcttttaaaatattattaaactatttattctggaaaattaaaatgtgacccataatgtgtatttttaaacgtagtttttcaccaaattcactgaaactaaagttgtatttttgcatgaatatgtgcagcactgttcaaatacaaccctgaaaattttatttccattaaaggatccaggaagtcatacttcccatgtgtttttaaccctttctctccctttccttcttgtttccttatatctaggttggaggcacaaattgtctgttaarctcagtggaagcgaagtcactcraggaactgtctttcttcgtgtaggcrggrcarttrggaaaactggggagtttgccattgtcaggtaggcagagtgagmaactgaygctttgcacagtgctgggggctcagtaacactaagtgagactggctcagtaagctgtttagtcttctcttttcctacaattccacaggctaccatggtatctttgatttttctttttacttcatgttttccaaatataaagtagaaatcataatatgtattttctctacagttccaactagaaacagaaaatgttaggaagtgataacatgaaaatacagatctagataatagagcaagtggaaaaaactgayggtattcaagatatatttttaatcccattcacttaatattatacaaatataagcatatatttttatttgtgtcagtaacaaataagacatttatataaattgctaaatttctaataagctgtctaagcattacccacagatacaggacatgtgttagaatagtcagaggttaaaaataatccagttcagatgttcattttgtatcttttgctaaaccctccttttatcttgaaattttcttaatcttttatttgttcagccttagcatttttgtattatgttcatgtccattattttattctgtaatttatgtcagaattaacattatacctactaattagatgcaaccttttctgcaaacagatgaatgtattaggtgttttatctctgtgatttccatcatcctcaaacactgggcacaggcacgaaaagcagagattttgtggttattttgtcagttgagagatgcatccgttttatcactggcagagtttctgcaggtcatcttgccttggtccaactgcctgtaaatataagctcagtgaatgatgatctggatcctgattggtgcacaggctccagcccacccttctcctaaccatgtctcccaccatttgactttattccaccttcagttcagcgaggctacactgtttgcactacccagtactgaatagatcctacccttacctttctgcaggacttcacccatgctgtttctttgctgcagatactttttcctgtctgctattttgtttctacctcttcttcatggctccatcaagcctccctctgagagcagttcagcataatcatgtgcctgtggttttgaggctcacaggacgctgggtaaagctgtgtgatttgtgccctgcacagaggcatctaacctggggcagctggtgatgaatatgcagtttctgcctcttttaagatttgtgagagcgtttccacatctctgttcttttgataacggccgaagaagctgtttgtaatgctgttgcatagttacccaatcctcttttaagaataagtaagcattgaaggttcacagcagatgtgtcatcttgaaatgaagtcagctagctaaatttgtatgctggtttagttctattcttcaaacaagttttataagtccagcttctccatgctcatggataggcagaatcaatatcattaaaatggcaatatcaataacatgaaaagacagatctagataattgagcaagtggaaacaaaatgatggtatataaggtatatttttaatcccatccatttaatactatacaaatgtaagcatatatttttacttgtgcaactcacaaataaataagaccattatataagttgctaaatttctttttctttctttctttcttttttttgagttggagtctcactctgtcacccaggctggagtgtagtggcatgatctcacctcactgcaacttccccttcccgggttcaagtgattatcctgcctcagcctcctgggtaactgagattacaggtgcccaccaccatgcctggctaatttttgtatttttagtagagacggggttcaccatgtttgccaggctgatctcgaactcctagcctcaagtgatccgcccacttcggcctcccaaaatactggtattataggcctgagccaccgcacctggccaaactgctaaatttctaataggctatctacgcccaaagcaatttatagattcaatgctatctatattaaactaccattgagtttcttcacagaaatagatgaaactattttaaaattcatatggaaccaaaaaaaaaaaaaaaaaaaaagatcccaaatagccaaggcaatcctaagcaaaaagaacaaagctggaggcatcatgctacccaacttcaaactacactacagggctacagtaaccaaaacagcatggtactgctacaaaaacagacacatagacccaacggaatagagaatagagaatccagaaataaggccgcatrcctatagctatctgatctctgacaaacctgtcaaaaacaagcaatggggaaagaatcccctactcaataaatggtgctgggatacctggctagccatatgccaaagactgaaactggacctcttgcttacaccatatattacaagaattaactcaagatagattaaagacttaaatgtaaaacccagaactataaaaaccctggaaaacaacttaggtaataccactcaggacacaggcacaggcaaagatttcatgatgaagatgccaaaagcaattgcaacgaaagcaaaaattaacaaatgggatctaattaaactaaagagcttcracacagcaaaacaaactatcaacagagtgaacagacaacctacagaatgggagaaaactttggcaacctatccatctgataaacgtctaatatcccacatctgtaaggaacttaaacaaatttacaaggcaaaaacaaacaactacattaccaagcgggcaaaggacatcaacagacacttttcaaaagaagacatatgcatggccatcaagcatatgaaaaaaagctcaacatcactgatcattagagaaatgcaaatcaaaactacaataagataccatctcacaccagtcagaatggctattattaaaagtcaaaaaataacatgctggtgaggttttggagaaaaaggaacacctatacactgctggttggaatgtaaatttgttcaaccattgtggaaggcctcaaagacctaaagacagaaatatcatttgacccagcaatcgcattactgattatatacccaaaggaatagaaattgttctattgtaaagacacatgcatgcatatgttcatgcagcactattcacaacagcaaagacatggaatcaacccatgtgcccatcaatgacagactggatraagaaaatgtggtacttatataccatggaatactatgcagccataaaaaagaatgagatcatgtcctttgcaggaacatggatggagctggaggccattatccttagcaaactaatgcaggaacaggaaaccaaatactgaatgttctcacttataagtgggagctaaatgatgagaacacatggacacacagaaggaaacaacacacaccaggacctatcagagggtgaagggtgggaggagggagaggatcaggaaaaataactaatgggtactaggcttaatgtctgggtgatgaagtaatctgtacaacagacacatgtttacctatgtacctgcacatgtacccctgaccttgtttaaaaaaaatgtccagcttcaccataggttatatcttagctaattgggcttctagtgacataaagggctgcaatgtatgggcaatgagtgaagatagttcttggaataacagaaagattacccttaagaacttggaagaacagtttcctctggtaattaaatcaattaattctactagtaatataataagacagaccctaggaatagcaatattcattcgttaattcattcagcaaatatgtaggtgcctacgctgtaccaggaactgttctaattgctggggatgcagacacaggtccgtctttcacagagcttatatttgcagtttgagtagacaaatgatacattaacagaagaatagttataagttatgaagaaataaggaaaggtgatacagtatggagcaacatggggacaaatttagattggattgtagcttaatcatttactaactatagtttaatttattttaccaacacaacaaaaaaagggactgtttcatcagaaggagaatattagcaatagccataggaaatgggagtcaggaagctcttatgggtaagagatgttggtttgggtgccacgaccaatctgggtcacagtggagaatttttgcatgatggggaaaaaacawgtcattggtttcactttgccttggatggaacataccttatgccttgagatatggcacctctctctgctctattgccgtgatcaacaaaatgtcttttgatcactagtttagttacccaattccttttatgtggttaaagaaggtaccagaaaaagggcasgggrgcactctggttaatcgaagggaggtatttccacactgtgaattggtgaacaggctcctggtttgtagataagtcttgtgtacatttagtccactattgagagtttcttgatttcctggtgtcagtataatctggtttctgatactacaaagccaagaccagatctttcactatggagaaatcacaataatgcctctctaggtattctctaaaaatcacctagccaagctttccatttacttcacccttctttcaaacttcagaaccatgctattctgagatgctgatcaatacacatggaaagaataaatctcctacaagcaaatgctagcaaatacaagtttctcttccatagtgcatacacagatrtgttttctttcattcagtgctgtgaatacccagtgcaaacttacgagtcttatttttgtttacagtggaaaacttgagccaggcatgacttacacaaaattaatcgatgcagatgttaaygttggaaacattacaagtgttcagttcatctggaaaaaacatttgtttgaagattctcagaataagttgggagcagaaatggtgataaatacatctgggaaatatggatataagtaagtattgctttttccttttcattttcgtagtttacattttataaatggtgtttaaacccacagataatttgaaatgtgcaagtagcataaaaatttatagactttgaaattttgcaattaaagaaagggaaaagttaagaaaccaatgctatatgtgcagaagtgttagaaaataagaattactcattaaatcgggggatctaccgtgtctttttcttccctggcatcaggttaaaattccttttttttttccttaaaaactttcagatctacctwctgtagccaagacattatgggacctaatattctccagaacctgaaaccatgctaatctcagatacagtcttgatggatttctttagtaggagcaatgaagaaaagtgtctccttccacctggcatccagaccaaatttgacccttgtaaatgacttagtcatttacaagggtcttactcagagtcaagtacgggtttgctttttttctgtgtagaatgttcatctaactgcaccttaaaaacacactgaaccctgggacaaaagataattactatgatctgtaggaatctggatatcattgacaaaatagagctgttttggaattttcctgaataagaggaggtgatgcaaatgtatgttgagtgtataaactcactggacaaaagtaagcctctggcttgctgagtttttgaagtatattttcaggtataataatcattgttctaaaattatataaaactatttgttatgttgttaaatcttgctgagacaaattatgactatagtgcatgatatatagtagattataaccttgtgggttgatgtgtctatctagtaataataaaaactaatgagatggcactagtatttccaaggtgttccttggtgttcagggtgtgcacaagagagattttggagcttatctgttatgtgttcatcagttagcaatgggacctgaagttcaacaacccagggtatagcccccttcctccaaagtccctgccacaggagaattactcctctctctgggtcttgaatgctctatggtgaatttgtatttagcctcaaggcagcatttcatttgtaaagcacttgggtaaccctttgttcttgcaataacaatattataatatttaaatatgtccattgtgtttcttttttctttatgttgcttcaatttcttccaagtcggttgtccttagccagcgaaagggagaaatttcatactttcatttgctctgttttctatcactaggctcagtgtttagcctataggtctgcgctataaatattgttggaaggaaatgatgacagatactctgcagagggtttctcgattctccttggtgcctcgctgccagctgaaccttcagaaagacccgtgggtgtacataaataaatctgtgctgtggtggaaagcagagaagcatgtgggatgactctcccattttgcaaggaagggatggaagattgctggggagaaggaggaaagcaggttcagggacattggcatgatgtagtggtgtgtactgctctcactggtgggctgcacatattcacacctaggccaacctaggagcacagtgtctatgagtaagctcagtagaagggactgagccatactgagtaattgtgtcgcagtccagcattcattagcaagctggtggtggagtcagcacagaccctggggagagaagtcttcctgagagcagctgtcccgagcctgcacaggtcccaaggtagaggaagagttatgcatccggccgtggccttaggcaacgtgagtactagctgcctcctcacccaggagatctctaggctggctccttcaaggtttgaaaagactaatgggagtcaattaacttctgagaaccctattttaataaagtatagacttactgtcctatagttcttaatatctgtccccttttttgcattataagaatgtatgaggatgaataatagtgcatgaactatctaggcaaaggaattccaaaagttcaaggtgacgccattattttctgtgtgtgcttttccctaaggaagcaccaaaaaaaaatgattccctttccctctgagtgccctgaattattgtagcaagcaattgtggcctactactgtttgggcaaggactgttagggaattgttctgcttcctagatgaatgctgaaaatgcagtccaattacccattactccctccactctctgtgactattgacccacactcatgccttgtcatcatatcactcaaaaatgcgcacctccaaactcgccacgcggaatgtcctctttgaccacagttgcctccccttccggcttgctgacttttttttttttttaactgttaggcaaaatcttaaccttgaatactttcagatttcttttctctgggccagcacctgaagtgctgttgggacagtggtaccacagagaagacggatgtaattagaatgtatatgatatgatgtatattgtgatcagcactgtcctgaaatgcgtttcttttgacacctcctgccccaaactcttctgctactcctactttatatagaaaacagatgccatgatccgatagcaatctctactcttttttttttttctctgtcgcccaggctggagtgcagtggcgcgatctctgctcactgcaagctccacctcccgggttcacgccattctcctgcctcagcctccccaggtgcccgccaccaagcccagctaatttttttgtatttttagtagagacagggtttcaccatgttagccaggatggtcttgatctctggacctcgtgatctgcccgccttggcctcccaaagtgctgggattacaggcgtgaaccaccgctcccagccagcaatctctactctttttgatccaaacacatcaactacctacatctgcatccattctatcctttttctttctaataaggaagctgcctcttctttcccaggctaatccctgcctctgtgcagtggcctccaccctctcctgctttcttgggaacactgccctgcgggttactttttctttcttttgtatattcaacttatcattgcatccggtttttaaaatctgaagtccctgccattacaaaataaaataaaataaatccttccccatcctaaattcctctctgctcccatctgactttagaacagctctcacccagatttccaatgaccaccagtcacaaagtcaaatgggaaattctactcatttgctccgtcccatagcagagttcaacactgttgtcaactccctgccactctctctctttttaaaaattaaaaaaaaaaaaattatttttggccaggcgcggtggctcacacctgtaatcccagcactttgggaggccgaggcgggcggatcatgaggtcaggagatcgagaccatcctggctaacacagtgaaaccccgtctgtgctaaaaatacaaaaaattaggcatggttgcgggtgcctgtagtcccagctactcgggaggctgaggcaggggaatggcgtgaaccccgggaggcggagtttgcagtgagccaagatcgcgccactgccaccacactccagcctgggcgacacagcgagactccatctcaaaaaaaaatatatatttgtagaaacttttaaatattcacaacagcaaaaaaagcagtaaactagcacccccaggtgcctgtcaaccagtttatcaattttcatatattgccaatcctattttatgagtgtgcacacaaacacactccctatttttgttttgtttgtttttgctggagtattttaagccaaatcctagacataatgctgtttctcccatttatactttagtatgtatctgtaaatgataaacttgcttacctgtcaggcctctgagcccaagctaagccatcatatcccctgtgacctgcacgtacacatccagatggctggttcctgccttaactgatgacattccaccacaaaagaagtgaaaatgccctgttcctgctttaactgatgacattgtcttgtgaaattccttctcctggctcatcctggctcaaaagttcccctactgagaaccctgtgacccccactctacccgctagagaacaacccccctttgactgtaattttctttcacctacccaaatcctataaaacggtcccacccctatctcccctcactgactctcttttcggactcagcccacctgcacccaggtgattaaaagctttattgctcacacaaagcctgtttgatggtctctttacacggacacgcatgaaatttggtgccgtgactcggatcgggggacctcccttaggagatcaatcccctgtcctcctgctgtttgctccgtagaaagatccacctacgacctcaggtcctcagacccaccagcccaagaaacatctcaccaatttcaaatccggtaagcggcctctttttactctcttctccaacctccctcattatccctcaacctctttctcctttcaatcttggcgccatacttcaatctctcccttctcttaatttcgattcctttcattttctggtagagacaaaggagacacgtttcatccatggacccaaaactccggcgccggtcacagactagggaaggcagccttcccttggtgtttaatcattgcagggacgcctctctgattattcacccaggtttcagaggtgtcagaccacgcagggacgcctgccttggtccttcacccttagcggcaagtcccgcttttctggggaaggggcaagtaccccaaccccttatctccatgtctctacctcttcttcgcctttctggggggcaagaaacccccaaccccttctccttcacccttagtggcaagtcccacttttctaggggaggggcacgtaccccaaccccttatatctctgcatgctgatcccttatttccgtgccccaaccccttatatctctgtgccccgatcccttatttctgtgccccaaccttgtatctctatgccccgacccctttcccgcttttctggagggtaagaacccccgaaccccttccctccatgtctctactctctcttttctctgggcttccttccttcactatgggccaccttctaccctccattcctccttcttctcccttagcctgtgttcttaagaacttaaaacctcttcaactctcacctgacctaaaatctaagcaacttattttcttctgcaatgccacttgatcccaatgcaaactcgacagtagttccaaatagccagaatatggcactttcaatttttccatcctacaagatctaaataattcttgtcataaaatgggcaaatggtctgaggtgcctgacgtccaggcattcttttacacatcagtccctctctagtctctgttcccaatgcaactcatcccaaatcttccttctttccctcccacctgtcccctcagtcccaaccccaagcatcgctgagtctttctaatcttccttttctacagacccatctgacctctcccctcctccccaggctgctcctcgccaggccaaggtaggtcccaattcttcttcagcctccgctcctccaccctataatcctttatcacctcccctcctcacaccgggtccggcttacagttttgttctgcgactagccctcccccacctgcccagcaatttactcttaaaaaggtggctgaagctaaaggcatagtcaaggttaatgctcctttttctttatcagacctctcccaaatcagtgagcgtttaggctctttcatccaatatgaaaaacccagcccagttcatgactcgtttggcagcaaccctgaaacactttacagccctagaccctaaaaggtcaaaaggccgtcttattctcaatatacattttattacccaatctgctcccaacattaaataaaactccaaaaattaaattccggccctcaaaccccaaaacaggatttaattaaccttgccttcaaggtgtacaataatagaaaaaagttgcaattccttgcctccactgtgagacaaaccccagccacatctccagtacacaagaacttccaaacacctgaaccgcagtggccaggcattcctccagaacctcctcccccaggagcttgctgcaagtgccagaaatctggtcaccagaccaaggagtacctgcagcccaggattcctcctaagccgcatcccatctgtgcgggaccccactggagattggactgtccaactcacctggcagccactcccagagcccctggaactctggcccaaggctctctgactccttcccagatgttcttggcttagcggctgaagaccgatgctgcccgatcgcctcggaagccccctagaccacggacgccgagcttcgggtaactctcacagtggagggtaagtctgtccccttcttaatcaataccgaggctacttactccacattaccttattttcaagggcctgtttcccttgcctccataactgttgtgggtattgacggccaggcttctaaacctcttaaaactccccaactctggtgccaacttagacaatactcttttaagcactgctttttagttatccccacctgcccagttcccttattaggcagagacactttaactaaattatctgcttccctgactattcctggattacagctacatctcattgctgcccttcttcccaatccaaagcctcctttgcgtcctcctcttgtattcccttaccttaacccacaagtataagatacctctactccctccttggcgaccgatcatgcacccattaccatcccattaaaacctaatcacccttaccccgctcaactccaatatcccatcccacagcatgctttaaaagggttaaagcctgttatcactcacctgttacagcatggccttttaaagcctataaactctccttacaattcccccattttacctgtcctaaaaccagacaagacttacagattagttcaggatctgcgcctt

SEQ ID NO: 93591 - DNA, 53808 bp, Homo sapiens
  misc_feature (1)...(53808): n = A,T,C or G
ccatctagccctccttttaggagttctatcaccagctctgtattgcccatacatgctcattattagcagtcagtttctggctcaacaacaggtgaggaagcactcccagaaccctgcagcttactgtgggattctggagaacagaagggccttcgtggccagatgcagtggcttacgcctgtaatcccaacactttgggaggctgaggcaggtggactgcttgagtccaggagtttgagaccagcctgagcaacatgacaaaaccccatctctactaaaaatacaaaacttagccaggtgtggtggcatgcacctgtagtcttagcagggggctgaggcaggaggaccacctaagccttgggaggttgaggctgcagtgagctgtgatcatgccactgcactccagcctgggtggcagagtgagaccctgtctcaaacaaacaaacaaacaaacaaacaaaagaagggctttcatagctaaaagcacagaaccatcaggaaggacaactatgtggggacttcatacaactaagtgggggcttcatacattaggtcagtgaccccttcaacaactaaatgggggcttcatacattaggtcagggaccccttaaaccacaaagaggcctctttggttgagcagactcaacatgcagccaatcctgagggtaaagataccctcagtggcctccaccccacctctggctcctaactcaccttggagtgaagaatggagccatgccaggcttcccaaaccagccctccgcccaaactctctgaccactgaggctcccaccagaagcctatgccacacacctccttcttgtccttggatktgtcaatctccttcttgagcagctccacacgctgaaaagactctctgctatctgtgctatagaccaggacgtagccatcagtgcaagagaagcagtgtcggggcagttcggccccatctcggagcccccgggtgtcatagaaacgcacctgctctcgcaccccccggtctgtctcaatggagcccacgtagatgtcctcctgcgtctcgatcatctccgaacctggtataaaatgagaaaactgtctgaagtggagagagagatgggaaatgtgagtgatgagagcatcttaaggctgaccaaatggggagaaaggaatgtagggggctgaggaggccagagaattgacagcctggcaggactgaaatgatttgggtttaggggaacgaacattaatttctttctttttttgagacggagttttgctctcgttgcccaggctggagtgcaatggcgcaatctcggctcaccgcaacctccacctcccgagttcaagcgattctcctgcctcggcctcccgaatagctgggattacaggcatgtgccaccacacccggctaattttgtatttttagtagagacagggtttctccaagttcgttaggctggtctcgaactcccgacctgaggtgatccacccgcctcagcctcccaaagtgctcggattacaggcgtgatccaccgcacccggccaatggacattaattttatgctaattccatgctaagcacaagtgtgacatgacagcttctctttcctatcttggacatagggctttctccctccggatttgttcagtgttgtagagttgatctgttacaatgtaagttttattcttccaggggggaaaaccaccaggagcagcttttagcctgtgtgtgttgtgatcaagtcctattccttatttttcaacttcttccactgttcctccccctccaacaacactcacccactacatggttcccatacagaagctgctccaggattgaagttttgcccacagacgcctggccacacacgaccaccttgcagctcttccccatgcttagttttcaaccttgaagaacagaagcacgctgggtaaggtgaggaaagaaagcatcaacacagaaggcagttactagcagatgttttctggtggacaaaaacaaaaaccaaaaaaacagaaggcagaacgtccataactgagagttctaaactgaatgtatagttctaaactgaatgtatagttccagggtttcagcaccatcccaatgctagtcagaggaaacggatgtctccatgtctactactggatggtaagctgttattttattcgtctttgttatccccagtacctagccagtatctgtcacagggcaggtgcttggaaatgctgccataaagggagaggagagtcactggccactgggccaggttcccttctgtgcgcaagatgtagaggaccaattagtaaagggagctcagcccagcttcctctctttaaccatgaccccatggagaattaagcaggaacagtgttttgtgtggctgtctgaagccatctgctccctggggggactgagcaaataaaaaggataatctggggcagggcacggtggctcacgcctgtaatctcagcacttcgggaggccgaggtgggcagatcacaaagtcaggagttcgagaccagactggccaacatagtgaaacctcatctctactaaacatacaaaaaattagtcaggcgtggtggcgggtgcctgtaatcccagctacttgagaggctgaggcaggagaatcgcttgaatccaggaggcggagattgcagtgagccaagaatatgccactgcactccagcctgggcggcagagcaagactccgtctcaaaaaaagacaatctgctttcctgtacgactcatctggacaacaatcaattccctctaaactccagtcaagtctatggctaaaatgaacataagacaagagagaaaagaatgaagaaacctacggaaaaaaaggcttcagaaaggacatactttttgctgcccttggactgacagacacaaaagagaaagctcagatacagaaaccctaagaggtcccagacagatatctccccgaaggcaaacttccaaacacaagccccccaaaagctccagacaaagatcccccccagagagcagagatagatcactcccaaagacggtccctaacagaaacctctccaggggaagctcctgacacagaccccctctccatatagcgagccccacaataaaggacaccataagagtgggccagaggtgcctccgccacagattttctcacgggggagcccccagagggaatgagaggcagagaccagccacctaaagcggcccggaggcggaggccgatcctagcgccggacgagcctcgcctcccaggtccgtacctcccggggcccccgcagcaccagccgggccctccgagctcgcggggaccaggggaggggcagcgccgccgcaaaggctccagtcttcctccagagtcggtgtaggctcctccaggccccgcccccgccgcctgcccgctccccagcttccgtcaggcaagacgaattccggcagcggagagagagcgcggaccgcgcagctcccccagaggccggcgggagaatgacggccaggacctggcctgggtgtgcgcgggagcccaaggttctagactccctggacgcgggccgctgggtgttctggtgtctctgaggcccagatgttctctctgtaaaggcgatcagagtacagtaactcttcgtttactcaatcatttattcgtcaaatgttttctgagcatcatctgtctgtgcctggtgcagggccatatactgagagaaagtggacgagttagacatggtggctgcccatcagaactcacggtctagagaagctagatgtctaacaactactgaggtgctgtggagcacagcaaaagggcatttaacgttgagtcagcagacactgaagggcctgggggaaagggtgttctagggtggaggaaacggctacaagtcatggcattttctgaaactatgagaacttgggttcaatattggtggtagaaaggacctaaatattggtactcaaattaaattatttaaaaaaagaaacagataatcaaaggctttgtgtggtaggccaaagagatcaaattgacggcaatggaaagccattgccaatgaagagacatgatcagtccctgaggaaggtcactctggcagaagagggaagactgaacagagatgaaattagagaccgattaggagactattgatgtattccaagtttttttttctgttgttttgttgttgttgttgttgccgtttttgagacagggtcttgctcttttctccatgctggagtacattggtgtgatcatagctcactgcagcctctaactcctgggctcaagtgatcctcctgcctcagcctcccaaatagctgggactacagatgcatgccaccacacccagcctattccaagatttaaaaaaatgatgagcgcctgaatcgggatggaaaggtggagatagatttgggaaatatttggtaggagaatcaacaaaacttggcaacaaattggaagccaagagtgagaatggtttaatccatttaacaagatacggaatttaggaaagataataattacatccaacatttgttttttctgttgttgaggtgtgggtagacaatgaaaaagttaaatttaaatatggtaagccttggggatttgtgaaacatacaagagatatccagtagatagttggatatacagctgtggaagctgaagaaaggtctaggttggagatatgaaaagttgagagtcatcaacagatggaagtaaagctgtgggaataaatgagttgccttagatagaacataaagtgggaagatggtgagacaggttggctagcattagactggactatgagccactggcaggcagggcaggtggtctgtaagtcttgtgccctcacaacctagcacagagtaggcgttttggaaagggctgagtgattggctcaacgaatgacccctcctttccaacctagtgagcttgtcctatccctccctactcagtggtcgctgtggtttcagctccctccacactgggataggcagagtatgagcattggcacatgctgttttcctggaacaaacaggtaaatccttttaaaattcctttgccctcttcttattttactcttagctttacattgtaaagctactcctcatactcctccaatttaaccccagaaagctccaatttaattcagctccacaaatagtcgtttgggtgagggaataacaacaaagacagttaaactgtgcccttgtcccctatgaattctcaatccagaccgcattcggcaaggcaagcgtgatgagtagagagtttatakaagaggtgggagtactggggacacaagagcaaggacctcaccccgcgagcttccttataaactccagggcagggtctggggcgccatgtgtcagctttcctaggcttaatgctgagatggcactcccaggcggctgacatgaaaggagccttgtaaaagggtcagcgtcattagggtgatgaaccagttggtgtttggagatccggagtggatgaaaggcgcagggtgaagacgccctgcgttcccctggcttgaytgggcagggcttccagagaacgatgaaagctgggggaactgagctcaaagtgtctcttgactttcccgggaagaagctgtggacacactccaaggtcggaaaggtagcagtggggactccttccctacagagtcttgggtcacctggtccccacgcaacccagactccacggagcctttcaggaagactctctaggattggaagttgctatggcaatgaggctcttggaatactgaaagcagccaagccctagagaggctaccaccggtacaccccgccttcccacccacgggtaaagtggcgccgcctacgcaccggcacagcccctgggctcccgccccggcgcggagaccaccgtggacatccgggggcgggaggccgctctggccccaagcggagcctctctctggtagacgagcccgagggagcccttctgggcgmggcgccgcggagctgctctatgctccaaccggaagtgctcttcaccgccggcctcccacccagctctctggtcccggcggtaagatggcggctgccgcggagtgcgatgtggtaatggcggcgaccgagccggagctgctcgacgaccaagaggcgaagaggtaaccgggtagcagggtagtagaggaggcgacctgcagctccgtggctcagggaaactcgttcctgccatgatgcagcccccagctgttgaggcgatgccccgccctccgcaaacacccccccatctgagatcaaggccggatggaccccctgaaggggcgctcttgggggtcggccttcctctcccgcttccgcctggcgtaggagctgaggcatggccttgttctccagctgagaggacgatcgtccttataggagaggccgagtctccgagggcaatttcagaggtctggtgcgaggtgggggaagcggcgcggcgtcgatgacgacttccttacatcgcccccgacccccgcgttctcttgttaacttctgtgcattgttgcctgtctgcactttccgtctccaaaacctttgctctcctcaccccgttttcccttgtaattataccccagcgatcactagtctgggttcgaagtgattgtgtgtctccataattgacctggttgcccccggttatcccagaagtcaaagatgacagagaaaaaaaggaagagcgaggggcttatctcgtgttctctacgtcagactcctcttcccctgtccttcctgggtgatctttatccttcccagcactgttctttcttaagttaagcaccaaggaagagggcaactgcttgggcgctgttrgcactccgaagcagccgcagtggttcgagattgccagtcggactagccaagggagctgctgagtgagtggttttcgagaacgctctagattctggcaacagttaggccagattattggaagtggggttggaacagagttgtgggtagtcatacttgttctaatcctaaagcagaattgacaagaaggttctagaagtttggagccctttccttatcagctgcgggttagtctgacccttttgttcaagatatctacagtgccctcagtctctttgcaacatactttatatcttcataccaagcccgttgtgtcttcaggctgggtaatttgaggcggtgatgtagaattagttcatgagatctgaaatcaggattctgagatttttactatctaatgagttcgaaatataagaagtactcggacgcaatgaatagttatcaagcttgagggtggttaccacagccagatctcaagttcctgatctgctgggagctgaggggcctgacaaagtgtaataggcccctgggatatcagagaagccaggacaccagagtccagtctctgttcttaattttgagctttcatgttgttcctacttcttcctagatatttaaagctaagcatcatcaacccttatacatcattaaagagctgcacaatgggaaacaaaattcctcccagtgcagacggagcttaaattaattgtagagatttacttgtatttggaaagagttcagtggttctttatactgtaaatagggatttggccacaggttatttattttttattttttgagacggaatctcgctctgtcgcccaggctggagtgtagtggcgcgacctcagctcactgcaagctccgcctcctgagttcacaccattctcctgcctcagcctcaccagttgctgggactacacgtgcccaccaccacatccggctaattgtttttttttttttgtatttttagtagagatggggtttcaccctgttagccacgatggtctcgatctcctgacctcgtgatccgcccacctcggcctcccaaagtgctgggattacaggcgtgagctactgtgccgggctggccataggtaattttaaaaactcaccctactcattgtaaatctctgatgtagagtgtccctattttggacttcatttcatagcctcctatcttaagcaaatacatttcttcaatcacagccttagaggatagtctatcataaaattggagtaaatgaacctgaagacatataataaaataggttatgctgtaatgtgaccacatcacacaaaacatggtatttgatagcagtacaacaaaataaggtaaactaccttatttcatggaatttaagtgtcattaggctgggtgcagtagctcacacctgtaatcccagcactttgggaggccgaggcaggtgggtcagctgaggtcgggagtttgaaaccagcatggccaacatggcagaaccctgtctctactaaaaatacaaaaattagcggggcgtggtggcacacacatgtaatcccagttacacgggaggctgaggcaggagaatcgcttgaactcaggaggtggaggttgcagtgagctgagatcgggccattgcactccagcctgggtgacaaagtgagattccatctcaaaaaaaagtcattgattgcagaatgcaaattattttatctgtcactaagaaaatgtaactgtaaattaaacatgacaacatgcattattcctgtagttcaaatagtgacagaaaaaaattaattaaaaaaagaaaaaagactgggcgtggtggctcacacctgtaatcccagcactttgggaggccaaggcgggtggattacctgaggtcaggagttcgaaaccagcctgactaatacggtgaaaccccatctactaaaaatacaaaaattagccaggtggggtgatgctgtaatcccagctagtcaggaggctgaggcagaggttgtggtgaggggagatcatgccattgcactccagcctgggcaacaagagcaaaactccgtctcaaaaaaaaaaaaatcaattaaaaaaagaaaaaaatgcattcttatcagacttttatgtttctcatatatagcactgttttcgacagacttaaacatagttatttattatataccacttttttgcacaaatcaaaaggaaaattggctgggtgcagtggctcacacttgtaatcccatcattttgggaggctgaggtgggcggatcacgaggtcaggagtttgagaccagcctggccaacatggtgaaaccccatctctactaaaaatagaaaaaatagctgggcgtagtggtgggcacctgtaatcccagctactcgggagtctgaggcaggagagtcgcttgaacccgggaggcggaggttgcagtgagccaaggtcacaccattgcactccagcctgggcgacatggtgagactccatttcaaaaaaaaaaaaggaaaataagtgaaataaacaaaaaaatcagtttaactttttgccatatcagacatccttagaagaataaacattggccgggcgcggtggcttatgcctataatcccagcactttgggaggctaaagcaggctgatcacctgaggtcgggagtttgagaccagcctgaccaacatggagaaaccccatctctactaaaaatagaaaaaaaaaattagccaggcatggcggtgcatgcctgtagccccaccgacttggaggctgaggcaggagaatcacttgaatccggtaggcggaggttgcggtgagccgagatcgtgccattgcactccaacctgggcgacaagagcgaaactctgtctcaaaaaaaagaataaacattaggctctgttagtatgaaaaagccttgtttatgtatgatttttccagtgctgaaaatgggatggagatttagaagctttggagggaggtggttttatgtttttcatgtgtcctggattcctcttgtgtggccatagcagagggcagtgataggggcatcccttacaaatgcccttttactgtctggcttggttagagttctttggccaagttcctgcctctgttgttatggtcctcctaccagttcatttagggatcaagagttaatgagtctctcgggtcgtttttgtgaggtccagctttgtaaggagtccttccttccttacgtcttggcttaagacatgtcctgctgctgctaagttgtcacagtcccataggggggcaaaatgagaggagcttttaagacggacttcacgattgcagcattttaaatggctacatgttttatttccttagctttagtgtttctgtagagaaaagagatggatttcaatttttttgcatgtcactctgacaaagttctgtttcccttacagcagccaagaaactaaaataaggctaggcttagtggctcatgcctgtaatcttagcactttgtgaggccaaaatgagaggatcgcttaagcccagtagtttgagaccagcctgggcaacatagtgagacttagtctctataaaaacatttaaggctgggtgcggtggctcacgcctgtaattccagcaccttgggaggctgaggccagtggattgcttgaggccaggagttcgagaccaacctgggcaacgtggtgaaacccgccccccatctctgtaaaaaaaaaatacaaaaattagcagggtgtgatkgtgcatacctgtaggccctgctacttgggacgctgaggtgtaagtatcacctgagctgggggaggtcgaggctgcagtgagctgcgatcacaccactgcactgcatcctgggtgacagagtgaaaccctgtctcaaaaaaaagggttggggctaaaataaaagatatattagttggcactccaaaacagatcaggattctatgcatgaagattatttctctttgctcaccaaaacaggcaaagctatttatgagccagagggttaaacttcagatgtttcacatttcaactaacttaaggctttatattttcctgggaagttgctgactgctttacctaatatgggaatacctgtcttgaattaaggatctcttgttatatctcctgggctgggaaacagcttgatctctatagggagtctttcttatggtaaacttgagggatttcaaattgttttcttttctttttgacggagtctcgctctgtcaccaggctggagtgcagtggtgtgatctcagctcactgcaaactccgcctcctgggttcaaatgattctcctgcctcagcctcccgagtagctgggactataggcgtgtgccaccacacccagctaatttttgtatttttaatagagacggagttttaccatgttggccaggatggtctcgatctcttaacctcatgatccgcccgccttgtcctcccaaagtgctgggattacaggcgtgggccactacacccaacctcaaattgtttttcaaagagaaaacacttacgtgtctcagcatatacctagtgtgactggacaacaagatctaaaagaatcaagggatccatagacttaagagtcaggacatccttacctgattccttgagctgataaacttaacttctctgtatgttttcctgatgggcacaaataagagcaattcttattaggcccttactacctaggtattgtacactctttgcgattaggattttgccttttatttctctattcagattgttaatgggaacaactgaactctcaattcatgtcccaggtttcctgtagttgctgttcgtttgctgcagctttgcatggtgtttttgagtttgtggcctcacttaactgaagagcttgtgggcatgcctccccagctttcttccttacctggttttaaattcttaggaatgtgtccttctaatcttcctcttgaagtttcagagcaagcacctagacatttcagtaagcctccaaactgagtgggaatttatctttgacctggaacccaaatcagtgagaaacactattttccttttgctgtgcactaagtgtagtcagatgtgaagaaatgggagatgggaggagaaataagttaaggaagggataaacctaggaatacagaattctcaataccggcaaattaattgaaccctgatactaacagatggcaaagtagataatcataactggagcaaaggtagagtacagagaaaggttctctcttagtgctttagttcagatccacatgttaactagtgccagagaaacaagaattttgagaaaatatagggccaagtgagtggcagttgcttagagtccagtccactcccaacaaacagaactctgattggccgaaagcccagccttattgtacattccagccaatcagggattagtttagtcattgaagtttgtattttaatggttttgaaaagctgagtactgggcacttgcttttttgttcttcgggactttagaagtttggagaacaatagtcagcagttgcctagttgctttgtggcctgatgcagagtccctctgagagcccatttctcccttactgcactagtctttggtcccctttctccagcactgagtgatgtggaagttactcagaggtctttccaggtattcttttaaacttttgaagtaagaacaaaattcaaagtgcagttatcctaacaggctattcattttattggagtgacactgtttttccttctcccattcggatcaaaatggcaattcctatgttttaccctcaccatgggtaagaatatgagtggttgaggcttttgagaatggtaataggaggaatatatgactctcaggtcttattctgagacgtgaaattctattggcatgtgacttacaatttgtgtggggaggccagattgtcagataagcagtgttaaccatctctcttgattctaatattacttttggagagagtgtgaggggcaagcaggaccctctcttgtttttggagtttctgtcctgagagttcttccttggacagtttgccctgagacagttaaccacctgttgaactaaggaaccaagacaactttgagaagtgaaataccgttgacaatccaggctcctccccactctagttcccatctccaccccaccccactccacccaaaaaaactcaggaagcagcctttatatatatatatttttgagacagagtttcattccttgttgcccaggctggagtgcaatggcgcaatcttggctcactgcagcctccgcctcccgggttcaagcaattctcctgagtcagcttcctgagtagctggaattacaggcatgcgccaccacgcccggctaattttgtattttttttttttttttgtagagacagggtttctccatgttggtcagtctggtctcgaactcccgacctcaggtgatccacccgccttggcctcccaaagtgctgggattataggcgtgagccactgcacccggcctaggaagtagcctctttctttctctctttctgtctgtctctttctttctttctttctttgtgatggagtcttgctgtgtctccaggctggagtgtgcaatggcacgatctcggctcactgcaatctccgcttcctgggttcaagctatcctcctgcctcagcctcctgagtagctgggactacagttgcatgccaccatgcccagctaattttttatatttttagtagagacgggtttcaccatgttggccagtatggtcttgatctcatcacctcaggatctgcccgcctcggcctcccaagtgctgggattacaggcgtgagccactgcgccagggcaaagcagccttttccttaattgtagttcctcagttttaaatttttgatgggtgctggtgtccctatagtgggagatgtcacagaatagggaaccgagggatggaaaatggtgggtttggggatatgttatgaaaacaagcctctggctaatgctgaaaagccagtgacttgtatcctcagaatggtttcagagaagcatgtttcccagaagtagcttcattgttgggtctcctctccccagggataagtgaaggttaggtagatgtaatagattgtgacacctctcatttaaggacctaaaataaatttccaactcaccgttgagacaagtatttccaagtgaatatgtttctgcctgcagtgatgggatttctgtagggattgaattggttgcttgctttttcttccttactgaataaggcatagccagctgcatagccaggcacagcttgctggctggtgtccgtccctgcctgaacagtagggagtgctgctgctttgtgtagacagtctgtgactcctctggtgcattttgggtcccttctgactctgcccgtgttgaggcttctccttgaatgtccacccagaggacaatttgaactggtatgttaaggaattttcttcatcttctgccttctctttattagcggagatgtgtggagggttgttccatttgtgctttaaagtgaaaactatctattctgtaggaaattgggtaaagaaagctgagtagcagatagctttgctaaaaggtagcagttggatagcgctcaccttctatttttttctggatgaagcaccgagcataaataccttgccatatttatagaattattccaagtcatatatctatggcccggcgtgatggctcacgcctttaatcccaacactttggaaggcagagattggcggatcacttgaggtcagaagtttgaagaccagcctggccaacatggcaagacctcatctctactaaaataaacaaagattagccaggcatggtagtggggccctgtaatctcagctactcaggaggctgaggcaggagaatcacttgaacctgggaggcagaggttgctgtgaactgagatcacaccactgcactccagcctgggcaacaagagtgagagtctgtctccaaaaatatatgtctgacccggcgcggtggctcacgcctgtaatcccagcactttgggaggccgaggcgggcggatcatgaggtcaggagattgagaccatcctggctaacacggtgaaaccccgtctctactaaaaatacaaaaaaattagctgggcgtggtggcaggcgcctgtagtcacagctacttgggaggctgaggcaggagaatggcgtgaacctaggaggcggagcttgcaatgagccgagatggcgccactgcactccaacctgggtgacagagcgagactccgtctcaaaaaaaaaatctatatctatatatatatatctatacctgtgacttccacttatctatgtgaaacttatattgacatttcacttgtagaatagtagatttttttttttttcttttttgagacggagtctcactcttgcccaggctggagtgcaatggcacagtgctcggctcactgcaacctccgcnnnnnnnnnnnnnnnnnnnnnnnnnnnnnnnnnnnnnnnnnnnnnnnnnnnnnnnnnnnnnnnnnnnnnnnnnnnnnnnnnnnnnnnnnnnnnnnnnnnnnnnnnnnnnnnnnnnnnnnnnnnnnnnnnnnnnnnnnnnnnnnnnnnnnnnnnnnnnnnnnnnnnnnnnnnnnnnnnnnnnnnnnnnnnnnnnnnnnnnnnnnnnnnnnnnnnnnnnnnnnnnnnnnnnnnnnnnnnnnnnnnnnnnnnnnnnnnnnnnnnnnnnnnnnnnnnnnnnnnnnnnnnnnnnnnnnnnnnnnnnnnnnnnnnnnnnnnnnnnnnnnnnnnnnnnnnnnnnnnnnnnnnnnnnnnnnnnnnnnnnnnnnnnnnnnnnnnnnnnnnnnnnnnnnnnnnnnnnnnnnnnnnnnnnnnnnnnnnnnnnnnnnnnnnnnnnnnnnnnnnnnnnnnnnnnnnnnnnnnnnnnnnnnnnnnnnnnnnnnnnnnnnnnnnnnnnnnnnnnnnnnnnnnnnnnnnnnnnnnnnnnnnnnnnnnnnnnnnnnnnnnnnnnnnnnnnnnnnnnnnnnnnnnnnnnnnnnnnnnnnnnnnnnnnnnnnnnnnnnnnnnnnnnnnnnnnnnnnnnnnnnnnnnnnnnnnnnnnnnnnnnnnnnnnnnnnnnnnnnnnnnnnnnnnnnnnnnnnnnnnnnnnnnnnnnnnnnnnnnnnnnnnnnnnnnnnnnnnnnnnnnnnnnnnnnnnnnnnnnnnnnnnnnnnnnnnnnnnnnnnnnnnnnnnnnnnnnnnnnnnnnnnnnnnnnnnnnnnnnnnnnnnnnnnnnnnnnnnnnnnnnnnnnnnnnnnnnnnnnnnnnnnnnnnnnnnnnnnnnnnnnnnnnnnnnnnnnnnnnnnnnnnnnnnnnnnnnnnnnnnnnnnnnnnnnnnnnnnnnnnnnnnnnnnnnnnnnnnnnnnnnnnnnnnnnnnnnnnnnnnnnnnnnnnnnnnnnnnnnnnnnnnnnnnnnnnnnnnnnnnnnnnnnnnnnnnnnnnnnnnnnnnnnnnnnnnnnnnnnnnnnnnnnnnnnnnnnnnnnnnnnnnnnnnnnnnnnnnnnnnnnnnnnnnnnnnnnnnnnnnnnnnnnnnnnnnnnnnnnnnnnnnnnnnnnnnnnnnnnnnnnnnnnnnnnnnnnnnnnnnnnnnnnnnnnnnnnnnnnnnnnnnnnnnnnnnnnnnnnnnnnnnnnnnnnnnnnnnnnnnnnnnnnnnnnnnnnnnnnnnnnnnnnnnnnnnnnnnnnnnnnnnnnnnnnnnnnnnnnnnnnnnnnnnnnnnnnnnnnnnnnnnnnnnnnnnnnnnnnnnnnnnnnnnnnnnnnnnnnnnnnnnnnnnnnnnnnnnnnnnnnnnnnnnnnnnnnccccatattgatgaggctggtctcgaactcctgacttcatgatctgcctgccttggcctcccaaagtgctgggattacaggcgtgagccaccgtgcccagcctggttttgttttttttaaaggcagggtctcactctgtcacccaggctgcaggaacatggtttgctgcagcctcgacctcctgggctcaggaggtcttctgcctcagcctcctgggattataggcgtgagcctataatttcccaaaaattaaataaataaataaataaataaagctcttttctcaaaaaaaaaaaaattggccaggcgtggtggcgtgtgcctgtaatcccagctactcaggaggctgaggtgggagaattgcttgaacccaggacgtgggggttgcaatgagccgagattgcgccactgcactccagcctaggtaacagaggtgacagaggtcaggagattgagaccatcctggctaacacgatgatatcccgtctctattaaaaatacaaaaaaatcagccaggcgtggttgtgggcacctgtagtcccagctacttgggaggctgaggcaggagaatggcatgaacctgggaggcagagcttgcagtgagctgagatcacgccactgcactctagcctgggtgacagtcagactgtgtctcaaaaaataaaaaaaattaaataaataaataaataaagctcttttctcaaaaaaaaattggccaggcatggtggcgtgtgcctgtaatcccagctactagggaggctgaggtgggagaattgcttgaacccaggaggtggggattgcagtgagccaagattgcgccactgcactccagcctgggtgacagagccagacttcgtctcaaaaaaaaagaaaaaacaaaatcaaaccacagtgcggtgtgctttttgtcatataaaatttggatccacatttcctaggttacaagtgttgcagaataatgaaaccatgctagtctgtttttcatgcagtgaggtggaataaattttaaaatgatgaagaatctcatccctgttttaataatctgcaaatacgtgatatgtcaagcaattccagagagaacccagccatgttaatgacatttttaaaactaccacacaattaattctgcattagtgtaggctgactaaagtttctgattgatgctttaattgctraaagttagactagttgacccaacgcagagatcttaagtgttcaacttggaagtatttagagagaaaatggaaatttttatagggcatctaatttggggcatgttgcaatgtcaactatgatgttttaatgtgtttttaatttagttgagctgtaaatgtgcaaagttggctagcaaccataagcccaagttgtctgatttaatcacatgatgctgagccctgctaagacctgtgtgataccaaatgattcccttagcagtgtttgttggagtaattagtgtcagcaatgaatgaatgctgaattcagagagataatgtaactacatgtctaaaggatatacagattttaacgaacatttattgtagaagagcaagttttcaaagctgcagttttcttactggtgggtggttttgtttttttgagacagtcttgctctgtcattcaggctagagtgcagtggtacaatcacagctcgttacagcctcaacctcccaggctcaagtgatcctcccatcttagcctcccaagtagttgggactacagacttgcaccaccatgcccagctaatttttaaatttttgtagagacagagtctccctgtgttttccaggctgttctcaaactaactcctgcactcaagcagtcttcttgtctctgtctcctaaagtgctgggattacagscgtgagacattgcgcccagcaaggttatttctgaaaaacaaagaaatacattttaaaatagcaaaggagaccatgaatgggatgtcttctctgaaggccagggcttccagtgtgctgatcctgttgtgagagatcctccatgcatccagagaggacagatttttttggaaaacctttcagtagctgttttcatgcaactttattactgtcagttaaaatgaaaagactggattggtggaggtggagtcattcccagcatctcttggtgaatcagagctgtgaagctattctgcttagaagttgacccaaggatttggtgggagaactggataaattagttttaatctaaaagccttgacactaacaggatgtgggggaaaacataaacttctaggacttaggagacctgtgcagccatcttggttgcctcactagctcttcctctgttggaggataggtgaaattattgccataaccacctcagaaggccatttgaaaatcttggccaggcgtggtggctgacgcctttaatcctactagcactttgagaggtctaggcaggcggatcatttgcagtcaggagtttgagaccagtctggccaacatgatgaaaccccgtctctactaaaaatacaaaaaatagctgggcatggtggcacatgcctgtaatcccagctactcgggaggctaaggcgagagaacacttgaacccaggaggcagaggctgcagtgaaccgagttcatgccactgccctccagcctgggcaaaagagttagactccatctaaaaaaaaaaaaaaaaaaaaaaaaaaattgaaaatcttcattggaaatgcttcgaaaatctgaaataacactagaaatatattgtagttgttaatagtaccatcaggtcagttannnnnnnnnnnnnnnnnnnnnnnnnnnnnnnnnnnnnnnnnnnnnnnnnnnnnnnnnnnnnntgcattgggaatcctttttttttttaattggtctaggtgaagccaattaatcctaagtcttcttttctcagtactggtgtgtttcagtaggtgcatgttacaacctcacttggctatcagatgaattgaccctggcagtgagtgagtgacagatgccaccaccagattgccttcaattccagtgttaaccagctcttctcctttttttccagtcccacgcctttgacatctcatccttcagtccctttgctgtaaaggcaacttgaacaagcttcagccctttctcagacttccagggcaggacttgaatggatttgacactggaattgttcctgatgcagccttgttcagttcttgctgctgccatgctggattccaaagatccactctttcctcgactggtctcgcagggtcaggcccactggttaaagcttgttgtgtatttggtggggaggttcaaaatgaaggagggactccagtccactttgggcattggacctgaaggcaaaaaataagcgttcagtctaaaagcactaagtgcccattgtttaggcagctgttaatcagccacgtttctatgaaaataagtccttttcatgaggcagttgtgtgggaatagctaattctggcctgatgctgtgcagtgtgaggttaaaaacatggcaacttgtcacaacacaattcttcttgttctttttgctgtgggctgactctacattacttgctttgtttgctctagaatggaatctactcaccatttactaaaatgaaatgcatttctttggggaggcaaagtccagttcactaggtcttgcatcttaaagagaaaggagccctgcttcctctatgactaattgttaggaatgtcatttagcttatttaaataccgattttggttctggggttgaatattacatgtggggtgtactgtgtgtcttagtttaaacaaatttatatgtattgtccatgtcttacatatattgtccatgtcttactcctcgtagtacagaytaattttcaaaatagttagcagtaagcggaggcaagcattagagagaaagcttggcatagtagaaagtgcacaagctttgtattctgacaaacatgggtaacatcctgacctcaggcaagttatttaacccccaggccttatttcctcttttgaaaaatgggaataatgaagttcaccggactgtgttttatagaggatactgtatggaaagtacctggcctcagtagttattagtaactgtccaccaaaatcatcctttgcattttttctagaagccagtcctgaactccccgacctccataggggtagtgtcttaggaaggaggagactaggggcacctttcagcagccctgtacattatttcactttcgactaacaagctttatactgctgacacagtgtctccccaggtacctagatgtcttcgttttcctcaaagatttgtatattcttagccactagccaactgaagaagaggctagatcttctctgatggagtttgggcctaatgtcttactttggaatttgctactccatttcttcacagcagtttgactaatcgaaatccagttttggggaagtcctttgttcaaatcccttggcatgtctgctcttaaaggataggctcctgagagtttttataagcactttgcttaatttagagttacaggatggtgaataccatgtagcaagatttcagttggttctttaaatcttgcaattgggggatctttcttgaagatttttcatagcagaaggcctcttttcagcattgtgatagttggtatagacagttactcaagcagatttatatccatcacatttcacagctgtcagcatttataggtcattcccatttgccttctccttctagcagccttttcatattagtagggcttgccaggacagtgatggagaagaatggagagggaggatcacctcaataaaaggagggcgactttaccagtttgtagtttaaaatacttaagtaaatcacaaatctccctaatgcagatatccgtagactcaagctgtaaattgctgtaccatcaccaaggtttaagaactaggacttttgcctcaacttcaggcaaccccgaactaggttcttttttgcatgtgaacaacaggaaaagtaaagatgtttctcataacaaaaatgatcaggtacttagttaatgttgcagtaatcatttcagtaaagaattatctttatcacttgagcagtggaatgattttgagtatcttgatagaggttactagttcttttaaaacactgttggtcatgtctgatttgattctaggtacttgctcgggaatctaattcccaattatataacattgttcctttaggacaaagtttaggaaagtatactttgtctaatggcacagtttcaaaaaatagatcttagaggtagggaaaaaatactgctatcacccagttgctgaatatataaggtactggagggagtacaaagagggcagcaagtacctacattgttgtgatgggaagagggaacaccagtggatgggtgctccttatagtatggcactggcatcctgtacctcatatgtccctgtcatccacggtcttagtctctgctgtcactcagctctgttcctgtcttaaacaccaacatgctatgcttttaactcttttgccacctgcctttgctctgcttgttcttccagtgacaaatgcatgagccacttttcaggaggtgaaattattaaaactcttgaggatgtgacctatttcacattgagaaataagttgccctgaatggagtaaccatttttcctgtaagtttgcaaaagaggcagcagttgtgacactgtggaaggagatagaaaaattccttgccatgagggaatgtctaaatttgtcctgcggggaggatgactacaggcagaaatagtgaggtgaggcaggaacataagaggggttttcttgatttagtttgaatgtatctaagtgacaaaaaggagcatctgaagaacttggattctttcattagcacctccttttggtccattggcctattcaacaaatctataaatccttcaagtatcacactaactttcagctcagtgtgctgcgggctctagaccaaagattcctcctgtaagattacagaggttattccctttgtaaagtaacatgattctctttctctttcattttcagggaagcagagactttcaaggaacaaggatatgcatactatgcnnnnnnnnnnnnnnnnnnnnnnnnnnnnnnnnnnnnnnnnnnnnnnnnnnnnnnnnnnnnnnnnnnnnnnnnnnnnnnnnnnnnnnnnnnnnnnnnnnnnnnnnnnnnnnnnnnnnnnnnnnnnnnnnnnnnnnnnnnnnnnnnnnnnnnnnnnnnnnnnnnnnnnnnnnnnnnnnnnnnnnnnnnnnnnnnnnnnnnnnnnnnnnnnnnnnnnnnnnnnnnnnnnnnnnnnnnnnnnnnnnnnnnnnnnnnnnnnnnnnnnnnnnnnnnnnnnnnnnnnnnnnnnnnnnnnnnnnnnnnnnnnnnnnnnnnnnnnnnnnnnnnnnnnnnnnnnnnnnnnnnnnnnnnnnnnnnnnnnnnnnnnnnnnnnnnnnnnnnnnnnnnnnnnnnnnnnnnnnnnnnnnnnnnnnnnnnnnnnnnnnnnnnnnnnnnnnnnnnnnnnnnnnnnnnnnnnnnnnnnnnnnnnnnnnnnnnnnnnnnnnnnnnnnnnnnnnnnnnnnnnnnnnnnnnnnnnnnnnnnnnnnnnnnnnnnnnnnnnnnnnnnnnnnnnnnnnnnnnnnnnnnnnnnnnnnnnnnnnnnnnnnnnnnnnnnnnnnnnnnnnnnnnnnnnnnnnnnnnnnnnnnnnnnnnnnnnnnnnnnnnnnnnnnnnnnnnnnnnnnnnnnnnnnnnnnnnnnnnnnnnnnnnnnnnnnnnnnnnnnnnnnnnnnnnnnnnnnnnnnnnnnnnnnnnnnnnnnnnnnnnnnnnnnnnnnnnnnnnnnnnnnnnnnnnnnnnnnnnnnnnnnnnnnnnnnnnnnnnnnnnnnnnnnnnnnnnnnnnnnnnnnnnnnnnnnnnnnnnnnnnnnnnnnnnnnnnnnnnnnnnnnnnnnnnnnnnnnnnnnnnnnnnnnnnnnnnnnnnnnnnnnnnnnnnnnnnnnnnnnnnnnnnnnnnnnnnnnnnnnnnnnnnnnnnnnnnnnnnnnnnnnnnnnnnnnnnnnnnnnnnnnnnnnnnnnnnnnnnnnnnnnnnnnnnnnnnnnnnnnnnnnnnnnnnnnnnnnnnnnnnnnnnnnnnnnnnnnnnnnnnnnnnnnnnnnnnnnnnnnnnnnnnnnnnnnnnnnnnnnnnnnnnnnnnnnnnnnnnnnnnnnnnnnnnnnnnnnnnnnnnnnnnnnnnnnnnnnnnnnnnnnnnnnnnnnnnnnnnnnnnnnnnnnnnnnnnnnnnnnnnnnnnnnnnnnnnnnnnnnnnnnnnnnnnnnnnnnnnnnnnnnnnnnnnnnnnnnnnnnnnnnnnnnnnnnnnnnnnnnnnnnnnnnnnnnnnnnnnnnnnnnnnnnnnnnnnnnnnnnnnnnnnnnnnnnnnnnnnnnnnnnnnnnnnnnnnnnnnnnnnnnnnnnnnnnnnnnnnnnnnnnnnnnnnnnnnnnnnnnnnnnntttgagaccagcctggctaacatggtgaaaccctgtctctacaaaatacaaaaatttgctgggtgtggtggtgcgtgcctgtaatcccagctactagggaggctgaggcaggagaatcgcttgaacccaggaggtggaggttgcagtgagctgagatcctgccgttgcactccagcctgggggacgaccaaagaactccatctcaaaaattaaattaaaaaaaattgagaaaagtagcttctctctgagaagtagccttttgcccaatgggttgataactgttactgtatgaactccttcaggcttaatgatctcatgaaggccaggcgtggtgactcatgcctgtaatcccagcattttgggaggccgaggcgggcggatcacctgaggtcaggagttcttctcccctaatttgcttaccccaactcaacatgcacatttcatttcagcctggcctgttaacatggtgaaaccctgtctctaaagatacaaaaattagccaggtgtggtgggcgcttgtaatcccagctactcgggaggctgaggcaggagaattgcttgaacctgggaggcagaggttgtagtgagccaagatcacgtcgctgcactccagcctgggcaacaagcgcgaatctccgtctcaaaaaaaaaaacaaactcatgaatgataacttttttctttttcttttctttttttttaactctttaaattttttaaaatagagacagggtcttaccatgttgccccggctggtctcaaactcctgggctcaagcgatcctcctaccttggcctcccaaagtgctagaattacagggatgtgccaccatccccagctgtgataacttcttctaactggggtgggtagtttttcttttgataaattaaaggcaattccagaaatactgaatgttatggcaawacccacctaaatacatttcagtcattgtcaattcatttactaccttagaaaatggcctttgtacataaaagaagtcttagttatctccatgcttaatttgccagcatactttaatcccgtgtcagcattcttctcacctaatttgcttaccccagctcaacatgcacatttcattttaatgtctcattatacaaaacagttcattaagattaataagctgcctctctcctcaaaagataatcactacacttcaaagccrtaccttgttttgttttaaaactgattgtatccttgctgctgtccatttgcacaagcagtcagaaatttggatgcagcctatttatttattgttgagacagtgtcactgtcacccaggctggagtgtagtggcacaatcttggcttattgcaaccttcacctcctagtttcaagcgattttcatgccttagccacctgagtagctgggattgcaggtgtgtgccaccatgcttggctaatttatttgtattttagcagagacagcgttttgccatgttggccaggctggtctcaaaactcctggccccaagtgatctgcccacctcggcctcccaaagtgctgagattataggtgtgagccactgtgctggctgtggcattctaaagagagtgtgtcagggctgggtgcaatagctcactcctgtaatcccaacgcttttggaggctgaggcagatggatcacttgaggccaggagttcaagaccagcctggccaacgcggcaaaaccccccactcaacaaaaaatacaaaaattagctggatgtggtggcgtgtgcctgtggtcccagccacttaggaggctgaggtaggaagatggtttgagcccaggaggcggaggatgcagtgagcagagatcataccactgcagtccagcgtgggcaacagagccagactgtgcctcaaataaataaataaaaatacagaaattagccaggcgtggtggcacatgcctgtaatcctagctgcttggctgcttgggaggctaaggcacaagaatcacttgaacccaggaggcagaggttacagtgagccgagatagcaccacagcactgtagcctgtgcaacagagtgagaccctgtctccatgaagaaaaaagagtttatgagcgttacagatagattcccttaacattgtttggagggagatgccctctaagtttttgtttatttgtttgtttgttttttgagacagggtcttcctctgtcgcccaggctggagtgcagtgatgtgctcttgggtcactgcaacctccacttcccagattcaagcaattcttatgcttcagcctcctgagtagctggaattacaggggcccaccaccacgcccagctattttttttttttttttgtattttagtagagatggggttgtgccatgttgactaggctggtcttgaactcctgacctcaagtggtctcccctcttggcctcccaaagtactgggattatgggcatgagccactgcgcccagccccctctaagttttcaaagcagggacctgttctaaactttgttttacgttcttctgcctttcctatagatatgtgtcctaaaaatgctagctattatggtaatcgagcagccaccttgatgatgcttggaaggttccgggaagctcttggagatgcacaacagtcagtgaggttggatgacagttttgtccgggtatgtatgtaatggggctgtttggggaaggctgggttgctacagttgagtttctctagccccgtatttctcaaccttgacactactgacatttgggaccagattattctttgttgtgggggactttactgtgcactgtgggttgtttagcagcatctctgacttttaatcactgagtatgagtagcaccccctctgcccagttgtaacaaccaaaaatgtctcttaacattgctaaatgtcccctggagggcacattgcccaggttgagaactactgctgtagtcattttcattttgtgttagttttgttcgtttgtttgtttttgtttttgagatggagtctagctctgtcgcccaggctggagtgcagtggcgcgatctcggcttcaggcaattctcctgcctcagcctccagagtagctgggaccacaggcatatgccaccacacccggctaatttttgtatttttagtaagagacggagttttgtcatgttggccaggctagtctcaaactcctgaccccaagtgagtgatctgcccgcctcagcttcccaaagtgctgggattacaggtgtgagtcaccgcgcctggcctctgtgttggttttgtgtgggtgtctgttgctgctgttgatttctttccacttggccaatcatgcttcttttcttccctcttggtgttcttttagggacatctacgagagggcaagtgccacctctctctggggaatgccatggcagcatgtcgcagcttccagagagccctagaactggatcataaaaatgctcaggcacaacaagaggtacgggtctgatcctgtttctgtcaaaagaggcagtatggtatatttgggaggagtggctacttgaaagtcggaactgaggtctagtctcacttctgccatcagcacacctgggtgactttaggcgagtttcatagcctctctaagcctcagcttcctaatctgtaaaatgagttttgaatatgattgacagcttttaaaaatctgtgaaaattgaagtgtttctgagatagctggggaataggcaaatgcttccagggactgatttgagtgaggttaaagaatttaagagtttgggacttagtgagaccctgtctccacaaaaaaattttttacattagccaggcctggtgccatgcacctacctgtgctcccagccactcaggaggctcaggtgggaggattgcttgtgctcaggaggttgaggctgagccgtgatcgcaccactgcactatagcccgggcaacagagcaagaacctgtctcaaaaaaataaaaaagaatttgagtaaattcaagccttgattaaattggtagcagctaaaacatgttttagttccatctccatatatagtatgtgtcgcttaatgacaggcatacattttgttaggtgattttgtcattgtgcagaatcataaagtatacttacacaaacctgggtggcatagcctgctacacacctaggctatatggcagtggcttctggactaaaacctgtatagcgtgttactgtcctgaatattgtaggcagctataacacagtggtatttgtgtatctaaacagaaaaggtacagtaaaaatacggtattacaattttacaggagcactgccatatatacagttcattgttgaccagagtgtatgactgtatatacagtttaccctagatgcatttcagtgagaatctcaaaacatatgctcaatccctggcaatgcattgcctttatttcatgtatatcaagcataacacttgtgttcctgacttgaagttcaaactgagggtgaagattgggtctagcccttctgttaagaagtcttgactgtatcttcatcaatttgatttgtgaaatgtctgtggttctgattttcttgaaagaaaatctcctagggacttctatgagaggtcgagtaccacctctctctagggaatgccatggcagcctgtcgcagttgccagagagccctagaactggatcataaaaatggccattcacaacaggaggtatgcattcgaccctatctctatcaaaagaggcagtgtggtatatttactgaattcaaattcatcaaggccttgttaatttttttgtggttgtttaatctacagcttcattaaaactttcctatgtctgattttcyggtgcagttcaagaatgctaatgcagtcatggaatatgagaaaatagcagaaacagattttgagaagcgagattttcggaaggtacagtacaaccatgagataatctcatctgctctttgtcgcaaaattcccattcgtgtgtgtgtgtgataattaagaggagtagtatggcacaaaagctctagaatagtaaattatcacttaaattaggcttctgacttttcctcttaaaaatgttttgtgctaaggtacttattttcttaattatatttggccctatgataaaaggtaaaatgagtgtgccacttgagtttgtttctattgttgatgtaaagcactggtctaatagtgtacttcttaataaagggaaagcccgctggaattaaatattaggtttggataatctttttttttttttttttttttttttgaggcctagtctcactctgtcacccaggctggagcacagtggctaactgcaacctccgcctcccgggttcaaacgattatcctgcctcagccaccctgggattacaggcgcatgccatcacacctggctaagttttgtagttttgttttttgtttttgttttttgttgttgttgtttgttttttgagatggagtttcactctgtcacccaggctggagtacagtggcataatctcggctcactgcaacctctgcctcccgggttcaagcgattctcctgcctcaacctcctgagtagctgggattataggcatgcgccaccacgcccagctaatttttgtatttttagtagagatggggtttcaccatgttggtcaggctggtctcaaactcctgacctcctgatctgcccgcctcagcctcccaaagtgctgggattacaggcgtgagccaccgcgccaggccttttttttttttgagagagagtttggctcttgttgcccaggctggagtgcagtggcgtgatctcggctcactgcaacctccgcctcccaggttcaaacaattgtcctgcctcagcctcccgagtagctgggattacaggcatgtgctgccacgcatggctaattttgttttttttttttttagtagagacggggtttctgcatgttggtcaggctggtctcgtactcccgacctcaggtgatctgcccgccttggcctcccaaagtgctgggattacaggcgtgagccacctccccggccaaaagttctagatatctttctagacctcgcagttattatgctttatctgtgtaactcctttcttctttagatggtgcttggaaatagttttcacttgagtttcaaaaggggaggtagataacccccaaaaaggttaaaaaccactgatcaggagagattttctggatcacttaagtttgtgactactatccaaggaacagagttgtcacttcatatgtgggaatttgctcagtactttttgtagcatgtgctcagtaaatttttttgttttgtttttgttttgttttgttttgttttgaggcagagtcttggtctgttgcccaggctggagtgcagtggcgggatctcggctcactgcaagctccgcctcctgggttcatgccattctcctgcctcagcctcctgagtagctgggactacaggcggccaccaccacgcccagctaattttttgtgtttttagtagagatggggtttcaccgtgttagccaggatggtcttgatctcctgaccttgtgatcctcccgccttggcctcccaaagtgctgggattacaggcgtgagccaccacgcctggcctcagtaaatgttttgataagaggatacattaagaatcattcacattgactgatggtcttttatttggtaatgtatatatctgattagcttatgcagagtcccggcagtaacttattagcatccctcttctgtccattggttttaataaccacagttgtctttgtaatgtaattcataagtttgttttgtttggcatgtgtgtgtttggaaagcaattctgcctactgtcagttttctgaggtttacataggcaaaagctttgtcttgagaggcggtcttttgggtttcttttctctcttgcctactccagagccagaatcctgagtttgtgacagaatcctctgtttgtgacatcccagcccccccactgtagctcacggtgatgtcacaaatgaagaattatgatcctggcaggggaaacagatgaacttggaagaaacaaaagatcttctttgcctgcagctgtccctagtcatggggaggttggggggtgggaagtgaagcactgacgatccccatgattagcagaaccagctctgcataaaacggggtccttgtgaaggcaacagggtgtggctgctgacattttgactgactttttcctgccccctcattccttttccatctgggggggcaggacagttagcacaactctacctacataatgcttaagttttcatattgtccttagaactttcaggacatgccgagtgcggtggctcatggctgtaatcccagcactttgggaggccgaggtgggcggatcacctgaggtcgggagttagagaccagcctgaccaacatggagaaaccctgtctttactaaaaatacaaaaaattagccaggcctggtggcgcatgtctgtaatcccagctactcagagggcaaaggcaggagaattgcttgaacccgggaggcagaggttgcagtgagccaagatcatgccattgcactgcagcctgggcaacaagaacgaaactccatctcaaaaaaaacaaaaaacaaaaaaacagaaaactttcaggacagtaaacctgtgccactgaaggagaggcattcctgtcactgctrtgtgacactgcagaaagtcttctcagtgaaacagctggtaatgtggtagtgtttactgacttgctcatattttaaatttcagttttggaataggtgctattcatggttcaaaaactagaaagtgttgccagatgcagtggcttatgcttgtaatcccagcactttgggaggccaaggcaggaggatcrcttgaggcgaggagttcgagaccaacctgggcaacttattgagaccctgtctctacagataatttaaaattttagctgagtgtgrtgacgtgtgcctgcagtcccaactactcatgaggctgaggcaggagaatcactggagtctgggaagtcgaggctgcagtgagccatgattgtgccactgatactccagcctgaacagcagagcaagaccccatctcaaaaacaaaacaaacaaaagttagaaagtatgaaaaatattcagtgatgagtgtcccctcaaacttgtcctctctccgcccagttctcactcccctaagctaaccactgttcttatgtcttctattttcttccttagttttgttgtacttatataaaataaagatccttgattttctccctttatttagcgtgaaaggtagtatgctttatggcaggtctgcacctttaaaaaaaaatcactgagtagctcttggaagtctttccatattagtacatgaagagcttcttcattctattttagaactatatagtattccattatatgaatgtccatgttaactaaccagtctcctgtggatggaatttgaatttttctgcttgtaagttttcagagtttatctcttcctgacccccatggccaaattcttagagggaataggtgtcccttaactccagatttgtccttcggttcatttattctcggcgtgaatgtgattcagcaaggctctcccaggaataaatagcagctaaaccaaaactgaaagctcagaggacaaactagtaaaaagagaaaaacagaatatatggagatgctttatgaggctgaaagagtaaattaatccccacctttttgtgtgtgtgattgctccttggcttgtggtttgtatagtggcatgttgggaatagtaatctgatgtagcctatttagagccatttaaaataactattttaaggctgggtgtggtggctcacgcctgtaatcctagcacttcgggaggctgaggaggacggatcacgaggatcaagaccatcatggctaacatggtgaaaccctgtgtttactaaaaatacaaaaaaaaattagcttgggcgtggtggcgggcgcctgtagtcccagctactcgggaggctgaggcaggagaatggcgtgaacccaggaggcagaggtggcagtgagccaagatcctgccactgcactccagcctgggtgacagagtgagactccatctcaaaaaaaaaaaaaaaagtgataatattgcctatttcataaaattcttgtgaggattaaatgggttcatatatgaaagtacccagtaaatgtttactgtcctcattatcatctggagcctttgctgtcctcatttcagtgcttttatttaatgaattaggtatgtttttaaactttgatattacttagaagtggacccaaagacctcattgagttttgagtctgttacctgtgactaaactaaagtgaagatgtttctggagtccctgatgaagagccttatttgttttcttcttccctacaggttgttttctgcatggaccgtgccctagaatttgcccctgcctgccatcgcttcaaaatcctcaaggcagaatgtttagcaatgctgggtcgttatccrgaagcacagtctgtggctaggtatgcagtcaggctagctggacattaaaatgccagataccattggactgatggtgtccggcagcttcaccacaggatatggtccccagagtaggccagctagggctgatcagaccctcttgggacttaaagtcaaagattagaccagctttgaaaacccrtagggtatacaggagtatagtagtatagcaggtacttgagctatatatgaaagaacagattgtgtttttgtggttttgtttgtttgtttaaggtagtccttttccttctactccactggttggcacactttctgcaaagggccagattttagcctttgcaggccacagggtctctgttgcaactaactcaactctgccattgcagtgcaaaggttgccctagataatagatgaaccaatgggtgtggctgtttgaatagtgttttatttacaaaaaccagtggcagaaaggatttggccctgtgggctgtagtttgccaaaccctgttctagtttaataaggattgtaagacacaagatgtgtattaaagataattataggtggtttatttggggaaagtttgggaacagttcttgggaatctgtctacctttggatattttgaatgctagacacatggtcaaggaggaaaactggccacaaatggtagtaatggtggggacattctaaagcacagctcaatgtgcccttttctgactattgcagtgacattctacgaatggattccaccaatgcagatgctctgtatgtacgaggtctttgcctttattacgaagattgtattgagaaggcagttcagtttttcgtacaggctctcaggatggctcctgaccacgagaaggcctgcattgcctgcagagtaagttctagtcaccagacctaactgggaaagagcttccttttgggacctttaagatggctagagtggaaggttttagaatcacaaggaatgtgatagcttttcctcctgctttgcaaggatgcttggtctttattagaaatggtttcaggactrcttgtatttacctaaaggtagatgtgatcatatagggtcggatgcctttaatatctaagagggtttttttgttttgtttttcccctcagtgaagatagatagtaatacttgtcctgagaagtgaaggcagacccagtaacataggtctcattggtatttttggtaactcttttcctgtccactctgtaggaagctcaaatgagcaacagatagcccagattgggggttggcggggctctgtgatgctgaactgctggaagcaaagaacttgaaaatagagtctggcctctctgtgcaatggtctgaggctttgtggatatgaaccgatcctccccttgcttttttctgtagaatgccaaagcactcaaagcaaagaaagaagatgggaataaagcatttaaggaaggaaattacaaactagcatatgaactgtacacagaagccctggggatagaccccaacaatataaaaacaaatgctaaactctactgtaatcggggtacggttaattccaaggtaagctcttgatctagatcttggggcctatagaaatatttttaagggacatcaaagggtcttgggaaatctgcctagtgagggtaagcaagatgaaagagggaaagttgttatggttaatagtttgttaggaactcccttccaagaggcaagcttttgtcatctctatggaatttgagggcagttggacaatttgcaaggatattctcacctgttcattaaggtccctttcctccagtaagagaatggctagggtctgtgggataatcttaagcacctactgttgcttttttgttgttttgcttatgcaagtgatcatttattttttaggagtgatttggaggaagagtatgaggcaagcttgtttttctccagtgtaattgatggtcaccatgcatggttgaaaatggcctgagtgcttttgtggccctacccaacatcagaaacaaaaagtagactccttgcccttgcagaattctagcagttaaaaatcagagtgatttctgatccctgcaggtgacctctggaaaaaaggagggcaggaaccagccttactattttcatgttttcattgggcactaacatggaatggtaaaggtagtttatccttgaagacagatgtgcctggcttgtatcatatacaagagaaatcaattttgaagttgctgtccatagccctggtgacaaagaactagaacttaatatgacatttaaggggccagcatgactgatcctcttagagttttgaagccatgctcacagcttctgggctccctcagtcaccaaaggtgtgaagtatgattgctctctctctcctgaagcttaggaaactagatgatgcaatagaagactgcacaaatgcagtgaagcttgatgacacttacataaaagcctacttgagaagagctcagtggtaagtgcctctgatgggtagggggaagagggagttgccgctggcctcaggggaattgccttgtggatgacgaagcagacccagagatgttgtgaggtcatttggtccttccccctgcctctaggtgggattgttccagccctagactatctttatagacctccagcggaggagattgcacaagctccctcagtctcccatgcctgtgtctaacgcccctcacggtcagtaagtttcctctgatgcctgacccaaattccttttgttaaaaagtttaaatccatttcctttggagattttattttgtgttgtacacttatgctctaccctggcacagtgcttgacacataggtgctcactgaataaatgttttgttgaatgaatgtatggtgcttggaagagaaaacaactcttggagacagttgagagttgtacttcatcctgtttgttctgggcgagggaagacaatcttagagttggaagagatgtaatccggctcagcctcccaggataaaggaacttccttttgaaacaccctggatggctactctctgcttgagtgttttgagtggagggcactctgtgtctgacagggtgattatgagccaggatgtgcctacctctaatgctcacatttgccccagagtcagggtgctccctggcatggttgctcctcttactcttagacccaccagctggttttctccagataggaacagggctaggagaaatctttctcagaaatccatctcttctgatttcagattattctctaggcggagaaaaacttcccgtctttaaagttcttagagaagatgtatttattgtatactaatcctccagcacctgctccactccttattataaaatgtcatatccaaagaacagatgctgtcactgatgcctgatgagccagtagtttaagcttccttgtctcatcagtggtacagaatatctcatggactacctcccacttagttttctcaaaattatctcacttaaaataggaaaactgctgctgtgtgtgatgctttttttaaaagtgaatttctaagttgatgactaagtctgtccaacagaaacatacagggaattataacttctgtgagactgactgtcagtcattccatctttgcaaaccactggcacacagaagcagaagctttggaagacaaaaaaagcaccctttgattcagccaaagactgactttaacagacgcaaaatgctatatacatgaaggtgtttgctgcaattttatctataatagcaaaaaaaaaaaaaaaaaaaggcggggggagaatcacctacatgtccagtgggaagggggtggctagatacttgatactgtatgaacttaatggaatgctctgtatatggaatgccaggggatgggaagagaagagaaaaatcgctttgttttattttttgggatggagtctcgctatgtcgctcgggatggagtctcgctatgtcgctcaggctggagtgcagtagcaccgtactggctcactgcaacctccacctcctgagttcaagcgaatttcctgcttcagcctccgaagtagctgagattaccggcgcatgtcaccacacccagcaaatttttgtatttttattggagatggggtttcatcatgttggccaggctgttctcaaactcctgatgacaagtgatctgcctgtcttggcctcccaaagttctggaattaccagcaggtgtgagccaccgcgcccggccttttttttttttttttttttttttttttttttttttaagcaagcccccaacaccatagaaaattcttgatttgctcggaggataattggatgaaggattattttcttctttgtttatgtgcaagaaatgaaaataaggaattgctttgatcagacaacttcttatctttgtggtagaaacagaactgcccttcttggagtggctctgcctctgagatcactacaggggagacagcatgccctgttcagctggctgaatatttggcaacaatctcctgaagcagctggaattgacaaraagtactggagattagctcgggccaaacccttacatctggcctgactactgctgcagtctgcctcaacttacccctaaagctggggagatgccacccacccacatctttgctacacatgccatcatgagctagagttcaccctttctccttaaagccctatttacttttctacttcaactttaaaacaaaattaaaatgtgaggatatccctgaattttaaaaagcatgaagtaaaaatgcaaattagtatagtttgtttaatacattacatatagacctaaagaaagttcatcagggttaatcatttgtcacatcattctatacccagggctatcagctatcaattttccttttttttttttttttaattcaggatccagctctgtcacccaggctggagtgcagtatcaaagtatcatttctcttacttcaaattattacattttattctgtacattgattctgaactcctaatataatatttatgtcctgtatttgcaggccattggtttttttaaagtcataaatcaaaatgatgccagaaaatcaaagatgcccaagatgttgggcttctcttttgccagccacattggtagcactctcctgccctggcctccaagctggtggggatctgtgatgtttgtgaaaatgggcttatgccaggcgcagtggctcacgcctataatcccagcactttgggaggccgaggcgggcagatcggttcaggtcaggagatcgagaccagcctggccaacatggtgaaaccccatctctactaaaaatacaaaaaattagccaggtgtggtggcacatgcctgtaatcccagctactcaggaggctgaggcaggagaatcacttgaaacctgggaggcggaggttgcagtgagcagagatcgtgccattacactccagcctgggctacagagtgagactctgtgtcaaaaaaaaaaaagaaagaaaatgggcttgtgtggtagcaggtaagaaattgaatctctgttgtacagcagctagctgtactgcatgatcacttcccattccccagctgacagtggctgtctctggaactcctaccacagtcttcaattggtaggccagccctggtgccagtgattttatctgggcatggaaaatgccacttgcttctgtggaagagacacttaaaagatctggcagtcggccgggtgcggtggctcacgcctataatcccaacactctgggaggtcaaggcaggcggatcacgaggtcaggagatggagaccatcctggctaacacggtgaaaccctgtctctactaaaaaaaaaaataaaaaattagctgggcgaggtggcgggcgcctgtagtcccagctactctggaggctgaggcaggagaatggcgtgaacccaggaggcggagcttgcagtgatccgagatcacaccactgcactgcagtctgggcaacagagcgagactccatctcaaaaaaaaaaaaaaaaaaaaagatctcgcaatcatcctgtcaagcttgattcctccgatcttgggccaagggcccctcctttcttttgtgctactgaaatagaagcaaacctgtgtttagagttcccttttctgtctcatttacctgcatctctcattgattggtcttagtggagggatttgccagcagctgccacgttgaacttgatccttttagtggctcactaatcccacctctattctggattgtagctagtcctgcatgtttatggcactataggtttcaaagctctttcatacccatttattcacttgataatttttctcttgtgtgtttcaacccaaagtaatcaagtagatcccttcacattgtcttttctaaggcagtccagtacctcttaggtggctgtgtgtcagaaggaactttttcctcttgattactttctgctcaaagctgaacatcactttgctggttggatgcaagtgccatgcgacctctctttttatttccttgaggacttgttagctaattttctctcactgctagattaagggctcctgtttctgaagcatcttaccagaagtgtgtgtctcttgcttgagccatgcctcttgccctagagtgatcctgagaaccactgctatttatgtcttagtgctgtattgccttgtatttccttctcagttacatggacacagaacagtatgaagaagcagtacgagactatgaaaaagtataccagacagagaaaacaaaaggtaagtttaaaagcatttgttttttagggaactgtgtggacttcgtaggccataaatctgtacacaaggtagtttgattcagggatcagggatctacctagaacttatttgatcaccagccagaaagaagtgaacaaaggctgggcgtggtggctcacgcctgtaatccccagcactttgggaggctgaggcaggcagatcacctgagatcaggagttggagaccagactggccaacatggtgaaaccccatctctactgaaaatacaaaaaattgtgggtatggtggtatacgcctgtaatcccagccactcaggaggctggggcacgagaattccttgaacccaggaggcggaggttgcagtgagctaagattgcgcgactatactccagcctgggtgacggagcgagacttcatctcaaaaacaaaaacaaaaaaaagaaaaaaaaagtgaacagatatcttgggttggggcatgaggcacctattttctggttccagatcctccctgtcgttttcatttcattttttgtgtggtgaggctaaagtgaggaacctaagtctgggtagattttcttttttctttttcttttttttttttttaagatggagtcctgctctgtcacccaggctggagtgcaatggcatgatcatagctcactacaacctttgcctcccaggttcaaacaattatcctgcctcagcctcccgaataactgggattacaggcacatggtaccacgcctggctaattttttgtatttttagtagggatggggtttcaccatgttggacaggctagtcccgaactcctgacctcgggtgatccattctgtcaagcttgattcctcccatcttgggccaagggcccctccctttctttcgtgctaccgaaatagaagcaaacctgtgtttagagttcccttttctgtctcatttacctgcatctctcattgatgcaggcctcccaaagtgctgcgattacaggcatgagtcaccgtgcctggccgagtagattttttttctaatctccagaagaaagcaccgtaaaagtccctggcatggttaacaaggcctctaactcccaggcagctgggctgagacctggtgaggaaaaaaccagagtcagatttgtccactgatgccagatgtcttcctgtagaacacaaacagctcctaaaaaatgcgcagctggaactgaagaagagtaagaggaaagattactacaagattctaggagtggacaagaatgcctctgaggacgagatcaagaaagcttatcggaaacgggccttgatgcaccatccaggtagagtaggtgcggggagtgggctcagtgggaagaacccgcagggcaggccaactgccacactcagtccagaggggaccccttggagaggtccttcagctgagaataaggtgttgcagacttgtggaccctccaaattttgggaagtgccaaattccaaaattagacagaaagtagtttttctcttaaactttgttttcttgaaactttgatttccactgagttgttcttttactccccactttagatcggcatagtggagccagtgctgaggttcagaaggaggaggagaagaagttcaaggaagttggagaggcctttactatcctctctgatcccaagaaaaagactcgctatgacagtggacaggacctagatgaggagggcatgaatatgggtggtgagttggctggggcagcctgggatgaatttgacagctgtagaatgttagaattttttccaaagatgctccagagggagagtctatttgggccaaatctgatccctggtccaaacagtaatagacatggagtcaaacaaatgcagtcaaatgtggcaggttcacagtgtgcagtgagctctgaggaggcgagcactagcaagggaaggcttggaagtgcagaaaagcatggccccatgggtcatgcctgtaatcccagcactttgggaggccaaggcaagcagatcacttgaggtcaggagtttgagaccagcctggccaacatggtgaaaccctgtctctactaaaaatacaaaaattaggctgggcgcggtggctcatgcctgtaatctcaccactttgtgaggtcaaagcaggttgatcaccaggtcaggagtttgagaccagcctggccaacatggtgaaacctcgtctctactaaaatacagaaattagccaggtgtggtggtgggcgcctgtaatcccagctactcgggaggccgaggcatgagaatcgcttgcacccaggaggcggaggttgcagtgagccgagattgtcccactgtactccatcctgggckacagagcaagactttgtctcaattaaaaaaaataataagaagaaagaaaaaagaaaaattagccaggtgtggtggtgcacacctgtaatcccagctacttgaacccgggaggtggaggttgcagtgagccaagatggcgctactgcactccagcctgggcaacagagtgagactccatccctccccactaaaaaagcaaagcatggcctctttggggatctgcagggggcttggtctagggaagataaagggatagggtgctagaggcaggtggtggtggaaggccggcaagtagctggatcagagctcacaggccataagggctgtatgtggtaaggaatatgagcattttcctattatctggaagttcttttttacccactgcaaagtgtatgctgacatttatgtatgtcatacattcctataaacactcacagattttaatttcccaaaaagatttagcatgatataaagcacacctattgtcaatattgttgctcactgtgggctgtcagagataagaggccctgacctgtgagctgggcgcggtggcttacgcctgtaatcccagcactttgggaagccaaggcgggcagatcacctgagctcaggagttcaagaccaccctgggcaacatacaaaataccaaaaaaattgtactytctactaaaatacaaaaaaattagctgagcatggtggtgcatgcctgtggtccaagctactcaggagactgaggcaccaaaaactcttgagcccaggaggcagaggttgcagtgagctgagattgcgccactgtactccagcttgggttacagagtgcgactccatctcaaaaattaattaattaattcagtcagtcttcactctaagttgtctgccaaaaaatttgctgggcatggtggctcacgcctgtaatcccatcactttgggagaacaaggtgggcggaccacaaggtcaagagattgagaccatcctgcccaacatggtgaaaccccgtctctatgaaaaatacaaaaattagctagccatggtggcgcacgcctgtagtcccagctacttgggaggctgaggcaggagaatcgcttgaactcgggaggcggaggttgcaatgagctgagatcgcaccactgcactccagcctggcgacagagcaagacttgtctcaaaaaaaaaaaaaaaaagaggacctgacctgtgaatggtgaacagacctaccatctcttccactaagaaaatctattgggattttgttttttgttttgttttgttttttgagacggagtcttgctgtgtcacccaggctggagtgcagtggcaccatctcgactcactgcaacctccgcctccagggttcaagtrattcttctgcctcagcctcccgagtagctgggactacaggtgtgcgccaccacgcccagctaatttttgtattttaagtagagacggcgttttaccatattggccaggctgatctggaactcctgacttcgtgatccacccacctcggcctcccaaagggctggaattacaggcgtgagccaccrcgcccggccttttttttttttttttttttttttttaagactgagcccagtctgggtgcagtagtgccatcttggctcactgcaacctctgcctccagggttcaagcaattctcctgcctcagcctcctgagcagctgggattacargcacccacccccatgcctagctaatttttatatttttagtagagacagggtttcaccatgttggccgggctggtcttgaactcctgaccgcaagtgatctactggccttggcctcccaaagtgctgggattacaggcgtgagccactgtgcctggccttccattgcaacttatttatttatttaatttttttttgttgttatgtttttgagacatggtcttactctgtcacccaggctggtgtgcagtggtgcagtctcagctcacggcaacctccacctcccaggttcaagaaattctcctgcctcagcctcctgagtagctgggattacaggcacctgcagccacacccggctaatttttatatttttagtagagacggggtttcaccatgttggccaggctggtctcaaactcctgactttgtgtgatccgcccatcttggcctcccaaagtgttgggatgacaggcgtgagccaccgcacccagccggaatttaaaataagaatgatggtactatatagataatgctgagtcctctccagttcagtgtgggggtatttgtgtttaataaacctaggttcaccacaataaacatgttcctctgcctagcagttaagaagatctataagcagtcaaaaactagtgaagaggttttgttttgttttgagacggagtctcactctgtcgcccaggctggagtgcagtggcgcgatctctgctcactgcaagctccgcctcccgggttcacgccattctcctgccttagcctcccaagtagctgggactacaggcacctgccaccacgcccggctaattttattttattttatttttatttttattttttttagtagagacggggtttcactttgttagccaggatgatctcgatctcctgacctcgtgatccacccaccttggcctcccaaagtgctgggattacaggcctgagccaccacggccagccgtgaagttttaagtaggggcactgtggaccagattttggctctggaaatatatttgtgataggggtgaggaggttggggttggagggagtaaggagaatggagatggaaggaagacacaaaaggtaggaaaggattggagggcacagtcagggagttagttagtggtagactcagcaggagttggttgctattcagatgtgttggggaaagtgacaggcatagctgactcggggtcattcactaagccaggagcccaggaagacacacagatgcaagcagagaaactcactctgggcacgaggtggctgtgggatcacctggtgggggtcagtccttctgtgaagcttgggcagtcagtcagggatggggccaccagacatgctgtggccttgcaaaagtgcacagagccagtcaggcaggagttggattttccagttctgctgctttcgctgccatgtgatcgtgggcaagttacttgaaccacctacatatgttttgttgagtattaattgggaatgatacttaccctgacaaaacattactaggattaagtaatgtaatgtatgcaaagtacctagtactttgcacctagtaggtgtttttgttggtttgttgttgttattaagacagggtcttgctgtcacccaggctggggtgcagtgttgtgatcatagcttactgcagccttgaactcctgggctcaagtgatcctcccaccttagactcccaaagcactgggattataggtgtgagccaccacgcccagctaataaaccatagctttttttctagcctagagtctacggagtaaaagacatggaatcaaatacagtaaatcctagatcttgctcttatatttatttttggtaacatttaagtgatacattttatcctttttagtagccgctccagcattatagggagacagagtatggggaaagtcttgtgtaagtgcaaatggcattccatttgttgagaaaacagcccaatgaagcaagctgaagcagagaaagcttcctttggggcagcagttggaaggagaagggaacatgtcctaggagtgggatcaggtagcatgttttgcacrggatggggcaggtttgctcacttgcagtctgaagtgttgggaaaggaggggagtgagactctccaggaaagctttggagatctgttctcagtgtcatcagttctcttcgaacatttctaatttttcaccttttcttcccttccatgttacttgccctgctctacagattttgatccaaacaatatcttcaaggcattctttggcggtcctggcggcttcagctttgaaggtaggtgggcctgctgttcttgggagttcccagatcmcaagccaacacactcattgcctcttaggcagctctttgggagtcagaggggcccatgagcgggggcagctgaattctcatctagcagggcatctatccactcggctgttgctaaggatgaagacaggaaggttcccaggcaccccttgccttgggacctttagccaccgcatctctgcagggtcagggaggcatctctaactgcctagtaccaaggcttctctgcaagagcaaaggtactatatagataatgctgaggtcagaagctacccatgtataatacagtcacgtgctccctcttgcacccaaaaacagcctgagctgtttgatacccatagagtttctctctgtgtttgagtttgaagcagcccttgaagacttttccataatcagagcaaagtgatcttccttagaaaatccatagccaactaccaacccctcttttctctttcagcatctggtccagggaatttcttttttcaatttggctaatgaagggcaaccacccagaacccagaaaatgcagattcactcagtttaatcttgaatgtggaaacagttcacctcctcccttcatcacgtctccgtgtgcttagagcagtttcgttttctcagttggatgccctgtgtctctgtgagtggggtggagcaaagggaaccaatgccgaagaccgagggcaggggagggaggcgggggtggacagggaggcagcttgtgaatttttgttttactgtttaactttattaaaaaagaaaaaaaaaaagagaataaaatgttttgacccttcctggccctttgctctggcatctgcattgtctccagtctgtgagccagagctgagcccgacctggacttggggtgcagcaagctgctgcatgcgggctgtgggcacccagcctagtkgcaggtggggcactctgcctctcccagacctgtccagcatgtgagtgctaggcaggccccggctgtgcctctgggcccagcctaacatcagtcacagagaagcgagttcagaaagcatgctcactttacggtggggccccagaaatcactagaagctgtgtgtgtccaaagctcaggtgggtactaaaagctgtgtgcgtccaaagctcaggtgggtactgacctagacagggcagtttacttacaaagactctcacagttcctgttgcagtgtgggttcgagggagatggtagacagagataaaaccctgcctcctgacccccagacccatttgaggtgggacaggtggctccagagctctggtctggccactatttttagcaaaagcccctggccttctctgctccctttctgcatgcaggagacacactgctcacggatgcagcggcatgcaccatgctgtcctgtcaagcgtggtgttcaaggtgagtagccttcccaggagctccaggcacagacttgaagctctagctgaagttcagagatggccagggacaggccttgacctagaaaggtaacttaggatttctcttcatctgagctcctgcccctttctttcaagtcttccccggctggtgccttagccatggtggaatgatgcctgagtcaggtcttggaagtttcccatgtggctgactaggcctctgatggcctggaagggactcaaatgttagatcttccctggtgcttgaagtttcagtgacctgcaggtggccttccctagagaactgggagaaacccgtaccaggagcttccggtcttactgaactctttctgatccagtgggctggggacacctgtgggcttggtgccctggttaatgggggatgagaggcttttgtgctccacatccctcgtacccagccaacccccaccttctgtatgagtctgaggccagcctctgctttctgcctcctcatgaaagccaacactgttcagctgcccaacctcaccacagctgtgcccggccagcagaggggagacaggaccgatggccccaagctgtgggacaaagccagtcctaatacacccagccctagggaagactgagctgggcacagaagggtaagagagactgcacacagctaggattaacatgatttatttcattatcagtcttacaggttgctgaggttgggcaaagccaggatagtaacttaaatccaaagcacttttgttgagtgacaacccgattagcaaggccctgttactgaacagagggcagtggagggcaccccaggaaccacagcacacagactagtgttagaaaccccttcccagaagcaaccggtgggacttggcccttaccagccaggggtctactccattggctcttggtgcccaccagcccctgttagaggaggcccagaggcctccagaggcaccatggaggcaagatgggctgggtagagagcaggactggagcttcctcaccagggttctgcctctggccccgatctccccatccacacagcggagccaggccactggaaaggacagccagtccagccccttcctggagtgaggcccccagccagcggggatgtggcggctgcttaactgttctgctttcttccctagttatcaaactgttacctagttatggtgtgaaggggagggggcagggacttaggaccaaaggtgggaggtaagctcctttttctaccctggtaaatagccccagccttcttggggctacactgattaagaaatgggatcactcaggaggattgcttgagcccaggagttcgaggctgcagtgagccatgatcgcaccactgcactccagcttgggaaatagcaggaccctgtctctaaaaacaaagaaaaaagacaaggagatggaatcaaagcccagaggtcctccccttctcagagccaccactagttctctgtgaccatggaaaactacccccagccccactgccttttgcctccggtcagtgggttttgcggggctctgaggtgtctccccactcacccagctctgggcagagcagctgggctgggctggggctgagctaaccagaacctggaagtagggctcggggttctggctgtggccccatccctggcttggcccagcctcgtcagctttggtccaggttcctgaatggtgcctccctgcccaccttgtgttgggagygtgagcattagaggggaagagggcggacaggaagggagggtcagttattttacaagtttttaaaaagttacaggtaggttaactttgagtaaaaaaaaaaaaaaaaaaaatgtcacaaaacaaggatcaaacagagggcacgtttccctctccccttcccttcyaggggcataagtggtggtgagaacactcatatgatggtgcaggactgcaaggcrccccccttccggctaccttgcgtgggcacaggtttgcctttcccgtagtaycccgtgaagatggccctgacctccatgttcttggccagggtcagcatccagcgcccattgcccaaggaatagagcttgccccggcttagctcrcccacctcctcgcctcggctgccccccttctcctgccgcagaatctctaagaggtcaaggcccgtctgcacggcctctacgtcagctgcacagccgagggtgatgtgggcgcggctcccccgcrgcaggttgtcagtgggtgacagcttgtccacatcactcggccacaactgcagttgctgctcgcttaactccacccgggccccagtcgtcttgggtgtcacaaagagggcagagatggtcagcgtgaaggccttggagtaagatttctttaacacctggggagagtgagaaagaggggcccaagctagagatggcaggctcttgaggaacagctgacccaaggagggtccctcctggaggagagaaggggaagtctaacagaagtgagcacagctgagcaggggtcggtataggcccagcatccactaacaactgcggcacgcaccttccataggcgctccaggctcaagtgagaaacacgaaggcgctcagacagggccacacagggacagccggacttcctgagggagcccagctccctgcacactggcttccggcctcagcgggctggctgacctctcggtgccttggcttcatcacccgtaaaacagggagaaccagagcctacctcagagttaatgtggttatgagagtgactaggtaaacagcccacaggggtgtccgcgcacacaacagctgctactgttggcaccgctcagcttcccctgggacccagacagcgccctggaggacagggtgaggtcagactgaggtcagactcgcccttgatggaaacctgctcttacactttggttcccatctgatgatatgtctgcttctatctgattctttgagacagcccatcccatctcagcataaacgcttttctatttttgctcacgatcccttgtcccaacagtgtctggcatgaaatgggtagttaataaatgctaaatgaaggcatggttagggatggtagctcaggtgttacatattcattccactatgctagggtgctggaaccacaggagtcaacgaaacttaaaaactcgccctcaggggagcttccatttgggaggacactctagtgaacaaacaaacgattgtgctaacctaggcagagaagtgggagagtgggcttgggggtggacacttggaagttggagactgtggatatgggtgacatgcctggcattcagggatcactgtcagtggctgtgggtgtaaggtgccagctgtgtggtgcagaaaggtctcgtacccattagccaataagcttcattatcgtatgaaactccctcactctggggccaggccagacctcagacctggggacagggatggggacctcagtgcaccaggctccctgggggcgaaggactcctagtctttggaaggtaaaacaggctcagagagaccagagcaggagcccactgtggaccagcattctccatgaatctgcagaaggcgaaggtgcttgggggcaggtgaatgcacaggctggcagtactgccagggcaggctccttagaacctgcggctgaggtctatgcagctacgcctggggacaggggagctaggaggaggagatgccatttttcttgagctgccatctggtttttggtccctgcctggcaccggtacctatcttcagaagatgctgcagccccttctcccccaacctcccacctcccccatgtgtccctggggaagactcacatcttgttgagcgtactcctctgccccgggagccttcccgtagtcacaaaacttggttgtgcaatgcagcacgcctgggggtctctttccaaagtaggtgaccaagtccatcttctccctgggctcatccccagggacgactgccgggagaaaacgggtgcagtcagggcaggggagcaggggcataccaacatccgccaccaggaccaccgaggcccagcgcaaaacactcggacactaagcatcacctctccagcaacccactacagctcattcattggttagttggtcaaactaatggcaactttagagcaataaaaagttaaaattctcaggccaggtgcggtggttcacacctgtaatcccagcactctgggaggccgaggtgggtggatcacaaggtcaggaattcaagaccagcctggccaagatggtgaaaccccgtctctactaaaaatacaaagaaattagccaggcgtggtggcgggcgcctgtaatcccagctacttgggaggctgaggtagagaaytgcttgaacccaggaggcagaggatacagcgagccgagatagtgccactgcactccagcctaggcaacagagcaagactccgtctccaaaaaaaaaaaaaaaaaagttaaaattctctggctttacattgtatagatctttccatctcttctccaaactctaaggcatttgtaacagaggcaggcagtacaggccaagggaatctaagatttactagcaccacgtctcaaaggggaagcaagtcatgggaagtggggtggaaagaaaacagagggctgggaacaacatggtacggtggaaacagccagaacacagtgaatatctcagctctgccatgtaccagccatcggcctcgggcaagtgaccaaccctatctatcaatccagcacaacagttagggtgaccatataccccagtgttcccaggaccaccagggaactatcagtagtgccccatttcactcaggggcccatctggacaagcagtcacaacgtcaccatcagtttaatacacaccttgcaggcctatgggggggcctcctggtacaggaagggtcttggactataatggggtgacattatggggctggaagacacaaagaggagtggagtatctgtgattttgatttccagactccacacctgtggctgtctttggagtcactcgctttttcctgttatgttctgaattgagtccccatgaggatgtctcgccctccacaggggaggaaggcctctcctgagagcagccttgctggcccattacatttctcctgctctaatcctgggcagaaaaatccagttttcctttacaaataaaataggctgggcatagtggctcgcacctgtaatcccggcaatttgggaaattgaggcggggcgtttgagaccagcctggccaacatggtgaaaccctgtctctactaaaaatttataaattagccaggtatggtggcgggtgcctgtaatcccagctacttgggtggctgaggcgggagaattgcttgaacccgggagatggaggttgcagtaagccaaattgccccactgcactccagcctgggcgacagagcaagacccccgtctcaaaaaaaaaaaaaaaaaagatctggcaatcatcctgtcaagcttgattcgtcccatcttgggccaagggcccctcctttcttttgtgctaccgaccagcctggtcaagatggtgaaaccctgtctctactaaaaatacaaaaataaaaaaaaattagccgggcatggtggcaggcgcctgtattcccagctacttgggaagctgaggcagagaattggcttgaacccaggaggcggaggttgcagtgagccgagatcatgccactgcactccagcctgggcaacagagcaagactccgtctcataaataaatattaaaagcaactttgagcagtagtcactcccagggcagagccaccagctcacaggtacagggcttgctcctggccaatgtcactgcaagcaccacagttcactgc

SEQ ID NO: 93592 - DNA, 22457 bp, Homo sapiens
tatgattgtagagtgaagattattataatattggaataaagagtaattgctacaaattaatgattaatgatattcatatataatcatatctatgatctatatctagtataactcttgttattttatatatttatcacactggaacagctcgtgccctcggtctcttgcctcaggtggcttaccgcccacaaaaaagcatttgataagattcaacatcccttcataataaaacctctgaacaaactgggaatagaagaaacatgcctcaacaggttaaaagctatatatgacagacctacagctagtatcacactgaatggggaaaagctgaaagccttttttccaatagctggaacacaacaaagatgcccacttttaccagggtttgctagtattttgatgaggatttttgcatcaatattcatcagaaatattggactgtagttttctgtgttttgatgtgtcttcggttttggtatcaggataatatttgcctcatagaacgagtttggaagtattcccttctctatttttttcacttttcctgtttttctattggaattgtttatctttttttaattatactttaagttctgggatacatgtgctgaacgtgcagctttgttccataggtataagcgagctatggtagtttgctgcacccatcaacctgtcatctacattaggtatttctcctaatactatccctctcccaggcccccacctaccagcaggctccagtgtatgatgttcccctccctttgtccatgtgttctcattgttcaactcccacttataagtgagaacatgcggtatttggttttctgttcttgtgttagtttgctgccttctcctgcatttttcagaacagtttgagtaggattgatattcttctttaaatgtttggtagaattcagcagtgaagctgtcagatcctgggcttttctttactgagagactttagtatagcttcaatcttgtgtcttgctattggtctgttcaggttttggattttgacctcgttcaatcttggtggatcatatgtgtctagaaatttgtcattttttttaggttttccaatttattgatatataggccaggtgtggtggctcatgcctgtaatcctagcactttgggaggccaaggtaggtggattgcttgagctcaggtgtttctatttaggataaaagtagtttatacaccacagttaacagcgttataatattctgtctgtttctgtgtacttattattacctgtgagttttaaaacttctggtgattatttattgctcactaatgttcctttctttctcaatgttctgttctttctttagcatttcttgtaggaaaggtctgatattgatgaaatccctcagctcttgtctgggaaagtattcttccttcatttttgaagaatatttttgtgagataatattctagggtaaaaggtatttttccttcagcactttaagtgtgtcatgccactgtctcctaggtttccactgaaaaatctgctgtcagatgtattgtatctccattgtatgttatttatttcttttctcttgctgcttttatgtttctttctccttgacctttgggagtttgattttaaatgccttgagatagtctttgggttaaatctgcttggtgttctacaactttcctgtactcagatactgatatctttctctggtatggggaagttctctgttattatttctttaaataaactttctacccctatctccatctctaccttctctttaaggccaataattcttagatttgccctttcaaggctattttctataacctgtagatgtgttttgttgttttttaatttttttattttgtatcttttgaaagcgcatttttaaatagcctgtcttcaagctcactaattcttttttctgctttgttaattctgcgaataaaggtccctgatagattcttcagtatgacaattgcatttttcagctccagaatttctgattctttttaactatttcaatctgtctgttaaatgtatctgatagaattctgcatttcttctctgtgttatcttaagtttctttgagtttcctcaacacaggtattctgaattctctctctgaagggtcacatatctccatttctccaggattggtcccaggtgtcttattaagttgatttggtgaggtccmattcttctcaatgctgtagatgctagtagatgttcttcagtgtctgagcactgaagagttaggtgtttgctctagtcttcactgtctgggcttatttgtagccatccttgttggaaaggctttccagatatttgaaaagatgtaggtatcatgatttaagctgtctctacttcagagagcatcccaagcccagtaatactgtggtttttgaagactcataaaggtactgcctcaatagtcttggagaagatatgggagaattctctggattaccaggcagagactgttctgttttcttcccttactttctcaaaaaaaaaaaaaaaaaagcctctctctctgttctgagccaactaaaattggggatggagtgacataagcactcctgtggccaccgccattgtgactgtgctagatcaggcctgaggtccgcacagcactgcatcttgaccaaggcctgctgtaatcactccttggctactgcctatgttcacttaaggctctggaactctacaatcagaaggtagcaaagccagcaaggcctgtgtgcttcccatcagggcagtgagattcctcaggccctgagatacagatgtgctgtccagaagtcaaggactagagtcaaaaacattagagggctacctggtgttctattatattgcagttgagctgaggttcaaaccacaagatgaagttcttcccacttttgccttttctttccaaagacagaggagtctcaccacatagtcacccctacccactggttgccagactaccaaccagtgttctcttaaggcctaagggctcttaaatcagcttgtagtaaagtctacctggcctgggactcacctttcmgggcagtgggcttccttctggcccagggaaggtccagaaatgctgttcaagagctaagtcctgcaattggggatgtcaagagcccacttgctgctctaccatgctgtggctgtgctggcacctaaggtgcaaaacaaagtctctttacttctccttccacatttctgaagcagaaggaatcttgccccagagctgccacagctggaaatgtgctgagtctcacctgaaacctgctatcctcagatgctcacgcaaggtcctcaatgtactaatagtacctgggtgctgctgtaggttattcagggctcagggtatcttctaccaggtgatgaatgctgtgaggactggatcctttttttcaatgcagagagttcccttccrgcccagcaaatgtctagaaatgttgtctgggagctggggcctggaacgggggcctcacaactctatttggtgccttatcctgttgtggctgagctgatatccaagatgcaagatgaagttcgccttactgtttctttttcattcctcaagcagagggaaggagtctctttagcagctgtgagctatgcagcctggggttagggaagaggtgataccagctctcctttgactgacccagctggtgtctcagtatgtcaagtgtccccccagtccacaatttctgagcctaattcagcactaggactcacttaagagttgcagtccttatggtttacactgcctttcacgtttacttggaaacacagagaactttaggccctctgtggtgaggttttcagtcactgaagttttgactgctgggattggtgattcccctcgggttaggactggtttaaatgctccctctgcctccatgggcaggtgtcagctgagtttggtctagttttcctttgtgtctaacatgacagcaatgagttcaatgcctcataattgctgtgttctttctacccccgtgcccagagatacactgtgcaccacactactgctactgaggttgggagggatggggattggtgattcaagactgttttttactgtctcttcagtgcctctttcagggatatgaagtcaaaaccaggtactatgagtgctcacttgatttttggctctcatgaaggtatttttttctgtgtacttgttaagttggtgccttgtggggtatggggaaatgattagtggagccttctattctgccacttgctttgcttctcctccccattataaactatataaaaaaaatttaatggctcaagaaattacttaagtaatactcagtatagaaaaaaaatatgtgttctctcaactatccacagtttgctgtcaattatggaataaaacatatgtattgactagttgaaatggaccattttttaaaaaggatgattagtttactgtataactctataaactttgatatgtatttaacaaaataatcgtttacaattatgaatatgtaaaattctttgatagattatgtgaaccacttttggttcaaaaagtagagtaactaaaactataaaactcaatgccttacatagcaagaatgtgtagatagtattaaattatcactgataatttttatatgtcatctggagtagatgatttaggtttgtaagaagatataaactgcctaagggtagagaatcactctctatggaatcatagtgtcattaaaataattcgatatttggcctcatgttccagacattgccactggttagttttgtgacctgggggaagacatttatttttttctcagcaacagcttccttatttgtgtaaaaataactcttgcttttctcatgctataaatgattacaatttgtgaagtttctttcacttccagaaagtgggtgaatttttttttaattagagatagtatctcaccctgttccccaggctgaagtgcagtggtgaaatagcttactgcgatctcaagtttctgggctcacgtaatctttccatctcagtctgctgagtagttgggactatagacacatgccactacatctggctaattaaaaaccaaaattttaaagactggggttttattaggtcgccctggcttgtatcaagtttttgccctcaagcgaccctcctgcctgagcttcccaagtagttggtattaccgatgtgagccactgcacccagtataaaaattttataacttatattttcccatgttttaatctcaatgtcttcaaaatgtaatgttgatcagattcttttagatagctttttataacatacagattgccaggcactctgggagcctctgatttacctgatctggaaaagttcttgtattgttaacaaacaagcctaattgatcttgaaggaggtggtgtgaggaacacactttgaaaaacaatgtttgtctctattccactacaaagctaattccagtccccctgaaacttttctccagtaattgatttttcttcttaaacttacaatgcccctccctgttgctccactttagacaaccagaggacaaggtatatgaaactgagttctcattattacagtaacttccttgaggcatttttggctttttccaagccacaaatggttgaaagtattaagccaagtattttgcattgaaatcaaactttccaactctttgtttgctctactgacatcatttaaataaggctgcagctgtgctatttttgccaacaatggaaaattgacttaatattgttctagaatagcctttcagctacaagaggttatatataaatcaaaagcttcttgagtaaaacttcttagaattgtagaagctgctcaatacggaacatattctcagtcctcctctggtctacaaagcctgtgatttcttgtctatggacagaacgtctggtttaatctacaggaacccataacttcctgaagctttatgcttaacagtgacaacgtgagtcagttgaattttattgtgtttcagtccgtagagtattagctacagaaacctttccattgccatactgagaaastgcagcaggcagtgtgcctacaggtctacaaagaaacttcaggtaagcagaattatttagaacagcctttttatcttggcagttcaattaatttggattcttgttctaaatcatttgtatttgttaatttatttcttttcccctgcaaacccttggaaagagcactccccagggtctcaatgttgagaatgaattcttcaaaaccttttaggtacctgaaactggaaatacttcagaaaaagccagtgcrtatccttttgaatttgtaaaatgtccaaatgctttccttgaattataagttatcaatatgcttgtacctttctctgacaccctctagatctccatagtaatactgttagcagaaaaaaaaaatcaatattctccttgcctccaatcctgcttctaaagtattagtggtttatttgcatagaaaaatcttccttcttccttctgtgtcatgtggctagaataaaacaatgcttttctgttgccctctgccaaatttctctccattcattgaaacatttggcaactggtatcctaatgtttctctccaacaaacttctgctacatcctattcatgtctgtggtacctgaaactcccattcccttcttggctcctactctgttgacttggagttgaagccaacagccctacatcccaaactgatctacctctgagtgcctctgacatcttaacctctaatagtctaatatctgatcccaatctcctatttttaagtacatttttccctgtctattaacattgctattctttgacttcatcaagtactttcttccatggctttttctatattttcttactttattggtctccaacctactttactttttctcttctctctcctggatgctacagtttgtaagtttcaatctctcatttctatatattcaaatgctttgtaccttatcttttttgctacaccagccctgaaaaaaccaaccttggtttgttttaatttgtcttctctgcttctactctcagggagctgagctcaatatattgttgagtaacacttccaaatcatagtgtccatctttacattatcctaagcatgcttgctagtccttgctaattctagtccactctttctcccattaacatcaaaagccatttaaaccctaactgtttcccataaaatcctacttctttttctcgacactttcttggcatactccctcacccacttactgctaaaaagtgattttggaaataggaaaaaattttacctcttccaggaaacagacattcaaaaataacttgccaactctctgctctttttttctaaccctgtgtactcccatataaaattagtcctcacttaacattgtcaataggttcttggaaactgcaatttcaaatgaaacaacatataacaaaattaattttaccataagctaattagtataaagaagagttaagttcctacagcatatttctggtcacaaaaacatcaccaaacttataaataaagaacccaaacacttctaatataaaacaatgaactaaatggaaactgcgtatacatttaataaatattaataaaaacaagataattatttacctaatttttggtgagtctgtgtgatggtggtcacagtagtggtgggttaaattgagaaataaatgtttgcaaagcaaaagttgtaaggagcacctcttgcctctatgaagttaaaattcaatcacaaatatggtggcctcactgagtcctttggcacarcattgtttattgtcattcatttgtatgattatcatagacttcatgaatttttgttttattatgaatgtttcattcattcattcattcattcattcatttttcaactggctttttccagttcaggggagcaagtgactgaagcctgtcytggtagctcagagcacaaggcaggaacccaccccagactggacacctttccatcacagggcgcacacacacacacacacacacacacacacacacacacacacacagagtctcactcatcctgggacaatttagacagagaaaatccatgcagacatgaggagaacaggcaaactgcacatagacagtagtccagccaggaattgatgtttttctcttcaccattgtaatgaaaagatattgaacaaaatgacattatttgatgacctgctgtatacgtacatacatacacctgcatctgcatccatcctaattttttttctgacttttcactgaaagaagtattcttccagtccaaaacttaatttcacaagtatgctgagaattatcattgacgattacatgaattaatcaacataaagaagctgaaatagggttggcattttgtatataaggtcaatgaatttctgtcacctttctatgtcctgtttacacattggcctattaatgacttacatcttacctcttgtagttagtataggtatgcttaactctcatctaataagagaaatgccttttttgagctcttgtacctctcctctgtccttcgatattctcatgttcttcttcctttcctggtcaagctctttgaaaaagttaccttcacttcctcacgtttcattccacatctcttaccaagtcagtaatcaactcctaactccaaaatgcactgccatctttagtactcatatcttttagcttctcagcagcctttgactgctttggtcgctctttccttgaagttgattgctctcctttgtggaatatgctaccaaagcctgcagaatgggcagaatgctgtgccatttggttagtgcacccatcatcctagacagtgacagaaacacattagctttttctagatctgtggtttgcctcaaaatatctattttgtgtcaatagatttattcaagcaagttacatgtagtccatctttgaagttgcagttttcttcatttatgtttctgtccggtggaatggtcaccttcactggattagaggtctttaaaatgtccttcagaaccttgtatatacacaaattaccaccatgctaaacacttcacataccttttctggcaatgaaatcctcatgacaacctacaaagtagatattactatccccattttatagataatgcaactgaggcagagactcaaataatttgacttacctaaggtgacccagatagccagaggaggagccaggggtggagttttggtttgtttaattccaaagcccatgttgttaaccactgtgcttccttttgtattgattatggctatacacttacatatatacatgcatacatagatgtcatatttrctgagttttctaggattgcaaaaaatattaatggcttccttgcaaaccatcaaaatagtgtagaaaattttctatttgttggttcttggaaaatatggccattcttatatattgtcttcaagtatcatatgaggtattacatatttatatatattgtcagccgtgtatatggctggaagaaagttcaaaagttcatatttatatcttatttatatactactttgtttcagaaagactttcaggtgggtatatgcaaatgtacatatacacagataaccattcacctatgcatctttatattattatttttttaatttttattttattttattttattttattttattttattttatttwattttattttttgagatagagtctcacactgtcacccaggctggaatgcagtggtgcgatatcagatcactgcaacctcctcttccttggttcaagcrattctcctgcctcagcctcctgagtagctgggactactgacactcaccaccacacccaggtagttttttgtatttttagaagagacggggtttcactatgttggccaggctgatctcaaactcctgaccttgtgatctgcccgccttggcctcccaaagtgctgggattacaggctgagccactgcacctggcctgcatctttatattattaattgggattacatcatatgttttcctgactttgtaacacagacgttttcctatgtcattaaacactcttcaaagacatcattttgatagttgcctggtaatctattatttggatacaccatcattaacttgatcatttcttcataatgaattttgtattatatcttatatacagtatattataataaattttcttatgtttacatccttaaacatatctattattatttccttgggatgagtttcaggatgtggaattactgaataaaagagtttggtctatttttaaggttrctaacatataattccaattcctagatcttgccaatttctacttggtggtatcatcactaatcaacaattttttcttcctatggttttgttccttaggagaaaagggactacacacaatatagtctgcaagatttttttttcagaagattatattctttcttgatagctgaaaatagtacccatgctatgggaacattagagcaagtgtttcaatgcttgggggtggkgggctctccagagggacaatccctgaagagatgcattattttttatttgtgcctggacagctgaaggcattcactctccatattcttttactggtttgaatcaaatgagcatgggagatatattttgccagatatgttaatgtactttttaagtggaattgtatggagattactaaggagccctgaggtctagttacacctctgagctttaatttctcatttgtaaactgaaaagtttggactagataatttctaaagcccatcactgctaatagtgtatgatgtccctggtgacttctccttcctcttctttctggacacctatcatatctctctaggtatttttgtttttgtgtttatttcyttagatcatcttcttgagggaaagaagctgaagtgctacataagatgcttgtgcttcataactctcagaagctgcagattctgtataaatccttagaaaagagcatccctgaatccataaaggtaacggagtaggaggagatcaaaggagagagagggttgagttgagaggaggacagattcaggattcataaccttaatggggagatgggaatgcaagtctaaagtgagaatctgtgcaaagattactttaatatcaatatccagtcaatcacccactttgcttcctttttgtgacctcttaaacatcttttgaatttatccttctgctatctttggtgtactttgtcatctcttccaggtaattgcaatacctccttgtctccaatcttaacagcctagttacaactttgtgatgagagtcatctatatgacacatatagggtcatatcactccctggttttaaaatttgccatagcaaatttgcagagtccatctccaaggcttaattgggttacagggcttatcccaaaattctccagccttttttattttgcctctcaacattctcctgccatataccacttgctacaaatattgagcccctcacagttcagtaggcatgatatcatctgccatactcttaatcatttcactcatgctttttctcctacttgtaataacttgctctcattctctattttgccagaaaaaggcataacatattcatcaagacccagttcagatattgcttctgatattgtaagtttccttatcacttcctagacaggtagtgcttttcctccttgggatcctacaccaccatatacatatatctctcagaccacgtgtcctacgatggttgaactatgtactctctatccttctaaacttaactttagggttgtagccatatcatattcacctttgagtttttcatgcttaagacagacctgatacataatagatgccaaataaatagtgtgttatgaaataaagaaaaaaactgagaaaatggcatgaattttttagaaatgaatgaatatcagggaagccagttcctaatgactcaggtattaacttggatttttgtggatgctttttgggccgtctagcagcataactctcaatgagtagcccaatgagccatcctggaagcactggcccatcctaagtcctcctatacttcttgtccttatttctcatgycatgtcttatttctccacatataagactctatattggagaagaacttcatcctctcctgctttgttctgttgcatcgtaggtatatggcgccattttcaacataaaagataaaaaccctttcaacatggaggtgctggtagatgcctggccagattaccagatcgtcattacccggcctcagaaacaggtaggagcaatagttactgaatatgagggtagtcactctccagacgttctctgcatggcaatgagggaactgaaactgaggagtggtgagaagaacattgacactgttgatgtatgcaggttttggaagggctgtttgggagacagggtagggcagtgagataaggcttgaacttagatccagtgatcagtaatccaggatgtgtaaataaaattaggattccacccagtcaatctattccatcaagattctgatcataggaatacatcccaacctagacttctatggctgaaagtgattaagaagtgttttcacctgcaaggactcccaaggggaagtgtcaacagcagagggtaggcaggcatatggaggcagactgagctgtctattctaggtactactctggctctggaatgatggttctttccaaaacttcatctattcacatgcacaccaagagccaatcactgagccagccccctgggtcaggattagctcaggtgacaccttgtcaaaaacctggagccttgccaaacctgttctttatatttctttccataccttaggcaccttcacttttaaatgcttaacatacaccatttagggtacacttcccattctagacaatggagttatttactcaccctctcaagggcagctcactttagtgccctaaaagaaagcaactatcttcagtgtatcaagagtgagttattcttgaagtgactccaaggccattttctacacctgtctcagaaaaacagaatatttcaaacaattgaatctctagcactctagacctatgcaagaacattttgtaaattgtagcgctatgtaaatataattgatatttgttatatcaggagatgaaagatgaccaggatcattataccaacacttaccacatcttcaccaaagctcctgacaaattagaggaagtyctgtcatactccaatgtaatcagctgggagcaaactttgcagatccaaggtaactagtctgagttaaaagaaaaagatccrtggtttattcctagccgatatggaaggcataaagtggtacttgtctttctcctttctccaggttgccaagagggcttrgatgaagcaataagaaaggttgcaacttcaaaatcagtgcaggtagattacatgaaaaccatcctctttataccggaattaccaaagaaacacaagacctcaagtaatgacaagatggagttatttgaagtggatgatgataacaagtgagattttaccttttgcttcccaaattccttgatagaattactgagttgccacaaaggctgtacttggaaatgtaggatttgagactaaattatgatgggctacacaattgcatgggtaaagaaagggagttatgttagcaactgtgtactgagcatggacatagccttcattagacaaggtctttatgcatattatttcacttagggctcacaacgtccttctgagagggtaatggacatcatggtgacatcaaaacatgtttactgaaactatttatgtcttacaaaatgctgcatgcttatagaaaatacataagtatataaaataaaaaataaaatctgtccacttgggttcccttgctaggtgtaaataattttgacactgatatgtatgcttttagtactctatatgagttatgtatttatttttacaacacatacacactttactgcaacttctgcaatgaatatcatcataaatagatcattgcacagttgtgtaaatatatctgaaagatgaattactagaattaaaattgttgagtcaaataatatgcatactaaataaatgatgttaacaaactggatggcaagattttcatgaatttaatgtgtgatatcataacttatgaaacaacctaaacatccagtaatggggaaatggataaatttattatgggacattgaaacattagaatactatgcagccattaaaaagaatgaagtagctctacaygacagattataaaatatttccaaaatagattgctacatgaaaaaaaataaggtggatagaacaatgtatataatatgctaccatttgtgtaaataaacaaatgtacatatacatctagaattgcagagaataactggaaagttgtaaaaaatatgttggcattagtggttgcttctagacaaagtaactgggtaatatgagatcagagaaagaagagagatttgctytcctctagtaatccatttatgctttatatttgtattactaattgaaaaaataaatagaatttaaacacacactcacagatacatttgatttagccagaaaagtcaacactcttcaaatcctgctttgccccaccagtgttcatatgagacacttaaggggaacatatacacagggaaaatgataaatggggattaaataatatttagtagtataactctggaaatctggcatgaaatacctgccctaaggtgattcctctaagcctacatggatatcttggtatcttgccactctaggtttggctatccacaggagagggtacaggaaagggtacttgagatctttcaggaagcaagtccaggatcaggtgaagtgagcaaaaacaaagcatcgcccgtagaaaacttagcgttctgttacccacccactggcaaacatgaagtgactctgaaactgacaaacttctcaaaactctttctccctggagaggggcwaaacttcctggagatcttctctcttccaccatccccatatttacagatgatattactgtaatttcacaagcaagaaaaccaagtaaacaagagaacataacctttccaaaagaaaataatcaggattagaatcccaatggttagcaccaaaaatgtagtattctttttcttatattgcagcttcttaaactgcgtttctgggtatgtgatgaagggctttgggacacatgaagatgtaagatcagcattgttctcatcttcctgtaaaatatgttttattggaatatctgttcaatgaaatactatcttgtatatttagatatcttgtgatgcagaactcaaaatgcacatggtttcatacatgcatctttcaagtaaattcagccatgtggagggcttctctggcctatattcacactcttttagggacatgtgttcattttcttccttagggcacttagtgggatattttgagatgtcctataacatatcatgctgtctctctgctattaaatgggccgtaaaacacacagtgttcccccatcaactatttggaaacattttgaagcggaaatagaaaaggtagttgttatgcatctattgcctcctccaggctgtagggtccttaaggaaaggaatggtgttatatttattttttgaaattccagtgtttggtaatattggctgaataaatgtaaaattctttttcttcacaggraaggaaacttttcaaacatgttcttagatgcttcacatgcaggtcttgtgaatgaacactgggcctttgggaaaaatgagaggagcttkaaatatattgaacgctgcctccaggattttctaggatttggtgtgctgggtccagagggccagcttgtctcttggattgtgatggaacagtcctgtgagttgagaatgggttatactgtccccaaatacagacaccaaggcaacatgttgcaaattggttatcatcttgaaaagtatctttctcagaaagaaatcccattttatttccatgtggcagataataatgagaaaagcctacaggcactgaacaatttggggtttaagatttgtccttgtggctggcatcagtggaaatgcacccccaagaaatattgttgattgattccactgtccatttcaaatctttcttatcagtaaaaaaacattaattcaaacacaagcattgtgatctacattagcacaaaatgcaactgattatctaggatctgtgtattayttaagctcacccttaacarttttaccttccttctcctctgtattcttacagaaaattagaagctcaattttatggtctcataatttcctttatgacagacatctcagaattaaaatcacccaaagccaatcattagtgccaagataaccctttaacggcaacactttcttaaatgaagactatttctttcatgaaaaaattcacttttatgactttcttgttaaaataaaaagtctgcttttaaaagtgtctcctctggtattcttcccttccttctaaaaagttatcccaaggacttttaaaaagccctcagcatcattgctttttattcggagtaccctctgaggagctttgagatgctccgctaaattaaattttgtggccatgagtgaaaatttggttttcttacttgctttttatcacaaggggttgctaggttgagttgcaaatttaaagcttaactttaaattttcaagataatttttatgtctatgatgtattagttttgccattataacaaattatgataaatattatgacttaaagcaacacaatttgttatcttatatttatggcaatcagaagttcagaataggatttatgaggctaaacccaacatgttggcaggtacagttccttctggaggttatacgggtaaatcaactcccttgccttttccagatcatacaggctgtcctcactccttagcttgtgtctctgtatcacatcatcttttatctctctactttgatcatcatcgcatcactttcttctcttctacactcaaatctccctctgcctccctcttagaaggacacttgcatatacataggaccaacctggataatccaggataatctccccatctcaagattgttaatttaatcacacttgtgaaatctcttttgccatataacactcaaagcttctagggattaggaccttaatatttttggagaggcattattcggccaccccttatgtgtacaagtgtatgttttttcctgagcaaagttacctcatactttcagaatttaagtgttctcagtccaagtctggtcatgatttctatattccaggtccatgttgatggaaaactgaacttactctagcttgacaccttatctatctcaaatcctatcagctatgacttaagggtaaagatcatttaaaaaaattggtagttggccgagcacggtggctcacacctgtaatcccagcacattgggaggccaaggctggcagatcgcgaggtcccgagatggagaccaacctggccaacagggtaaaacccagtctctactaaaaatacaaaaattagccaggtgtggtggcaggtgcctgtagtctcagctactcaggaggctgaggcaggggagtcgcttgaaccagggagtcggaggttgcagtgagccaagactgtgccactgtagtccagcctggcaacagagcaagacctcgtctcaaaaaaaagaaaaaagaaaaagtaatcagagcacattcatagaagggatttgggggcgaagacaccatagataaaaggtttagttaaatttaggcaaaatagaatcaacatcttcatcttcaaaatatcctttttgcttgaagataggtgcctaccaaggctggtagagatgatacagtcaacccacaacaggggaccacagtctgaaaatccctgtcattctctgaaaagagagaagctcccaggcactctgcctttacagtgagccaggaacttaaggacttggcttctctccagactccacttttcctatcctaatttacattttaggacttggtccttatgatcaaaccttccagcagccatgacacaccttggctgtataacttaaagtagaaagtgctgactcaagatagtatcgaagtaatcacagagatgcaataaagtgagtgagaaatgttcacacaatgataagaccttacattttagatagcacttagattccaggcagcattccaagtgtttcacacattttaacacctttagtactcacaactatcccaagaggtaagcaggcattgtcattacagaagagaaaaccacactagagagcatttacatccctcctccaaggccatctaatgaataagtggccaattcaggaagtgaactcagcatggcttccaagatagtactcaacttctgagatataactagtgacagaaggctaaggcttaataaacattagcaaattaaattatgaataattgcattttagcaatatcagactctggacaacaacattctcttgttgactatgatccatcatgtaattttgtaccagaatcctcccaatttctaataaaaagacccagggagtcagccaacatactttataccccttttactaatcaattctgattgatcctagagataacattagctctagaaactcttgcacaactttcaagtcctcacctcaatgcctctggctggatttttgttggctggatgacttcacacaaggggtgctcacaccaaatattgaacccagagatagagtatttcatagaaatatttctgctattgtgggatcattctaatgtccacaatcctacctaaagctaagcctagaagatgattcaaactttgctcctctaggcaacacaaggtaagtgaagtgtgaamgttgctttgtgctgcacttggccagcctctggactctagctttattaagagaagatgacagttgccaaaaaagtaacttgttgctaaaaatttaccaaagttggttagttaagattgggttcaagtagcaatgatcaacttgagttactctgagcatgaacaaagtgttttatttatttgaatataaattaaaaatataaagatatggattctcaaatacaagaatatagattgacccccaggaaaaaggatagaccctggaaatggaaaactaccaggggctctgggaccactttttctccatgcttgttttctctggacagacaggcttaaaaagtacacacacacacacacacacacacacacacacacacacacacacacacagtggtaaaatatatataacataatatttattattctaaccacggtaagtacaatgcagcggtattaaatatatccacaatattatataaccattctcattgtttcagaggcgcagactgcagagccgcccaggtcctgagcctgggagggcggttgcagctgcacctctgggagctctcgccctgccaatacgcaagaggcagggctcccgcttgtcccctgctcccctggctccctgtagcttgcagcccccgggatgcctccgaaatgggaacgggcgctgacagcggagagaagccacgcagtgggagcaggcacttccgagcctgtgggaggcagaggggtcttcctgggcccccaagaacacagagacgcgtgatcccgagagccgagagccgtggcagggcggctgcaggggcacccagggagggcggggctcctgccggctccgtggagcgttatagctctggccagagcctctccgcggtatcctgtgtcttgatagcggcggctctagatgggcagctgtttccgtcactattacgtacacctaaaactttttcatcatctccagcatgaactctgtacccattaaacaactcctcatactcccctccctcccagatcctggtaacctctattctatggtctccatgaatttctctactttgggcatgtcacaaaagtggattcatacaatatgtatatatcattttgtatctgacttattacacttagcataacgtcatcaaggtccattaatattgtagcatatatcaaaatttagcttttttgtggctgaataatattctactgtatatatacaccatattttgtttttccattcatctgttgatggacatttgtgttgttttcacctttggctattgtgaataacgttgctatgaatgtgagtatacaaatatgtttgaggccttactttcagttctttgaggtatatgtctaggagtgaagctgctgaattacatggtagttctatgtttagcttttggaggaactgccaaactgttttccacagtggttgcactctttctttccttccagcaaagcacaagcgttcccttttcactccacatccttgtcaataactgttatttatcccctttaaaagaattatagccattctagtaaatgtaaaatgatatttcattgtggttttggtttgcatttccctaatgactcataatattgaacattttttatgtgcttattggccatttgtgcagataggctcttgaattacagctctaaatttttgcatttctgccattcaaatgactcactcagatagatacttaactttcttagtcacaactccaaattcatcagtgactacaccactacacctaaatgcagcagccaggtgcccactcctggcccagtcagttatggcaagttctgtggcccaaatactatatcaaatagtacctcctggtgtccctttgggtggaacagaagtgggcaagggaaagaagttagcaggaaaggaattacttttatctggaaataccaaaaactgacaacatttctcttttatttattttattttacttggattaggataaaaccactgaacacaataactacacaatatttggcaaaaaatcctcaataaactaaagaaataagctgagtattttctatgcagaaagcagtatgttcagctgaacttgcttctcttttagttttctgatggccaagccctagtagaacatttaggaatcaacttttctccttatttttttttttttataactttggcatgtctctgttctgccagccccaagttggcccgtccctgttacagagaaagaagacaaggaacctgctgtcttctgtagttcccaacattttatgcttttcttctttaatcttttagaaactttctccaaggtagaaagatttttgaggtggctctttaggaaagattaagaaagcattggcaggcatattggtggcttggtgtggagagccagtgggaaagcttcagtaaattgcgtagatcagaaccacttttcacagaaactttccttacttatatgacatttccaaaagggagtggcaatacaacatacaataacctaaacagtggcctataaagtgatatactgtcacatctaactcaggatgtggtacactgtaagggatgacgagttgaggctcagagactaggttcaagttttagttctctctcttgctagctatgtgatccatagtaagacccttcaactctctgagcctcagtttcctcatctgtggaatggggtaattatgccaatttggaattggcttatttattgtatgtataatatataatattgtaatgatcaaatgcaataaaataaagagtttctagtatataggacatgctgaaaaaatggttgtttgatgataatgttgttatagtagatatttaataagtattagtacctctttgatccccactagtccctcaaattctttcttagcagccattttgaccctgaaactttgagacatgtctcagttaatttagaatgtttattttgccaaggttgaggacacatgccgatgacacagcctcagtaggccatgacaacatgtgcccaaggtagtcagagcatagttcggttttatacattttagggagacatgagacatcaataatcaacatatgtaagatgaacataggttcggtctggaaaggcgggacaacttgaagcaaaggtgagacaacacaaagtgggagggggcttgcaggtcataggtagataagagacaaatggttgcattcttctgagtttctgattaacctctccaaaggaagcaaatagatatgcatttatctcattgagcagagggttgactttgaatagaatgagaaacaggttggccctcaggagttcccagcttgactttttcctttagattagtgattttgggggcccaagatgttttcctttcacatttcctcccttttctttttaaaaatcttttggataaattattttagaagaaaatgactctctggtcccaggttttgtctcatctctcatggctaagatggtttattcctagacaggtaagtcctacattattaggaaggctcatttttagaaggttgtgaagtctcttgtcctatgaagagaaaatatgtggagaaagggaaaaaaaacaacaacaacaagcaaaagaacaatcctggaaa

SEQ ID NO: 93593 - DNA, 42194 bp, Homo sapiens
tagttgggattacaggcatgcgccaccacgcccaactaatttttgtatttttagtacagacgaggtttcaccatgttggtcaggctggtcttgaactcctgacctcgtgatccgcctgccttagcctcccaaagtgctgggatttttatttatttatttttgagtcggagtctcactctgtcacctaggctggagtacaatggcgcgatcttggctcactgcaacctctgcatcccgggttcaagtgattttcctgcctcagcctcctgagtagctgggattacaggcgcttgccaccgtgtccagctaatttttgtattttcagttgagatggggtttcaccatatcagccaggctggtctcgaactcctgacctcgtgatctgcccacctcggcctcccaaagtgctgggattacaggtgtgaaccatgatgcctgtccctccccccggctttttttttttttttttgagatggagtcttgctgcgtcacccaggctggagtgcggtggcatgatttcggctcactgcaacctccgcctcctgggttcaagcaattctcctgcttcagcctcctgagtagctggggttacaggtgcccaccaccaagcccagctaatttttgtatttttaatagagatgagatttcaccatgttggccaggctgatctcaaactcctgacctcaggtgatctgcctgccttggcctcccaaagtgttgggattgcaagtgtgagccaccgtgcccagccatcttctttcataattataaaagcattatgtattcactacagaaaaatcaagttagcaaaaagaagaaactaaaaaataatcctactcactggaagtaaccactattaatacttcactgtgtggctttctaaagtttcttataaacatatatttacaatatatgttaatgaaattggggttatatcatgcatactgttttataaggttttgtttttgtttttcttttttttttttgagacggagtgtcactctgtcacccaggctggagtgcagtggtgtgatctcggctcactgcaacctctgcctgctgggttcaagcaattctcctgcttcagcctcctgagtagctgggaccacaggtacgcgccaccatgcctggctaattttttgtatttttggtagtgacagggtttcaccatgctggccaggctggtctcgaactcctgacctcgtgatcttcctgcctcagcctcccaaagtgctgggattacagacgtgagccactgcgcctggcctttataaggtatttttaacacttaatatgttatggataatattctatatcaaacatacttgtatgataggatttttcatagctacagagttggtgacagtattaaggttttcccagccttctggagtgatgaactttgccttccatttcagagtttttttttcctgtaatggaaaaatgtctccttttgtaactgagaatactatccagacatcaggggcatcaccaggggacatggtcatttctctcttttttctttagccggactgtagaagctggaggaaaaggcagtatatctgtggcaaagttcctggccacaaaattttggctacatttataaaattctaattccaggtgaaaggggaatataaacttaatttttctgaaaactacaaagaacagagacagataccaatgagctgcaggcatcattgtgtaagctgagtgcagaaatcgtctggtagctgggcaggcgtcgttggccagagcatggcaggctttccatggccaaagccactaagattttgactgctcaggacttcattttggggcttctggggcataaaaggccttggtacaaagagcatgttatccttttcaactatggcacccttttcagatgtaagattctgagctgacaggagcatgrgaccgattgtattaattcttggatttagtcctaagtaactttttctctatataacaagtctaaatggatggcaaggcaagagaggagttgttctgtttattccatctctacctctccttgaatttcctccttcatccccacttcatccaatggctttgtgtttacatgatgtttttattttatttatttatttattttgagacagagtctcactctgtcacccaggctgaagtgcagtgacgtgatctcggctcactgcaacctctgcctcccaggttcaagcaattctcctgcctcagcctcccgagtagctgggattacaggcacccaccaggacgcctggctaatttttgtatttttagtagagacggggtttcaccatgttggccaggctagtctcgaactcctgaccttcagtaatccacccgcctcagcctcccaaagtgctgggattacaggccactgtgcccggcctacatatttttgatacctctatttctgtttcctaacaccactatgtatttcactgcagatatgaaggactccaactggcattagaggttatgtatttaaaatccaagcccacttagaaattataataataaaaataacaacatctagcacttattatacattaattaatactattttggtgttatttatttatttatttttgagacagagtcctgctcttttgcccaggctggagtgcagtggcgcgatcttggctcactgcagcctctgcctcccgggttcaaactattctcttgtctcagtctcctgagtaactgggattacaggcacacaccaccacacctggctaacttttttgtagttttagtagagatggtggtttgccaggttggccaggctggtctcgaactcctgacctcaggtgatccacctgcctcagccttccaaagtgctgggattacagaagtgagccactgcgcccagcctggttttatttatttataatttcatttaattctcagaataaccttattatttttctattataattattcccactttatagatgagaaaaccaagactcagaaaagttaggtaacttgccaaagttcacacatctaggcggttgcagaaccagaattcaaacccagttccatctgactccagagtcgtttctgacactggtctactttctgtctcagtaagtttagaagtcagggaactggaaggaacaacaacaaaaaaataaacctaacttaatgccaagagaattgctgacaagatatatctcattcctactccatgtttaatgtcaatttttgtatcttgggtagggtgcctattataaagctatttgctcaaggttatcctcctcctaccccgcccccatcatcagatgatttttatttatagctatgtttaaacatcatgggcaacactcagacttgctgtatattgaatttgccatcagagcaaagattctttctcaaagcatatttgctttatttactctctggtgtttcccaataaattaaaaagacaattctttttggtttgctttaaattttttgttccaaatattcttcagctctagaattgagtcagtgaggtcaaattagtcaagaccagataagtcaaaatgaattttcattttcatgtccattagatattttgttctacagaatacacaatctgaatttcttctaaagaaaaatatatcctgattaatttacttctgtattgtttatgatcatgtatgctttacttcactgtctgatgctaagagcttcctagaattcattccttaagaagttaagtcatggcatttaattatttggcaggatgttttaagtacatataattattatatcttccctccattttgtgatggtggtgagccaagtaatctgcatcaagagaaaataaataacacctacattaatgctaccaacaaggrgctcacagtactttggaaaaactcataattttagcacacagtgggtgttcaatacttcatcatctatcaaactaacatcaccacaccctttccaggtaagagaatctaggcaggctgggtgcggtggctcacacctgtaatcccagcactttgggaggctgaagcaggcggatcacctgaggtcaggagtttgagaccagcctggccaacgtggcgaaatccgtctctactaaaaatataaaaattacccgggcatggtggcgggtgcctgtaatcccagctacttgggaggctgaggcaggagatttgcttgaacctgggaggcagagtttgcagtgaaccgagattgcaccactgcactccagcctgtgcaacagagtgagactctggctcaaaaaaaaaaaaaaaaaaaaaaaaaagagagagagaatctaggcaaagagaaataatgttgattctgttccatatgtcagaccttggaaggtcaactgcatgactgtggctgagactttgtacttgggagtgtgcagttttaaatcctgaccactatcttaggcaagtcccttctcttttctgagtgcctgtctgcttcttgccccatcagacagttctcacacaggttcatggcaacggtaaagaataagattagacagcacactgggtatggctttataatcacgggcactaagtgatgattttttccttattcattccacttggtcttaactcttacccttctattgtttggggatgttaactgcaaaacagggacagaatttgggctaaagggtctttttcccagtctggtaaattaagtatgtgataagacttctagaagagtagatctaaggtactttcttttgtgcacactaatgggaggtgtgaagggaaagcagaattgcaatttccagcctagggaggccaagccagtcggccttgccaaacacgttgtcttggataaaggaggattttcagtcctgctattggctgatggggcctccagtgccttcttcagcctgttggtggggatgatgccctcagagccgcagagtgagcagtctcctcccaagcatcgctgagcacttgggtgtggaagggttgcctgatactgagggtggggttcctggaagacaggcgatcaggttcagctcttgccttgccctttatggttaaatgttctttggaaagcttctatatctttcaaatcctgggggcattatgatctctcttctgcctatcccaaaccatcttcagccagtactgttgggagaatacaagctccagggcatggtccctggtccgtctggatgacccctccggatctggcatatagctggcgctctatggaaccagatatttatgtaaaagcagggacaatggaatgtgaaaacgtttcgcaaactccaaagcgattcataaccagacagaggtccaatcctagggtatacgagctctctcttttaagcacgtatcacagctgcttctcacgccaccgagacgcggtcaggacaggtgcatccatcttctctgggcttcccctcttgaaagtaggccagggcgcgcaggggttgagggtctctcattcccagagagaattaaacttggaggaaagcaaccaccggcgaggagcggggcgcgtggaagcgagccgcggtccgaggcccaaagaaaagcccaagcctcgcccccgccatcgcgcccgacgagacacctaggtccggggacgggtgtgtgccgcggaagtcaggtgcactgcgcagcactcccccggtaggtacacgctcctccacctacgagtgacctaattacaaggtgccagccgcgcccagaggtgggggtggttaatccaagcggccactcgctgcccgttcctgcccccaaagatgacggaaacccacacgattacagagccgcagcaccccagatgagccacggggtcgcaattctcgtttccgtgatcggactgccaggccccaggtgaggagctgagttcatcaccagagcggccttcccaggggaaccagttacaggctgccagtggccccggcttccatccggtctgcgcctgcgcgcggcccaagccctcgcctctcctggaatagtgctcagggattagtccggttcgccgctgtgcgcactgcgcatgctccagctccatccttcccttcccccaccaccccgccctccgggagccacgcccaaaaagtcaaggcgcttcagttaccagccggctacgtcgcgcctgcgctttgacccccagtttgcgccccaactccggtcgtgcggccgcccggggagggctctgcagttgcgcagcttgctccccggcccttttcccctccgctccccgccgcctcctgacgccgggcgtgacgtcaccacgcccggcggscgccattacagagagccgagctctggagcctcagcgagcggaggaggaggcgcagcggccgacggccgagtactgcggtgagagccagcgggccagcgccagcctcaacagccgccagaagtacacgaggaaccggcggcggcgtgtgcgtgtaggcccgtgygcgggcggcggcgcgggagsagcgcggagcggcagccggctggggcgggtggcatcatggacgagaaggtgttcaccaaggagctggaccagtggatcgagcagctgaacgagtgcaagcagctgtccgagtcccaggtcaagagcctctgcgagaaggtgagctgtagtacggctgcggacagccgccgcggggccgagcccgccgaggaaaaggcggccgtgaggagggtgcaacatggcggaggccgccggtccgggccccccgagyctccgagaccggcgcccatcctggccggcggcggcttcctaacgacccggcgccccctgcctcccgcgcagggattggttgccgccgccgcctaaaatggcgccgttcactcgactcctgggcttttgagtcagccggccttggcgccagacgaggtggcagggggagcggagaccctgtgggtcatcgtcagggacggttttgagggtgagctggcttggattctgcggcttgggaatggagcctgggcctctccggtgggctgagtaagagtcttkccgctggtacccaggcctagttaggtccagagctgcccagaggatcccccaaaggcagtcttgttaggccgtatcccagaacatacctaaaggtcacacagctttagtaccccttggtggtttgtattawactcaccaagcgatcttctccagaaatcaaggtaaggggtgtctttaagaatttttaaattattctcttaacctaayttttacgaaggtcatggtggtagctataagggaggagtgtaacttatttttcatagttggaagaaatcgggaatttggtgagtcatactacataaggagcttttggattggaaatcaagtgtcggttgaatatgatttatatgctgactcaaagccttctctaagcttaacacacttggcattttgccgtttatttttaaaatgaacmacataaaatggaagagcggtaaattttgtatctttgttgcaaaaattacttgatagtattttgtggctgcaagtagtagtagtgataataactgtcgactgagattgtattccagacattgtgcttagtgtttaaataatgtctcacatacactgaaaatagaatgttgtagtccacttagtaacactaaactttatattrgctaattcccttttgttttcccctgggggttggggaaacaggtagttaatttagctattagctttgtgttgtatttttaaattcttgtaactcagttttctaaagtacacaaaatgctgatctctgctgtgaacattttaacttcccttttcaaaattaactttgcagcacgtcactttagtacagaatagtggagtatcatattagcattttgtatccgtgaaaagaattaatggagaactattatcctgatttgtttctggtttgatgtgaaaattaggttcatgagtttgacgtatatgtttccaagacaggcttttttagaaaccatgttgtgaacaattggaatttaagtaagtcagatttagatttgtttctcccaagcctgaacaaaactactactagtggatgaggtggcacatcatctgttggagatgccttttaatggtagcgatgtattgaatctcctgtttctttaccctctcacgtcaaatgaggttggtatttattttaaaggtttaaaattggcctttaaaaatgaatgtatattgccaggtcttaatttctaggtactgtacatgatgatcttaccgatttttggaattcagtgcattatatgaaagacttttaagtcartagttggccagttgactagtcttttgaagaaaacgtggaaaggagggaggtratgacgtaactggaagactggactgcgagttagatwtggacatgagtccttctgctcttmcttgagtaattgtgacagactttgggacagccacttcacttgtccttgttttcctgtctataaactaaaatgtgttctgagattatacagtcaattccgttttaaattagtagtgtgtttaatattgaacatctattgaatatctaagattgcatactcttttgagggaaatgaaaagcaatgaagaataagtatgcttatmgtcgaggagctatgaatctagtttgaaagaaaagcatggtatgaaaaggtgtgggagatggagcatggaagtagagggtttgtgttggaaactgttgtagaagataagataatactggatgctagagtggggtgggtgaagctgatgcatctaatattgctttccacatctttgtaaaactaagatgtagtgaggtaaatctccattgcttgcgctgcttacgcaaattttagttctgagtgccaaaaaagatggaaataatatttgagagtaggtgttayataaaagtttctgtggaatggatccgttttggtggatatcattatacaaccttcatactgtttataactggtaagtaagtatttcaactttcaggatgatattaaacttccaaactaaattaatttgaagacagttttttgggtatgtagaatccatgaactgatgttttttgtacaagtctttctagtaaaacaaaagctgtctttcactgttaatatttgtgtgccaatggcatctctgggtgaaagctacatatgtgctttttggtgtgattgccttctaaagagtaattttgaaaatttgagggctaatttttttcattagtgtrtaataatagtattttttgagaaaaaagatacttgttaatagttgataatttcttcaatcataagaaggaatgataatgtaaaagccttccttctacccacctaaatgcctgatttgaaggggaaatatttaaatagtaaaaatagatgtataccataagaggtcattgttactaaaaaatcctgaggccattwttttgttawcccatcaacaattaacagtgttacatgttcagaactgagagaatctaagtatgcatttataaaagacaagagtgaacatggtttttatgttactgactagctaaaaagaattttaagatgtgattaagacttatacaaaagccaaggttgttagtgtatagtatactttgtcatcttgagaatcataatttgttgatagtttaataatttggtgtgcagctttgcctcaggctcagttctataatcagcattacatcagtataactggccgggtatgtttcaatctacagattgaaaggagtaaatagtatcaacttgcttttgcattgactacagtaaacaatcttttattatgtgacttcagctttgttttagcttgggtatgatttcttggctttgtgcttaccaaacatgtggagaacgttgtttgatagccagatttttttttttcaaagaagttctttacctaggtatgctgttttccattgctttgcaagcactataaataaagtgcagtcattagtcattaaaatgttagttttaacatttgttacgtgagtatggaaaaaacaaactgcttccttctaattagatgagctgaaaaatatttgaccaagatgacattcttrtatgaattgggtaatatgttgctgtgagtatgtgtgtacgtttcattttaaagggtgtttggctcatttctctagaagtgatttgaatattgaggacaagcaggtgggggaagcatgttacagaacattatttttatcatacttttataagatattgttctcagttacagatgcaacycaaagactcagaaaggtaaagtgacttgactaaaggggctaaaagtgagattgccaaggcttgtggattctaagcctaatgttctggtattgcttcacagatccccttctgttttcagaggtagtgttagtagtgaaagatgtaggtaaattggggccaagctaaattgggaagtcaacactttcataaaataaaacttttttttttttttttttttgagataaggtcttactcttttgcccagtctggagtgcagtggcgcaatctcggctcactgcaacctccacctcccaggttcaagcagttctcctgcatcagtctccctagtagctgggattacaggtacccaccaccatgcccagctgttttgtatttttagtagagatgggatttcaccatgttggccaggctagtctcgaactcctgaccttcagtgatccacccacctcagcctcccaaagtgctgggattacaggcttgagccagcgcgcctggccaaracattatttttattttcattgcttgaaagcttcctattcatgttacatactgttgttcckctttgtcttggaaagagtaattattattcagttttggatgtagctgacaacatttgcccctcaaatgagattggtgagatgaaaaccctagataatttcccttgtattcttagtataaatcatgatccagagactgagctctaaagtattctaataaagtataactgactttttatattgtttattgcaacttataaaatgcctcttttcagcagggcaaggtggctcacacgcctgtaatcctagcactttggaaggccacggcaggcggatcacsaggtcaggagaccaagaccaatcctggctaacacggtgaagccccgtctctacttaaaaatacaaaaaattagccgggcgtggtggcacacacctgtagtctcagctactggggaggctgagacaggagaattgcttgaacctgggaggcggaggttgcagtgaaccaagattgtgccactgcactccagcctgggcgacagagggagaccccattccccccggccccaaaaaagcctcttttcatcctcttggcttccacagtcaaatgtcatgcatgtgtgtatttgtttcatggtctcctaggcaggaagctgtaatgcagttagtttggagttgacttcatgaggaaacagaaaaggtgaacattcccactattcagaaacacaggttccccaaccctccctacgttctccactgggaccagaattgtatgttttcagaaaattggctgtaaggctaagttgaagctcatgtactgtagaaagaatgaaggacccttcaggagtatgtgggataacatttgtattaccagtctggtgtggccctgttttatggcagcaaatatgttccctatctcatggtaagtcaggtttgtcagagttacctgtgagatagcctttgcttagtttggaaggggtaagttaggaaaactaagagactgggtttggtggggtcttttatcagggtactgaggagagaggcaaagctatatgtaacagggagacactatttattctttctgctttgacccatttctcttacttcattatcatccttgcctgagaaagctgtcaacctccactcatacacaggcagatctgaattggatgagaaccatgaaggaggaagatttttgtttttgtgggctttttttttttttttttttttttttttttgagatagagtctcacagtcgcccaggctggagtgcagtggtgtgatctcggctcactgcaccctctgcctcccaagttcaagcagttctcctgcctcagcctcccaaatagttgggattataggtgtgtgccaccacacccagctaatttttgtatttttagtagagacagggtttcaccatgttggccaggctggtcttgaactccttacgtcaagtgatccacccatctcagcctcccaaagtgctaggattacaggcatgagccactggcaccagacctgtttttgttttaaatagattttcttttggcttctggggcagaagtggtagaccaggctgaagaagggagaggtgtctattgtcagtaaatggctgagaggtggggtttgaaagaatggtaaagaacaacctgagattaactgctttttttttttttttttttttgatacggagcctcgctctgttgcccaggccagagtacagttgcatgatctcggctcactgcaacctttgtctcccacgttcaagtgtttctcctgcctcagcctcctgagtagctgggattacaggcatgtgccaccatgcctagctaatttttttatttttagtagagacagggtttcatcatgttggccaggctggtcttgaactgctgacctcaagtgatccgcccgcctcagcctcccaaagtgctgggattacaggtgtgagccactgtgcccagctaactgcttaacttcttcacattgcagtattattgcctgtttattggtctgttgtggattgtggtttagaatggatgaacaaggcagtgacacagatgcgtgtatatctgaatctgggtattttttaaactaaatgtgaccagttggccagtccctcttgcaccctgtgttgccacttctgccttagtttagtcatttagttgctactacagatggggatttttaccctgctggtgttgaggctggaaggttgcaaacctttgtcctagatggggacgaggagtagaatgggagacaagcagtagcatgtgtttacctggccaaaggcctgcaaaatgtagttcacagaggttatggagtgtcattgatgctatcgtgtgacagtgtacatttgattttggaaccagtatttaataaaccttcattgtatgcattattgtcactattgagctttgtctaaaaagcactaccttattctcgtgtataaggatttcttagtttggttttgctctaattaatagcacagttttggattagtcaggagattgactttatagttaattctagatagggaatgttttagaatgcttgtgccggtggtgatcaagtaacttatttttctgccactaatctgtaaatgagcaataatgcccactatctatttcttttggctggctttacttaataaaataggcttaagacatgctttaggatggggtagaattctagtaatggaatcaaccttaaagaccatctaggctggcggggcacagtggctcacgcctggaatcccagcactttgggaggctgaggtgggtggatcacgaggtcaggagatggagcccatcctggctagcacggtgaaaccccgtctctactaaaaatacaaaaaatttagccaggcatggtggtgggcrcctgtagtcccagctgctcgggaggctgaggcaggagaattgcttgaacccagcaggcagaggttgcagtgagccgagatcgtgcccctgcactccagcctaagcgacagcaagactccatcttaaaagaaaaaaaaaaaaaaagaaagaaacaaccatctagactaattcatcttacacagatgagggaggaaactgagacccagagtggttgaatcttgttcatgatgtattattgtgacaattttttaataagtagatatatagcagcatttctcagttgtgtagtagattaaaacttctttttctatgcaggaatgattgggagtgtttaattcattcacatatgtaggttagttggtaaaggttgagtttagtctattgtgcatatgagacatagggctttaaggatctttccttttggtcagaggcaaaggtgatattgcagaaacagatgggaaaactcacaaattttatattttcttttattacacttttagaattatccctcattcccaacatttttcttttatttaggtcctaagccttagagccaaacagaaaatactagttactagaatattacctggagggttaaacttttaaaatataaccatactgattttaatcaaagaagattgaaatgtttcgtgaaatattagtggtatctgttcagtgtagttaatgaaagacaagtagtcatgcaccacataatgacattttggtcagtggtggactgcatgtgatggtggtcttatgaaattataatggagctgaaaaattcctatcacctggtgaccttgtaatgtcatagtgtaacactttatattgtttatgtttagttatacaaatacttaacattatgttaacagttgcctacagcattcagtacagtaaatgctgtacaagtttgtagcctaggagcaataggctatccaatagcttaggtttgtagtagtctatactatctagatttgtgtaagaccactctgtgatgttcacacaacaactaaataatttgatgtatccctgcgattaagcaacacatgattagtatgaagaatggtttgatagttgaaggaaattaactcaaaactcatttgcttccagggctagtaatatgttctacatcatgtatcaccccacgcctcaaactctagccctgtacactaacttatcacaaaccttggatttttttgcacaattatcaaaatgacatatcaaaccaaccgtacatcttgacataaaaacagtatgagacaaaatgaaattctcttgggatattgaaaaaattttttttgcctgtgaatttagtaattttacttattaagaattttcaaatgatttcagttcttaaactgaaaaataaaattcaaaaattaattgcattttttccagtgtttcttctatgtctttatattggtagaactgtccaactatatggtaaggatgtgaaatgttaaatttacttgaactagagttacaatgaacattagaattaataatcagacttcttttttttttctttttttgagaagggagtttcgctcttgttgcccaggctggagtgcagtggcacggtcttggctcaccgccacctccaccttccagattcaagcaattctcctgccccagcctcccgggtagctgggattacaggcatgcgccaccacacccagctaatttttgtattattagagatggggtttctctgtgttggtcaggctggtcctcaaactcccgatctcaggtgatctgcctgccttggcctcccaaagtgctgggattacaggcgtgagccacttcgcccggccaataatcagacttttagtagtaaaattactttcaaaaatggagattcctttgtcaaatagtactattattagtactaagattgtaaagaggttatttgtgtctgattttgagtttgatgctacagagaagacaggttaggcctgcattgacgtttttcatcaagggcagaattgatgatacagaaacttgatttctgtctaggcatggtggctcatacctacaatcctggtgctttgggaggcggaggctggaagctcactcgagactaggagtttgagaccagcttgggcaatgtagtgagaccaccgtttctacaaaacaaaaaacaggtttctttagttaagtataaatcattgatctgtgattaatccaaacactttttcctcagtatagaccttggggttcttcggtgtttgactaccttcttttgaaggaaaccaccttttttttttttttttttttttttgaggcagtctcactctgttgcccaggctggaatgcagtggcacaatctcagcccactgcaacctccgcctcatgggttcaagtgattctccagcttcagcctcctgagtagctggcattacaggcatgcaccaccatgcccagctaatttttgtatttttagtaggggagggggtgtttcgccatgttgcccaggctgttctcaaactcctgacctcaagcgatccacccaccctggcctcccgaagtgctgggattacaggcatgatccaccgtgcccacccgaaaccacttgtaatatacctttaggagaatgcttttagttacatcatgatccctttcatgtagctaacaacaaaaatgaatattaaccccaaatattggaactcgtattttgaagcaagttatttcttggtatactttagtgccagaattggtactgttatgtgattaactgtttttgagactaagaaaatattttgctggacatctgatgaaattatcttaaaaacagtgcttgggtgttttccctggagtgtagtggcaagagtactctgttgtccatcagagccacttgctgctctcagctggccttgctgttgaatggcataatctgatttcgttggagtacccaagtcctaagatttgaagaataagggttattatctcagtctcatcttttctctgagatagcatttgttcaggaaatgttatctgttttcaatggtgaagggagtgagagtctgcttaggagttactgtatacattaaacattggtgaccggcctttaaagaattagaggctaggcctggtgacttacacctataatcccagcagattgggaggccagggcaggaggatatcttgagcccgggagttcaagaccagcctaggcagcatagtgagaccctgtctctacaacaaaatttttacttttttatttttatttttattttttgagatggagttttgctctgtcacccaggctggagtgcagtggcatgatcttggctcactgcaacctccacctcctgggttcaagcgattctcctgcctcagcctcctgagtagctgggaccacaggcgagggctaccatgcccagaatatttttgtattttttttttggtagagatggggtttcaccactttggccaggctggtcttgaactcctgacctcaagtgatccacctgcctcggcctcccgaagtgctgggattacaggcgtgagccactgcacccagccctacgaataatttttaaaaataaattagttgggtgtggtggcacacctgtggttctagctactctgtgaggctgaggcaagaggattgcttgggtccaggagatctagactgcaatgagctgtgatcatgctacagcactcgaagcctggggaacagagcaagaacttgtctcaaaaaaaaaaaaaaaagtaaataaatattagacacttctcaagccctaggtcccaattgattgatttttttttttcttggatgcaggattccaaaatacttcaaggtcattattaaacatttaaagttaatgtcataatgttaacgatgcaagtttaagatgctgatataaaaagaagcttgagtagttgtcgtgtaatcttaggattaaagtatagattttaaaatgaaaaactcttagaaaatggcaagacgtgataacttttcttaataattgtaggagaaaaattacaaagcaaaaatgggcatagaaaatttctggctatatatttaaaaaataagagaaaatgccaaaaagttacttaaaataacagtttaaaatagtttatacaaatacttcagaacatcatctagctcttaatgatcagatgttcaaaaatattcatggacaacttgtataagaggagaaataactgatggtaaataaacatggaataaaaagtttgtactcagaaatgaaaaatgccaattaaattagtgataccacattgtatatctgaaatagctgagaatgagtatattctttcatttattattgtataacaaattggcataattgagttttatagtacatatgaaacaaaaaaagttaatgctattttgccctgtaatcccacaattaaagctttttgaaaggaaataattcaaatgagcaataatactgtacacgtataggtctatttagaagggcattatgtagttttaaaaaatcactataatgtagaaacgagttagtatgaaactttaggacacaaaatgagatgccagtcaattataagtaagaggtctgtgtgggtaaaaactgaaaggtaatagaaatgagaagarttctggttggtaagaataagatagttatatatcttaaagctttcagtgaaatcttaaccttttaattttttttttagcctttttttgttagttttgagagagagtcttactgtgttgcataggctggagtgcagtggcacgatctcagctcactgcaacctctgcctcctgggttccaataattctcatgccacagcctcccaagtagctgggattacaggcctgtgccatcttacctggctgatttttgtatttttagtagagatggggttttacygtgttggccaggctggtcccaaactcttgacctaaagtcatccacctgctttggctcccaaagtgatagaattacaggcgtgagccactgtgcctgggcttttcagcctttttttaatgcaaagaattgtgacatggttgtaatcattttgtgcttttatttatttattttgagatggtgttgttgcccaggctgaagtacagtgacatcatcatagttcactggaaccttgaactcctgggctcaagtgattcttctgcctcagcctccctagcagctgggaccacagagtgcaccaccatgcctagctaatttttatttttcgtagagacagggtctcgccacattgcccaggctgatcttgaactcctgagctcaagcaatcctcctgccacagccttccaagtagctggtactacaggtgtgtaccactatgcccagctaatattttaatttttttgtagagatggggttttggtgtgttgcccaggctgagcagtaatattttgaaaggaatctttttttttttttctgagcagtaggtctcaataatgcacttaaaatattcagtataccgtgctgtaagcagatgtgctgtcatccaggctttgttgttccatttctagagcacaggcgtagtagatttagcataattcttaagtgctaaagaatggcttaaatgctttcagaatggtgaatgagccttggcttcaactgaaagtcaccagctacattagcctctaacaagagtcagcctgtccgttgagggtttgagggcaggcattgacttctctagctagtaaagtcctargtggcatcttcttccactagaaggctatttcgtctacattgaaaacctgttgtttagtgcaaccaccttcatcacttatcttaggtagatcgtctgggaaacttgttgtagtttttatattggtacttgatgccttatcttgcccttttatgttatggaaatgggttcttaaatctcatgaaccagtctgctagctttaagcttaacttctgcagcttcctcacctctattagcctttatagaattgaagaattaggacctacctctgaattaggctttggcttttaagcgaatgttgtggctgatttgatctatccagaccactaaaactttgtccgtatctgcaataagactgtttggcttacttactatttgtgtgttcactgaagtagcatttctaatttccttaaagaacttttcctttgcatttataccttagcagtttggtgcaagaagcctacctttaggcctgtctggagtttccatatgccctctcctaagtttaataatttctaacttttcatttaaagtgagagatatgcaactcttcctttcacttgagcatttggaggccattgtagggttattaattggcctaatttcaatattgtgtctcaggggatagggaggcccaaggagagggagagacagaatggccagtcagcagcagtaagaatatatacgacatttattaagttcattgtcttatgggcacggttggtagtgccccacagcaattacaatagtaacatcaaagatcactgatcacatatcaccataacagatacaatagtaatgaaaaagtttgaaataattttagaagtaccaagatgtgacaaagacaagaagtgagcacatgctggtgggaaaatggtgctgataaacttgctccacacagggttgccatgaagctttgattgattaaaaaaatgcaacatatgcaaagtgcaataaagagaagcacagtaaaatgaggcatgcctgtagttattgtgtgctcttaaggaaattactattactatttttgagatggagtctcactgtcacccaggctggagtgcagtggtgcggtctccgctcactgcaacctcgcctcccaggttcaagtgattctcctacctcagcctcccaagtagctgggattacaggcgcctgccaccacgcctggctaatttttttgtatttttagtacagatggggtttcaccatgttggccaggctggtttcgaactcccgacctcaagtgattcatccgccttggcatcccatagtgctaggattacaggcgtgagccactgcactcagccaaaaataataagtggttagtgaatctgttgttggttcatgtacttttaaaaattgtcttccactgggcgcagtggcttatgcctgtaatcccagcctttgggaggccaaggcgggtggatcacctgaggtcaggagtttgagaccagcctgggcaagatggtgaaatcctgtctgtactaaaaaaaaaaaaaaattagctgggagtggtttgcatctgtaatcccagctactcaagaggctgaggcaggagaatcacttgaacctaggaggcggaggttgcagcgaaccgagatcgcgccattgcactccagcccgcgcaacaagagcgaaactctgtctcaaaaaaaaaaaaaaaattgtcttccatgaaaaacagcatggatgatttatgagctttagtttaagcctgctttgtttgtaatttcatgttactacagtggttatgatggcctgtattcaagaatgttgagtctgtgggtcatttatcttatagctgattattttatagtgggttggaaataaggttgtgggatttctgaatccaaaccagaatgctgagaggacattggtaataagatagtgtcctcagtggtgcatgcctgcagtcccagctactcgggagamtaaggtgggaggattacttgagcttgggagatcaaggctgcagtgagccgtgatggtgccgcactgcagcctggacaacagagcaagaccttgtctcaaaaaaaaaaaagattttaaaaagtatcctcaaagattgcttttcttcaagttaatctgcaaatttttggattctaggacagtatgagatgttaacttcccacagttacttgtgataaggtcttactaagagaatcgcctcattctagttttaaccttgttcttggaagtttataccaaatttttgtttgcttgaaattcattcatttcagtctataccatttgactgaatttcagaagggttctgataaatcaaaaccagtgtggtactaattacattcttttttttcttttttgggatggagtctcgctttgtcacctaggctgtagtgcagtgacatgatcttggcccattgggttcaagtgrtgcccctgcctcagcctcctgagtagctaggattacaagtgtgtgccaccattcctggctttttagtagagctggggtttcactatgttggtcaggctggtctcaagctcttgacctcaaatgatccgcctgccttggcctcccaaagtgctgggattacaggcatgagccactgtgctcggccctaattacattcttttaaaaactttatcttaatttttttcccagatgttgaccatattagctaagaaatttgaggtcctggaaaaatgttttaggggaagcaaaaggtttggtatgcrtgttttgcttttgcttgtctttcagttcttaattcaggtgatatgagactttacagaagtcaaaatgccagagtaaaaaggtggttattaaaaataaaaaacctcaaatgtcaaaattaagttacttaaaagtctggttctaccatttactttgagtattaaactagacagttgagattgtataaccatctttgaaaatgatggttgctaaaggtctggaggctctggaggtgatccataaagccgctcttattaggtgctttcaggatttataaggcctaagtccttgtgatagcacagcttatctttattttgtttttagtttttttttttgagatggctgtctaccaggctggagtgcagtggtatgatcacggctcactgcatccttgaccgtcctggggtcaagtgatcatggctgactgcatccttgaacttctgggctcaagcgattctcctagctcagccttttgggtacctaaaactgcaggtgtgtgccaccacagatggctaattttttattttattttctatagagaggggtctcaatatgttgttgcccaggctggtctctgaactcctgagcatcctcccgcttttaccttccaaagtgttgggattacaggcatgagccgctgcacttgccaaaatgatcttttttttttggacagagtcttgctctgtcactctggctgtagtgcagtggagcgatcttggctcactgcaacctccgcctcccaggttcaagctattctcatgcctcagcttcccaagtagctgagattacgggcctacaccacaacacccagctgttttgtgtttttagtagagacggggttttaccatgttggccaggctggtctggagctcctgacctcaagtgatccactcgcctcagcctcgcaaagtattgggatttgggattacaggcgtgagccactgcacccagcccaaaatgatcttttatatgaacatctgtagcttttattgttctactgttctggtgtagtctgttttattgttgtaactatctgagagctggtaagttgagaccaaaacaacaacaacaaaacaaccaaaatcatgcttaaaactggttctttccaaggttgcatttttgttaagatctacttaatagttgattggatgatttttttttcccccctccggtctgagggatggttgcttctactgtataccactgttatcgccagtatttaattatatttgttctggtctgtgaagtttggtaggaagggaagaaagagctctggttggcttttctagattgacaagttagaaatttcacttaagagttaactgttctttttattttaaaggacaatttgataatgtcaacatttaaaaaccaaactactagatacactagttaagttcacttcatagtatcttctctcaggaaatgtgcctgcatatgtatacagaggagaaaatacgaggatatatattgctgtagtttcacacccctctgcccttgtaattggtcaggggaatactctgcctccactatgagaaaataaccagctgtctcaataaatgttatgtattattatatattgttagaaaagcaggctgctgaacaatattgtttctagtttaaaaatgcaaaggaaaactattgtttctgtagacatacagtatgtgtgtaaactttgtaaacaaagttttaaaggatatacagacactccccaatttttcgacttaatgatggtgtgaaaatgatagctattcaatatacccctcagtttatgatgggactacatccagataaatatatcataacttgaaaacattgtaagctgaaaacacactgttgactcgattatatttacgataggattatctggatgcagctgtgttacaaattgagcatctgtacatcaaaattttattggtaactttgcccaaagggggtgggattgtgtagggtgctcaaagggaacatttcattttatctgtgccgaaattttttacaagaatgtattactaatttgtatagtttaaaaaatagataacactgtttatcggtgtgatttgcctaaattgaaataaaagcaacaaatagcatttagacttaattttccttcatgatttgaatagaaaatttgagtcagttgtagtaaggaacttcaggcagtcctgaaagtcaactttttattattaatacagagaatagctttgcagataaacagatattcacagaagtatattaacatttaacttctgatagctttaaatgtgaaaattacatcatggcaagatttacatggtatataaccatctgtttgcttatgtcatgcccttttaaaacttctgaataacttttgcaagtttcttctcagtgtaggacttatttcatttagttattttcattaatatatgataggtgttaaaaaaacactagatgtggtattaatgccagacagacttggtaatggaataagcctagtgaatttgtgttttttagtgatagtaaatgggaagttggaattaccctgcagagaaaaatttcaaaatgaagtaggatttgataataatgggttgtacatatttcttaataggtatctcaggccagtatagtggctaacgcctgtaattcagcactttgggaggcagaggtgggcaaatcatttaagctcaggagtttgaggccagcctggacaacatggtgaaacctcacctctacaaaaagtgcaaaataggcatagtggtgcacacctgtggtcgcaattgttcatggagactgaggcaggaggatcgtttgaacctgggaggtggaggttatagtgagccgagatcatgccactgtactccaggctggtctggaactcctggggtcaagccatccacccgccttagcgtcccaaagtgcagtggttcttaaacttggttgcacactgggaaaaggaggggtgggggtgcttaaaaattattgatggcttgattccagtctccaaaattctgactttattaggggaaggaatgggcattggtgtttttgtttttgttttgagacagagtcttggtctgtcacccaggctggagtgcagtgatgcgatcttggctcacggcaacctccacctcccaagtttaagcaattctcctgcctcagcctcccaagtagctggtactacagtcatgcaccaccatgcctagctagttttttttatttttagtggagatggggtttcaccatgatggccaggctggcctcaaactcctgacctcaagtgatcggcccaccttggcctcccaaagtgctgggattacaggtgtgagccaccgcgcctggctgggcattgggatttttaatgtgcagctaagattgcataccaatgctttgaacccagtccttgtcatctgtggttgtcatggctcattagcaacaattctctggtaatttgttttggtatcttatgtaaagtggtctctcccagtttycctctcyctttcctttgtgacacttaacacagtgtacttttggcttggttacttgtttgtggtccttctcccctctacggtagtgggaatgagccatcttgttcaccactatatgtccagttgctagcatggggctggtacagatggttgagcaaatgattttctcacaggtatgagccacagtgcttggccaaaaacatgtttttaaaaagtcaaacagggctgaggtgaggtggcttatgcatgtaatcccagcccttgggaggatgagggtggaggatcacgtgagaccccgtctctacaaaaaagtttgtgaaaattagccagccatggtggcgtgtgcctgtggtccccactactgaggtgggaagattcctgagccaagaagatccaggctacagtgagctatgatcatactactgcactccagcctgggtgacaaaatgagaccctgtctcaaaaaaagaaaaaaaaagaatctttgagtgctgcattgtagttagaactctgaaggtaaggaagtagatacctgaatgtcctgttcsattttcattggttttatgtgacagctaacaattagtatttaattagatggctatttgataggtttttaaaaaactcctggtattgatgataggaatgcatattttttccctaggtaacagggtgagatagctaatggattataatcatatctcacttattttaatgggttcataaatgcctgcaattttatcttagactgagtctgccccttaagctacattaagtgtaagtaaacaaatctttgttaatattgtttaatgccaaatgtattgccttatttttgtctcccatctgtaggctaaagaaatcctgacaaaagaatccaacgtgcaagaggttcgatgtccagttactgtctgtggagatgtgcatgggcaatttcatgatctcatggaactgtttagaattggtggcaaatcaccagatacaaattacttgtttatgggagattatgttgacagaggatattattcagttgaaacagttacactgcttgtagctcttaaggtaatttcaattttatgttggggcatgttgaaatgggtaagacagtcctcttgaaagtttttttycccccagttattttctctatctgaatgttaaaacaaaattccacatttaggaatgcatatgttcaggttttggacttaaaaatcataggcgtctgcgttctgagtaaggggatggtacagaatcaaaacaaaaggaggagaatgaatgcctcagtcagattgtttgaaaaaataggctgggcgtgatggcttatgcctgtaatcccagcactttgggacgctgaggtaggcagatcacctgaggtcaggagttcgagaccagcctggagaacatggtgaagccccatctctactaaaagtacaaaaaaactagccgggggtggtggcgggtgcctgtaatcccagctactctggagcctgaggcaggagaattgcttgaacctgggaggtggaggttgcagtgagctgagattgcgccactacacgccagcctggacaacagagcgagactgtctcaaaaaaaaaaaaggaaaagaaaaatgttagagggctggtcaaatagatattttagttcagtaaattggggtatggagaggtaatataattagatttgtgtttttagatacttttgaagtattataaatatataaacataccaaatgtcaaaatgttttaaatcagctggtcacggtggctcgtggctataatcccagcactttgggaggacaggacaaagtgagcatattgcttgagtccaagagtttgtgaccagcctgggcaacatagtgagaccttgtctacaaaaaaataataataattaaccgagtgtggtggcacaggcctgtagtcccagctactcaggctgaggtgggcagagttgcttgagcccaggaggtcgtggctgcaatgagacttgatcttgccaccctacactctaacttggggaacagtgagaccctgtctcaaaaaaaaaaaaaaaatatcgaggaagaagttcaagaaaaaaaagaatttttctgagaaattcaagaaaacatttgctgtaaatatttaacagagaatattatgtacattacatacattatgtatgtacatatggtttagctcagttgaatagtttccagccattaaccatgacagtaataatctagaataggctgggtgcagtggttcacgcctgttatctcaacactttgggaggctggggaaggcgggaaggatcacttgagtccaggagtttaagaacagcgtagtcaacataaaccccatctctacaaaaagtttaaaaaaatagccaggtgcagtggtgcatgcttgtagtctcagctactcaggaagctgaggtgggaagatcacttgaacctgggaggtcaaggctacagtgagccatgatgcaccactgcactccagccgtgtgacagagcaagacccctgtgtctttaaaaaacaaaaatctagaatggtagaaatgataaccgaaaaaagcaagttccaaaattacatgcattacatgccaattgtagctttgcaaagtgtaccgatgatgatctgaacatgaagcaaaagatggtaaagagctgttagggtggcaggcttccgcctttcccttgaaataaattgtttgactttacctttacccaaaaatcttggggagatttttttccccctaggcaacagactgatttttattattaaagaatattcaaaatgataaatggctgtcacagactttcctaatattagagaagcagtgagatgtggttttagcgtgagctgaattttcttgattaatatctgaattgtgtaaagtcctacgaaatatttttggagatcgttattttctgcatctgtaaaatgaaggagttggactagatggtggaaggtttctgcggtgactccaaatactatgaaaagagctaacctgtgctaaaaacccaggatgaatcccagtgctcagaggaatgaatgtgctacctttaagagtatgcaagcagcctgggcaacctagtgagaccccatctcttcagaaaacaattttagccagacatggtgacatgtgctgtagtcctagccactctggaggctgaggtgggaggattgcttgagcctaggaatttgaggctgcggtgagctactccactgcatttgagcctgggcgacagagtgagatcctatctggggggaaaaaaacttactcatggaggttaatgggctgaattgtagcccccaaaattcatttgtctaactcctaacccacagcacctcagaatgtgactgtatttggacaggtaattaaggtaaagtggggtcacatggttggaccctaatccagtgtaagtggtatccttattagagattaggacacagatggggagaagataagacagatggagaagatgagcatccataaatcaaggagagaggccatcagaagaaaccaactgtgctgacaccttgatcttggacttctgcctctggaacagtgaggaagtaaatttctgttgtttaagccacctattctctgatgctttgttgtggcagccttagcaaaagaataccgggggaaaggatgtttctttcagtaaatggtgctgaagcaaatggatcagaatgtatcatagaactaaatgtaagagctaaagctacaaaacttctagaataaatcagaaaatctttgtcaggttagttaaagattcttagatataacaaaagcacagtccataaaaaattgaaaaatcggactttatcaaaattaagattatgttttttcaaaagatgacaccagaaaaaaagtacttgtattcagatatttaaaaaaaaaaaacttttacagctcaataacaagacagataattgtaaaatgggcaaaatatttgaatagatattttacccaagaagatgatacatgagtggtcagtgagcacatgaaaagatgcttgatatcaattgtaatcagggaaatgcaaattaaagtaactgagttactacttcacatctattagaatggcagtaatcagtaaggttgataataccaagtgttggttaataccggagattaaactcttcatgcattgctggtgggaatataacatggtctagctactttgaaaaacagtttgactgtttctcaaaaagttaaacgttaccaggtgatccaacaattatattcttaggaatcttcctaaaagaaatgaaagcatatgtccacagaaaaacttccatgtgtatgattatagcaacattattcatagtagccaaaaacctcagtaacataattgccagttcatcttaactgtgaatagagaaacaaaaaatggtatagccatacagtgaaggactgtgcaactatgaaaaggaacaaaccactgatctatgccagaacatgggtgagcctcaaaaatattctaagtgatatttagccaaaagactacattttgtattccatttatatgacatttctagaaaagacaaactcaagacagaaagtaaatcagtggttgccaggagctggagtgggagtggagagtgactgcaggagggatctttttgggataatggaaaggttctaaaactggattgtggtgattgttgcataactataaatttgtgaaaaattactgaaccgtaaagtaatttatggggttttaatagcccattgatttatgtttggtataaagttggtggtagagggagtttgattttagttgagatgaggtgggcaaacaccccatgggcatttaaaaattctgtagagctgtggttttggttcactatgatatgaggatgtgtgctgttttttcaacaaaattgtaactgcatttttttctatagaaagtttcttgaattttcattggtttttgaaagagctagttgtttaygttttgcattttattgttttaggttcgttaccgtgaacgcatcaccattcttcgagggaatcatgagagcagacagatcacacaagtttatggtttctatgatgaatgtttaagaaaatatggaaatgcaaatgtttggaaatattttacagatctttttgactatcttcctctcactgccttggtggatgggcaggtatgtggatctaaaactcattgctgattatttcagagaatctgctttctttagtgttcmggtgcttatgactctttccactcttaacacccctttggggwtattttttaatagatattgatagcattcattcaaacttaaaaaaaatttaatttgacaaatgtgtccaacttttttaagtgcattattctttatatcaggcactgaactgtatggtgggatcacaggggtgggtgatgtagcccatttaccctctcagactgtttttggacaagtctgggagatgtaaggagctaattattggcctaggtagatgtgcacacaaaagaacttacaataaaattttatgagtatgaagatactagtctctggcaaagggcaggagtgatatccaagaagttttctcaaaggagctgtttgaagtggagtctggttgtgacagcgatggtctattaggaagaacaggagtgtactcaatagttcagagtgggctggagcaaagatgaaccctgcaaagtcaagtctcattmaggcagagcacagaaacaccagaggggccaagtgatgggggtgcccagctcattttttaaaatttttgtagagacacagggtcttgctgtgttgctcaggttggtctcaaactcctggcctcaagcagccctcctgcctcagcttcccaaagtgctggggttacaggcatgagccactgtgcccagccaagaatgtttacaaattttttaggtgaggttaaccttttaaaccactcttttcagatcttctgtctacatggtggtctctcgccatctatagatacactggatcatatcagagcacttgatcgcctacaagaagttccccatgaggtatgacttttatttgataaaattctttcagaaaacttattagggagtggagaagtttaattgtaagttcattagatgtattstctcatataattctcaaaaacaacttgaggtgtgagcactcttgtctgccctgttgttcaaaagaagctgacattaagaaacctgccaagatcacaacagctgtgaagctgggcttattaggacctgggttgtctgtcttagactctgaaatttgcataatataggcagattaattagggcatgttgctgctgggtcccatggatgtcagctgtgtctcataaagtctgctggaaaatacatcttatttgatgcagatgtttgacttcaactgcacagtctattagcattgtccacaaacatcactcaaaaagggtggcttagggtgctgcttctgatgaattactcaaataatgtgttaaccatgtttgtaaaargcattttataacttgaagttattttttagggtccaatgtgtgacttgctgtggtcagatccagatgaccgtggtggttggggtatatctcctcgaggagctggttacacctttgggcaagatatttctgagacatttaatcatgccaatggcctcacgttggtgtctagagctcaccagctagtgatggaggtatgctgtgttctctgaaatatgacttgtttttttagtaaacttaaggaaagaagatattagggagttttaaattaatgacatttgtgagaaattccatctattccttctgatgagtttatcattatagcctgagccttttcagtagatgcacactactagaattaaaagctcaagcttttgattacartgaatccattaacatgttttcagagaaatctgaatgactaggaagtacttgagatttaagagtgggaaagtaagatatagggagttggtgtgcatgtatgatattttatgatcccaatgttatttcgtatatttaatgtatgtatgtaggagagactggaaagaaatacacgaaaatgttttaagtggtcctttggatgctaggattacaggtgatttgaaagaagggaaagaggcaaaggttcttgacatggcacactgattagaatatttttaaaataaggtcctaattagattaatactagtacaactctgtggttatcaataaaatctgactttgctaaaggtaaagaaatttgtgaacaatactaaacaaaaagtaacaaaagtagctcatgcattcaggtggatggactttgaggaaatgaggctggagatcctagaggcatattgcatttgttcctgggcagtgaccaacttaacaggcctttacctgtgactgacaaaattggtaaggttctggtctccaggattaagtatctacttctctagggaatggccacttaaatacttattcttaaatcatgttttaaggccactgcaagagaagaggctaatgagacattgtcatttacagcaaggcagatacatgagaagtatttcattctttggtggttgctgctgtttgttaaagccttttttttttttaaagtactaaaaaaaaaacaagttttgtaattagggggaaaataaatacatgtgtaccttacaggttgtataaagtacaggagattattaagtcatccagaaaaaaagcattaacatttcttaagcccctttggcaggggtgggaatgagtagagatttttttctctcttgagtgaagtaacatttagttgaattgagggagtaaagtaagatttttgtctccttttccttgcagggatataactggtgccatgaccggaatgtagtaacgattttcagtgcyccaaactattgttatcgttgtggtaaccaagctgcaatcatggaacttgacgatactctaaaatactctttgtaagtaattctacctgaacattttcttgcattactgaatatgtagggttttggtttatttattttgagagagagggtgtcactatattgcccagtcttgtctcgaactcctaggctgaagtgatcctttcaccttggcctcctagagtgttggggttacaagtataagatacagtgcccagcctgaatacatagtttaaatgtkaggtttaagagtttaagggggccaggcgcggtggctcaygcctgtaatcccagtactttggaaggctcgggtggatcacctgagatcaggagttcgagacaagcctgaccaacatggtgaaaccccttctctactaaaaatacaaaaattagcccagcgtggtggcgcctgcctgtaatcccagctactcaggaggctgaggcaggagaatggcatgaatccgggaggcagaggttgcagtgagccaagatcgcgccactgcgttccagcctgggcaacagagcgagacttcgtctcaaaaaagtgtttattaagggattatgctatgtcagattccaacttttatttttaagttttgttttttttttaatggatctacattgaaacacaccaacaggaacttattatatatagatcttcgtatgaattactaggtttttcacttttaaaaccatgttttgtgtttttttgttgtttgtttgtttgttttttgagacggagtctcactctgtcacccaggctggagtgcagtggtgcgatcttggctgactgcaagctctgcctcccgggttcacaccattctcctgcctcagcctcccgagtagctgggattacaggcgtctgccaccacgcccggctaatttttttgtatttttttagtagatatggggtttcaccgtggtagccaggatggtcttgatctcctgacctcgtgatccgcccgcctcagcctcccaaagtgctgggattacaggcgtgagccactgcgcccggccaaccatgttttgttttgttttgtttgaaatttcagtcaaggtaaaaaccatgtttttataaaagcatagtctctgtggctgaagttgccttgactctttcaaggggagtacagttaacagaccattatcattaaggttctgttacattaagacaagccaaaattgaataggaagtgtaaagtttggaagactcatgttcttgatcttgattgtcactacatggaggtcgtggaacataaaccatgaatcggtcttgtttttcagcttgcagtttgacccagcacctcgtagaggcgagccacatgttactcgtcgtaccccagactacttcctgtaatgaaattttaaacttgtacagtattgccatgaaccatatatcgacctaatggaaatgggaagagcaacagtaactccaaagtgtcagaaaatagttaacattcaaaaaacttgttttcacatggaccaaaagatgtgccatataaaaatacaaagcctcttgtcatcaacagccgtgaccactttagaatgaaccagttcattgcatgctgaagcgacattgttggtcaagaaaccagtttctggcatagcgctatttgtagttacttttgctttctctgagagactgcagataataagatgtaaacattaacacctcgtgaatacaatttaacttccatttagctatagctttactcagcatgactgtagataaggatagcagcaaacaatcattggagcttaatgaacatttttaaaaataattaccaaggcctcccttctacttgtgagttttgaaattgttctttttattttcagggataccgtttaatttaattatatgatttgtctgcactcagtttattccctactcaaatctcagccccatgttgttctttgttattgtcagaacctggtgagttgttttgaacagaactkttttttycccttcctgtaagacgatgtgactgcacaagagcactgcagtgtttttcataataaacttgtgaactaaraactgagaaggtcaaattttaattgtatcaatgggcaagactggtgctgtttattaaaaaagttaaatcaattgagtaaattttagaatttgtagacttgtaggtaaaataaaaatcaagggcactacataacctctctggtaactccttgacattcttcagattaacttcaggatttatttgtatttcacatattacaatttgtcacattgttggtgtgcactttgtgggttcttcctgcatattaacttgtttgtaagaaaggaaatctgtgctgcttcagtaagacttaattgtaaaaccatataacttgagatttaagtctttgggttktgttttaataaaacagcatgttttcaggtagagcttaaactaaatgatgtgtttacttagtgcagtttctggttatgaatattatattgctatgtgtatattatatggactctttaaaatgattgacagattggcaaattcttaaatctttgtacattgttgagtcatatgttcttagagttaaatttgtctcagataagaaagtgttaaagcattagcctgtgtcaagttctttgagtgatactagtgaaaccaaatagaaaactattgttggatcatgatttagtcttatgtacattcacccgaagacaaaaatggtacttaaagtggcagtgttcaacatttaatgagtttttccccttttatccttcgaataggattagatgtttaaaaaaaagttcttctgtgggaactaatatttgatattttaacctaccagagtaaacaggaacacttaatcatacttgtgagtgtagtaaataaaagttttcttgctttgtgctgtgttgaatctggaaccaacagggaagttatagcatatcccctttctaaaatgcttgaggaacacatacataccgaatgtcttttctgatctaattgatagtatttttagtggcttgtggagttaattttccaaagcaaaaggccattagggtttctacatttcatttcatttcattcttttctttcacaagaaatacattctctgtgtgtctttttgttgctctgtcactctatgccctttctctccgactgaacaaatagcttatccatgtgcagtggttttaatacccaaacaatctagacaccaagcagctattttttccggtcctgtgatatcagaattgaccaaggaatacgtatattgtaattgacacgtggtggtatcttccaggtacaaattctctaaattttgtggttagcagaatgggacttgtgataagaatagcttggttttagcataactagggtttaaaataattgtttaattatagagactgaccaggctttggccatctaaactggaaagtgttagtaccctaccttcttttgaaaatggctatggtaaggaaaatgtgttagtaaattatgtattttcttgaaaaatacataattatggttggatgggaatcactaagttgggtgttaactgatgtctcaattagtaacattaggattttcattaataaacctaaaaagctttccctaagaacaggcctggcacagtggctcatgcctgtaatcccaacactttgggagaccagggtgggtggatcccttgaggtcaggagttgaagagcagcctggccaacatggcaaaaccccatctctacaaaaaatatgaaaatcagccgggcttggtggcataccatagtcccagctacttgggaggctgaggtgagaggatcgcctgagcccaggagacggaggttgcagtgggctgagattgtgccactgtactccagtctgggtgacagagccagaccctgtctcaaaaataaagaggattctgagtttgtatagtgagggcttgcagaaattttgaaacttattttgtaagtttacaatgaatttgtacatgatgtgctcatgtcttgggttgagtatcctagacatgattttttcatttgctgcatattaaacatttgttggttgtagtcggtatttcttaaatagaagtttgtcaatattagattagtttcaagaaggacttagctcaggaaaaggatagttatttctgtggttctcagctttgatgcctacagagattctgatttaaattgctggaggagggcccaggcatacattttttaagtttcccaagtgattctaatttacatctagggttaaaaacagccaggcgcggtggctcatgcctgtaatcccagcacttggggaggccggggtgggtggatcacctgaggtcaggagatcgagaccagcctggccagcgtggtgaaaccccatctctattaaaaatacaaaactgaccggtgtggtggcaggagcctgtaatcccagctacttgggaggctgaggcaggagaatcacttgaactcaggaggaggaggttacagtgagccgagatcgtgccattgcactccagcctgggcaaaaagagcaaaactccatctcaaaaaacaaaaacacctcactgctgtttcctaagtacatacttaagaaaattgggatacatggtggtggttcatggatgttgataaggaattaaaatgtaccgtgcgactctctgtttcagtggtgacttttacctgtttagtataaatattcctttgcttccaaccataaatgtgttcttagaaatgggcctatagtttagtaacctatagtttggtaataggcttgtttgttttcagatggattttggttctgtgagctaaagctattttgcattaaagccttcgtcctcacacattgttttgacatatttctagtcttcataaacttttttaatttagatttttttcccttcacaagtatacatctgttttagcaaatagccttatgaaggttgtagatgtattattttgggcatgcctggtgatttctatattttttccaattacatttaaagctttatgttttaggaatataagtacattttatttctactttttattatatatatttaattgcacaagtactactgtctagaaaaaaatgggatgttgctaacacagcattgttggcttgtaggcagtgctgtcctgtaaatagattgaaatgtatttttatcagctggtatataaatttgaggaaagaaaaatgtggactgtgtttgaattgtttaaaagttgaacatacaaagatcagtggtaaccaagtaagtgatataggcaacagaccccagtttgttttgtatttgctgtcatgcctggaccagaattcctcattcccaagagtgaaagaggaaataattatagctaatgagtgaatgctggaaaaagtcacacttttttgttttttaaggaaaagcacaaaccctcatgtctgaggttgaatttaattaagtgcagtcggccctccatagtcaagggttccacatctgagaattcagccaaccatggactgaaaatatttttgggaaaaggaaccaataaaaaccaatacagtggccaggagcagtggctcatgcccataatcccggcactttaggaggcggaggcaggggtggggggatcaccggaggtcaggagttcaagaccagcctggccaacatggtgaaaccccgtctctactaaaaatataagaattagctgggcatggtggcgtgtgcctgtaatcccagctactcaggaggctgaggcaggagaatcacttgaatctgggaggtggaggttgcagtgagccaagatagagccactgcacttcagcctgggcaacagagcaagactccgtctaaaaaaaaaaaaacacagtataactatttacatagcaatttcattgtttaggtattatgagtaatccataatttaaagtatagccagccatcagtatccacagagtttgcatcaaatgagtcaatggagtcaaccaacctgggattgaaaatgcagtgttcttttttttttccccctgagacggagtctctctctgtcacccgggttggggtgcagtggcacgatcttggctcactgcaacctgtgcctcccgagttcaagcaagtctcctgcctcagcttcccaagtagctgggattacaggcgcggctcactacgcccagttaattttgtatttttagtagagacagtttcaccatgttggccagggtggtatgaaactcccaacctcaggcgatccacctgcctcagcctcccaaagtgctgggattacaggcatgagccaccgcgcctggccaaaaaatgcagtattcttgaatgcagaacccactggtaaaggggactgacttccagacttgactatccaagggaggtgtcctggatccagtctcccaagattactgagggatgactagtttgtatcctcaacaggcttgtgagaagtagccaggattttgtctactctgcgtacgatgctgctaatgctgcaaaccactgctcttattttactacttgggtcccttcggaatctattttgagatagcctcagccatgatgtacaatcttctcaaccattcagtgttgttagtgggaaggactttaatgtgttcttcctgctgggcacagtggctcccgcctgtaatcctatcactttgggagtccgaggtgggtggatcacttgagcctggagttgaagatgagcctggccaacatggtgaaatcctgtctccactaaaaaaacaactagctgggtgtgatggcacttacctctagtaccagctagttgggagggtgagactaaatcgcttgaaaccgggaagcagaggttgcagtgagctgagatcgcgccattgcactccagactgcgagactcttgtctcgaaaaaatatatttttaaaagctttcttccaagaaataatttagctgttcttccttagtgcagtggtaggctgtagccaccagcaagcaagattactgatggtggaagtcaaaggccagaatcgtgataggaagttaagagtgcttgctccatagaacactatggaagaccacaatggaatgtctaattaaagctattagaaatgcccaaagctgttgagtgcctctacctcaaggcttagcataccttctgatctgcaaggagactaatcattaggctttttgcagttctagaactgctctgagtatggcattggaacctggggataggagcaagagctagtaattgggtttggcaggcctggtcaaaggggagctttaaggtcaggtatatccaaacatatcaggaagtaggttacatggtgtggtgaaatataccagatgtaaaatctgcagaatgtactcctgctgttgagtccaacttgcaatgtaagtccctttgcagtgaaggtcttgagtatgtattgcatgcagcaggcagaggagcgggaggagaaactgtataatgtatttggtcttgaacatcctttgttttccaaaaccacattcatctctaccttggttgaaatgtataaaactaccattttaagtttcatcttttcattgatctatgactaaaattaggatgcaaagacaaacccaaggcttagcccactgctcctcctcagagctgcactggaactggttgtagggtaaagggatgtaggcaatttaaatatgagtcaagatttttgggatggcagtatggctctcatggcctctggaaggatccaggtgatgtccgacctggtatggcctcttggcctgttgccaccgcaccaggttttgcccttaattttagtcttggctctggatttctttagggtattgtgatagctttgttggtctttgggtttttctagtttcaccacagatcctaggaaaaataaccatactctagaaatgagaagccaggatttttaaagtagggctgggaatatgagtagacatcttttggattttcaaaatgtatttgcttaaaccaccttttggcagcagttggacatttctgctatctacctgagtggcagatggcctacagcatttggtatgttaaaagagtatagagtaagtgattcatggcttctgaaatacatcaatttgacgttgcagtcttgaaaaggcaatagctgacatatcctgaaccagcttgggtttccagtgcactcagtgctgaaataattgctgtgaagggttgagttgaattcagaatgacttaggacagtagtagctactgaatgttcaatctttgaaatgacagaattagcttatagtgaatattgtctagcactgagcatttccatgtgccaagcatgttacatgaattattgagttttctcaactctgttgagaagagcagagaaggttctgctattcaggcattctgatcgcagagttcctgattttcaggaagcattaggtttctcttgcctttgctgaaattcttattagtggtgtttgaagggtgggcaatagcctacacagctttagggtttagatgtgtcgcttagccccattcaggaagctaggtgtgtgatgggccctttggggagtgtgtggtgaggaaggcttgcatgctgggccttttgagtgttggcccaagtcaggtagcctggttacagcattctcaagagttcatggactgccgggcacagtggctcacgcctgtaatcccagcactttgggaggctgaggcgggtggatcacaaggtcaggagttcaagaccagcctggccaagatggtgaaaccccacatctactaaaaattaaaaaaaaaaaaaaattagccaggtgtggtggcgggcacctgtaatcccagccactcgggaggctgaggcagagaattgcttgaacccgggaggtggaggttgcagtgagctgagatcgcaccactgcactccagcctgggtgacacagtgagactcgtctcaaaaaaaaaaaaaaaaaaaaaaagagttcatggactaacctttgtgtctcaagggcatttatttgagccagagtttgaaggggagttaggtgaggttcagctgaaccaccacagcctaacaattgctcttgaagataaaag

SEQ ID NO: 93594 - DNA, 13718 bp, Homo sapiens
cttttcaatgtactgcatgcattcagtccactgcaccgtctcattttctacccattatcaatacaaaaattagagtatcttgacaacagatttttcacagtgggattcactttattctagggtcttttctagtaaaaataaaatagcaaaggaactccattatctagaagattttcaatacagcctattccagctgtaacactccactcattcttctatcaaattatagttaataagcatctaccacatgaagtatacagctctgactcctggggatcacaggtagcagctcacaggctgctggaggagacagatgtgtccagaaataatgcatgcagtgtgacagatgctgtaacagggatgtgtgaggcacaaataggcacctacctccgcttggtcaggcagaagtgaaggctgcctagcagatgggacacttgattcaaggatgcttccgataagtatgtgtttatggagaaacaaaatggtacaccaatcagcaggaatctcatgcataaagtctcaaaacaatctggaatatttgggaaaccgtgagcagtttctgcatacctagagggcaagtcacttggactggcagggctagatcaggtagggtgctaagtcaaacaatgaagcttggactttatctctaggaaggaatgagccactacaacaaggagaagaggaggaaaggtggaataaagttaaaatttgctgggtgcttatcatgtgcaagacagcatgaatgtagaaggtgaatactgtacatcatttctcttcattttacagatggggaaactgaaactcagaaacgactcggctagtaagtaattagcggtgccaaaatttaaacccaggtaatctgactttagagcctatgcttttaatcactgcaggtattgttttgtgtataaagatatgaagcacgtgtaaagatacttgaatatgaagcaagataaagataacatattgttttcactgaatatgagggtaaacaactcaccattccaaaagagggggaaaaaagaaaaaatagaaggcatctaaaagttaccccgcattcaatattgaaactgtgcaacaaagacataagaacaaaggaagctgctatcctctatgagagtggttctcaacggagggtgattatgcccatcagggaagatctggcaacatctggggagatttttggttgtcattattggaaaagaggtgccacacatctggtgagaggaggcagggaatgctgctaagtatcctacaagggacaggataaactcccacagggagttcaagatagttcaagcttaccaatacagaattcaagaacacacacagtaactggactgcaaaaagtgtagttcactatcaaccaagaataccagaagcacctagggagggacagccaaaagctgttggaggtaaccaacaatgctttcccccttaaacagttattaaatcacattcaagtcatggatgataaaaggtatttttaataatttttttcaagaaaaagacttcttgtaaaattgaggggctatttatacacagttcatcttatgcggccacaacctggatatcacttttgaattttagaaaactggatgtagttatgcaggagagacactttctagcccagtcacatctaatttaatacccaatcaagaccacagtgaatcttacgtttgtgtgtgattacttgcttctacctacgtttatatggttcctgactctgtaccttaagtagctgataccaaaagatatgagtattcacatataaacttaatataatttgtgaaactattgcttttcattttttcccaatcttctgggatattttatttattagtccaaattgaatgaaaattgtaatttttggtaagtgagatgcataaaatttaagccctcgccttatgcttgttttcctagcttattaggaaatttctaaccaaaagcatcaaaactgactcacagtattccctcaggaatctcaggatgattgggaagtaacattatttagtagttaatggatgaactatacactttaactgggcgaaatgtatggtataccttaacaaagccatttaaaagaaggtaatggaattttcatcttactgccatattggtttcattagtttagtcaatactcatagggaaaaatgagcacctaaacattcatcatgctactcagaggattaaaatcttgccaaaatgaaaatactaatctatttcatatttgtagcagcaattttgagaattaaatttataatcaaatcttgtgacttttgttttcctgaaaatgttttgctaaccaaatgaaaaactagaaaagcagtctgagccacattcaagttttgctaagagaacaaaaagaaagttatctacctccctcagcacagagaactagaaaggatacaacaaaagtttcccagaacattactcaaacaactgagaccaaccatascaaawatccttactygaataaacaacagatagcagcaaaagacaaacagctaaaagctattgtagggctcaacacacaaccaatagctctcagcttatgtaaacttgagtttttaaatctcggataaggttcaaactgtgaactgcatgaataagactttctgctatcaaggtgaggttgcccctaaagcaagtaaaaaaggcaaatacctccgtaacattaacagggatgcaaagatactgtgttttatttttctggtattttttttttaacagaaaattattttccatttaaatggaaattaaatggaaataaaattattttccatttaactgatattcatcttaccatataagatgagtaactgttgtcttcaggctgaaacacttttcatgatgacacattaattttttttctaacatcgatgaaaaactttatctaagttgaagaaaaatcacttcaaaactaacttttctatttgtaatttggtgcttaaataartccaaagaatgtttttcaaaatgatacacagaaaaaatgtttaccaagattctctcatatttcttccaccttaacttgctataattaatcttttctaattcacagtgcattactgtaacaataatacaagcaaattctcaagtaaccatttaggaatcagtaaaattatttctactaagagatgaaatgtgtgcataattttaatgtaaaattagccatcttcatctaagatagaataggaaaaaggataatcacaaaataaatgttaggaaatgcttttgaaaaatagagatttttctagttaatttcagagaacagtaggctaattgatgttgcctgcttaattttgactttaattagtggtaatcaaaattactaagtatactatctcaaggaaaaacaccataatggtagctactggctattaactttgaagtaactgtttactttttcatttacaaactaaagtaggagttaattttaagtaattaatgcaacacacatcaattgtacctatgcaccataatacaggaaggttaggaaaaagttttttaaaatgtcaagtatgtacagaacataaacatgttcatccaatgtttgaatacctctacatgcaagtttttttatacacaccatttataaatatgcaaatatatttaatttagtacacgccaagggtgggtaggtgtttaacacatacacttttaaggtagcatagaagataatgkgattagctttagcagacaacatctgtgttacacacatggccatcaaaataattgtggcatgcttttgtgacaaggacagaggccaagcctgttgttaaatgattatttccaacaacagcctgcttaaattattgtttagttatatggcccatatccaaartaacagtattacatagttgctgttgcctttgaatcactcaccaattttcagcccatttgtaaaacaagataagcaccactggattataaaaaataattatggatcaggatttttgattcatgtttctttgacaaaattattccatttgatcccaagtcctggctgctctcttgacagaataatgtacacgctctacagctgataggcatgactttgatgattaaataggaagctcacattccagatgactttagactccagataatttagactttgcacttcaaaaagatttctttactgtcttagtatctgatcatcagttacctttttctaaytgtttctatctcgacacaagaatctatatattatctacaatttaggatgtttttgtgatttttgcctattttattcatacagtacaccaaagaatgttacatcatcttgtaagttacaatattttcctgatttcattgggcgggtgagaggagaaatattttggaacataaagaaaagttaaaaatacaaaatgtacaccctccccgaaaagagtctattttattggtcttgaaaggaaataccgaatgagaatcgaactgaattttgctcagtataattactggggaaacaatattcaaaacaacctcctaaaggaaagggttaacaatcttgtagctttaacygattatttttgctcctttctcccgcaaaagaattacacctatgaaactggaattctgtacactaagaatggcaacattaacgctgaaacttttagccaggaatagttatcctagtgtgcataaaactatgtaaaaactgattcacaaaaggaaatgcccagggcctaccccattatgattaacttctgagatgaagcgactaagagaggatacttggcagcctgaactcgatttctcagaaagccagctctatcagagcgggggcgggggggcggtttcccttcaccagactcagctgttgccttatctaaaatgccttagcgatctaaaactgaaagagaaagataaacaaaacaacaaaacgctccggatttagatctcctttaggtagttaacactgttgcaaaagcaaaacaagcacgcaggcgcgtcggtcaggttgtcactacaaacatacgtaccttctcatccaatgtaaggaagaggatctctgcgagctctgctgcctttttgtttgggctctctaggttaatgtagtgattgcattttaatgacccacaaacaggagcaaagttattactgggtcgctttgagagatgtttacttaaatgtgaggataaacccaggtcgctgtagaaagggaaaatattttccgtccaaacgtagcattacccaactacgaacccacgcaaaacaatcacaatgacccattaatgcgtttcaacgagtgaactagttcacttccctaataacactgtcaaggaaaacgccttcaacaaagtcgagggaaaccatgccttccacactggtgggacgcagctggtataacccattctgcccctctttgagagctgcggggcacccagaggcttttggagaaaaccggtttggggaagagttttggggtgctgctgggagccggtgtgctgagtaaacttagaaacgtcaaactcaactttgctttatgaaggaactcaaagttaactcaccctggtacgtccaccctctccctgcgcgcaggggacagcggcctctcctccccaccgcgcagagtcgcggccgccgccctcgacccaccggtgacagccctcaaagcgatggacccccgcacccgccctgccgccaacccccggaacgcgctccgggccgcacccaccttgatgccctgctgctgggtggtaagggttaacttggattcatccaggagcaaaacttcgcagtaaaattcttccggaacagcgcagaaacagcccatrtcggttgtggtcgtctccagccaggagagaaagctaccaccgaggcgcccagccgccccctccactcaagcgcgatgcattaatttattgtccgcgccgtggcgagggtgagasgagcagctcccggcggggtccggggaccggccgccgaaccgcccggcggggcgggagcgagaaaggcggaaaagcccgggagagtcagcgcccgggagccgccggggaagcgccggcggaactgggcgcggagggcggtggcgcgtccccgcgcatcctgcggctcgagctcctccgaaggcgggggcgcggggcccctyccgcagtcctggggacgacaaaagtctcctggcactgggggcaagagaccagaaaaaggagtgatgggaattcgaggctctccccggccttggaaaaccctggaagcgctgcacctccctcctgccgcacggatttgagcgcggccccgacgtcctggcgtccgatcggcctgcggagtcccccgcgggcgcgcacttccagccgcgaccccgccccgcagccccgggtcagatccgccgagtatgaagcgctcggcttttcttttgtgtgaggagcacccacgacgccccgaccatgggcgcaggggcagaggcgaaggtcgtcgctccgtccgctaccccgtcccccagccgcargcgccgaggagccggaagagaggcggaaagggcagcagkctccttacccagaccagcgaggggaggtcagctcgtcgcggggtgtggctcccgtccggggactcccgagctcattacgggtggccgtgtgtagccaagttcaagctctccctccgggaatgcctgccgcggcggcggaatacggcttcttcaggacattcagcaaagcggrgaggcggggacctgcgggcggaggagcgacgccccagctgggaacgcggcggacgggcgagcggggggtgygccctgggcgcgccaggccgcagaggctccggggaaagttctcttggccgcgcgagtggtggcgccccgggcgggagcagcccaggtgcatgtgggcccggtccaggcgtctgcaaaaagccctggaacgaagcggaccccccagtccagcgctggccgcggcaggggagccccttctgggcggggtatcagctgggggcggagggcggggcagagaccgtggtcccagcggcgaggtgccggcgagtccacgctgccaagccgcacactgcgcccaagccgcggggcagtccagcgctcgctgcgtccttcccccgagagacctggaggctgggtggggagaagaggacgcggtgctgctcggaccccacsgttcggcggtcccaatcccacgccctccgcgcggtcggccgcgtccaggactgaggggcacaatagctctgaagctgcagtgacccctggtgggtcccgatgtccgtgcacaggcagccgaggttgagctgcggacgacactgagccccgctgggcttcggagcaggtgcaatctgtgctctccagctgggaaccagcagcgagttaatgcgagtcgcagttaggggagacacgaggggaggtgtcacagaaaaaaaactctatattgagttttagagttagagctttggcatcagacgtagttttgagttgactattctactgcttgttagctgggtagccaaagctcaaaaaaaattgcttaaaacctaggacgttagyccttaaaacaaaaccaggcttccgtagcacagtagaaatgaaatgaacaattggcgacttttgatggagtttcctctcatagtgatttgccacaaaggaccttctgtaggaagcctcggccttccctgctattgtgaccccatccaaacacaggatcagcataaccgccaaagtgcaatataaatttctgaactttacctaggctatgaataaaactattttatcttctgaattttctgtgaaattgactcaggttttgaatttctgatcaaatttcgtgtccagctttgttttattgtcaaagtcttgcctgccttatgaggtgacaccttattatgctagattttagcatttctgcttgtagaggcttttcttttctgtaatacagtattcctgacaggagttaccaaatgtgattgaaagatggcttaacattttcattctttacctccatatccaaccgagacacttgaggctgcaaaaacaaaaggttcaagcaatcatctgttcccagtttttttgagttttgctctcacctgttttttggccctttgatttggtttttttgctttctgatttttggttttgctgttgtttgtttttgtttttttacctccagtggcagtgagaaggctgagggttttggatgggcagggattctgttcccagctcctcataaggtaagttacaaagccataaggtcccatacatatgacactctttcctgagtgaagcattttcttttccatttctttatcggagactggagaaaagaacatttaaaatctatttaacacaaaattagagattactagtgacaagaggattccacagagtttctaaggatagctttattgcatataatttacatacagttcactgcataatttttaagtgtacaatttgataagttttgacataagtgtgcacccatgaacccaccaccataatcaagctagtacacatattcatccctccctaaggtttcctcctgcactttgtcatctttcttttttttttttttttttttgagacagagtcgcgctctatcagagtgcagtggcgcgatctcggctcactacaacctccacctgccgggttggagcaattctcctgcctcagcctcccaagtagctgggactacaggagtgcgccaccatgccctgtatttttagtagagacaaggttccaccatgctggcgaggctggtctcaaactcctgacctcatgatccgcccgcctcagcctcccaaagtgctaggattacaggtgtgagccaccgcgcctggccactttgtcatcttacactcccattcctcagtacgactcacctcccaggcaaccatagatctgctttctgtcaccatcatttagctacattttctagagtttaataccaattgaatcatacagtgtgaactctcctttttgtctggtttgtttcactggacacaactgagatttaaccatgctgttgtgaatataaatagttcatttatttttattgttcaataatattccattgtatgtatataccacaatttgtttttccattcatttaggtggtttccagtttttgactattacaaataaagctgctatggggattgtattagtcagctcaggctgctataacaaaatacagcagactggatggcttaaacaacagacatttattttctcacagttctggagcctggaagttcaagactactgtgccatcatggtcagtttctggtgaggcaccttcctgacttgaaggaaggctccaggttactgtgtgctcacatgacatctttgtgtgctttcagagagaaggggaaagggaagaggaatagaaggagaagagagggagaaaaggagggtgagacagaaatattaaggagggttggggagagaaagacaccaagatagcaccctcgggtcgattattacaagaacattaatcctatggtatcagggctctactcttaggatctcatttaactttaattgccaccttatagaccctatctctaaacagtcacattgggttagggcttcaacatatgaattttgagggaacacaattcagcccatagaaaggatccatgtctttatatgtacatgtgcttttgtttcttttgtaatacagagtagaatgactggatcagaagatatacaactggcaaataaacacatggaaagatgatcaacatcattagtcactaggaaaatgcaaattaaaatcaccataagataccactagacacctaatagaatggctaccaagctaccatatcactaagtgtgggtgaggatgtggtgcaattttttttttctttttttgagatggagtctcgctctgtcacccaggctgcagtgcagtggcacaatttcagctcactgcaacctctgcctcccgggttcaagcgattcttctgcctcagcctcctgagcagctgggactacaggcgcgtgccaccacgcccagctaatttttgtgcttttagtagagacggggtttcaccatatcggccaggctggtctcgaactcctgacctcatgatccgccagcctcggcctcccaaagtgctgggattatggacgagagccactgcacccggccggatgtggagcaatttaaattctcataatcctggagtgcatgcaagatggtataaccactttggataagttttgtagtttcttaaaaagctgaacatagaccttccttaagattttggaggaagactttctctgcctatccagagaaacaaattaacaagatgctattcaaacactttttcccaggaaaatcatatagttttcaacatgtgcataacataatatgctctatttaaagctttgcatcaaaggctttgatctcttttcagtgatttttgttttaacattttgttaaatgttaaacattaacattttgtcatgataagcctaggtagacgagtcaaatggcaaataaattcagaataaacataattctacagaaatatgcagggcttccatctgtgaaagactgcaggaatcctcaatctggaagaagaaatttcattttacgtaaaacaggcccccaccccttgctgaaacatgtatttcaaaatgcaaactcagaattctttttaaagcaccatattctttttagtaagatgtatttaaacaatcttctgtgatctttttataatcttacatttttcaaacttaagaaagttaactgtaatacgtaaaagaaagaagcctgaatttcttgacaatagatacataaataatttaattactaacatacctgagagcaacgcagcagaatcaccagggcttgttaaaacactgatttctggccctaaccccagggtttctgatttagtagtcatggaatgggacctaagaatttgcatttctgacaagttcccaggtgatgctaatgctgcagattggcaagcggactttgagaatcactgctctggagattgtctttcaaaaaaaatagttgttcctcattacctgtgaataatttgggaagaaagtcattcttcactagtagcctccctgttattttgcctcattcatcaaattaatgcctgtcaaagagaaagtattgaagatcctgccaagtagataacatcagaaggagtagttgttaagggaaatatccctaatttggtctcatcatactactgcttagtttctttggacaccttacttatttttatttctaatatagtatgtgcccaggcacatccagtttttaagaccattctgcctcctgactcacttcacatataggtatgtcattaaccagctgtcttcttttctaagtactgaggccttagatcccatttattagaatacctcaaggctgttacctatgtttcaagggaaaccatctcccaagaattccctgcaatctaagctggttcttcatccttgtgatcttcaaataaatgttctttggggtttactgagaattcttattttgcacaggtattaatccttggtagtgaatgcattaatgtggtttgtatttagcaaaaatagtctggaaatttgaaacaccctagctcccctttcttttaaaaacacaaacgaactttcctcttgcactattatataagctgctgttttttttaacctcattgcttacctttaataactttccatgccagtgaatatatctccatttcatctttcctaggtgttctgttatatgcatacactataattaattaaacagctcaaatttggcacttagattgttataaaaatataaacatgctgtagtaaacatttttacatgtatttgtctattatttgataaagataaattcctagatatggaacttgtgaatcaaactatatgcatatttaatttatttattgtcattatgacagactgcaatccagaaagcctgaatcaatttacagttccaccaacaacgtatcaaaatacccacttcactctactcatgccaatctttggaatctctttcaatcaaattggcaaaagtcattttgttattttaaaaactagacaaagtctcctaaaagaacagcttatataataatgcaaagaggaaagtccatttttgtttgtttttaaaagaaagtttggagcaaagctgagtgactcatgcctgtaatcccagcactttgggaggccgaggcaagaggattgcttgagccttggaggcagaggttgcagtgagccaagatcgtgccactgcactccagcctgtgcaaaagaatgacaccctatctcaaaaaaaattgattttttacaatgagtatggaataatttaaaatgaaaataaattctcatattaaaccaaagaatctgtcaaattaccggttaatgaaattggccttcatttaaaattggactccttttctttttttttttattcttttttttttaattatactttaagttttagggtacatgtgcacgacgtgcaggttagttacatatgtatacatgtgccatgttggtgtgctgcacccagtaactcgtcatttagcattaggtatctctcctaatgctatccctcccccctccccccaccccacaacaggccccagtgtgtgatgttccccttcctgtgtccatgtgttctcattgttcaattcccaactatgagtgagaacatgcggtgtttggttttttgtccttgcgatcgtttgctgagaatgatggtttccagcttcatccatgtccctacaaatgacatgaactcatcattttttatggctgcatagtattccatggtgtatatgtgccacattttcttaatccagtctatcattgttggacatgtgggttggttccaagtccttcctattgtgaatagtgccgcaataaacatacacatgcatgtgtctttatagtagcgtgatttatgatcctttgggtatatacccagtaatgggatggctgggtcaaatgatatttctagttctagatccctgaggaatcgccacactgacttccacaatggttgaactagtttacagtctcaccaacagtgtaaacgtgttcctgtttctccacatcctctgcagcacctgttgtttcctgactttttaatgattgccattctaactggtgtgagatggtatctcattgtggttttgatttgcatttctctgatggccagtgatgatgggcatttttttatgtgttttttgtctgcataaatgtcttcttctgagaagtgtctgttcatatcctcgcccacttgttgatggggttgtttgttttttccttgtaaatttgtttgagttcattgtagattctggatgttagccctttgtcagatgagtagattgcaaaaattttctcccattctgtaggttgcctgttcactctgatggtagtttcttttgctgtgcagaagctcttaagtttaattagatcccctttgttagttttggcttttgttgccattgtttttggtgttttagacatgaagtctttgcccatgcctatgtcctgaatggtattgcctaggttttcttctagggttttcatggttttaggtctaacatttaagtctttaatccatcttgaattaatttttgtataaggtataaggaagggatccagtttcagctttctacatgtggctagccagttttcccagcaccatttattaaatagggaatcctttccccatttcttgtttttgtcaggtttgtcaaaaatcagatagttgtagacacggggcattatttctga

SEQ ID NO: 93595 - DNA, 56049 bp, Homo sapiens
  misc_feature (1)...(56049): n = A,T,C or G
gaagaggagtgggatcagcgacctacttaaagaagtagtctgtctgaaggctctacttccacagcacctcataagataagacccactggcttgcttaaagaagtagtctggctatgttttagtagagcatctgtgctgtgctgagggatcccttccacccctggtcagctcagactctccaaagcctaaaggctggatcagctaagttgcccaaacagcaaagatggtggcccacccctccctctaggagcactgacgaaggggggaattcaaatctctgtcagctgcaggatatgggtggaggtggctagaggccccatttgggaggtcctgcccagtgaagaagaatggaatcaggcacctgctcaaagaagtctggccatgttttggtagagcaactgtgctgtggcgcaggatcctttatgcccccagtcagcttggactctccaaagcctgaagggtggaatggttaaggtgcccaaacagcaaagatggtggcccacccttccccctaggaagctccttcttagggaagggcaatgccactaccagtggctggctggaattccaagccagtgggtcttatcttgtgaggtgccacggaagtagagccttcaggctgtcactgctcagccccctggattcagcctctttcctgggggtatgtatgggggtctaacctcctattttgctggagctgcagctacttttgccagaaatccccagtatctaaggttccagggtttccacgcatgcctgagcagctgctctgccaagactccacatagctctgtgtgtcagactgaaggccctagcggagtgagttcacaaggatatctcctgacccaagggttgcaaaggtccatgggataagcatagtttttcactgtggcacattcactcactgcttacccaggcagggaagttcccctggctctgtgtggctcctgggtgcatcattgttctgtcttgcttttcttcattcttcatgggtcaagttgtttccttgattagccccaatgtgagtacctgaaggtttcagttgaaggtgtatttactcaccccttccattcctctccttgagagccatgcatgctagctgcttctagtcagccatcttggccactccccccatatacaaatgttaactcaaaatggatcacagaccaaaatttaaaacctaaaagtaaaaaactcctaaaacaaaatataggagaaactctttgtgaccttaggttaagcaaagatttaataggtaagataccaaaatcccaatccacaaaagaaaatatcaataaattgggacttcatcaaaataaaattttctgttctttgaatgataatgttaagagaatgaaaaggcaagcaacagaggaggaaaaaatatttgcatgtcatatatatgataatggacttgtattcataataaagaactctcgaaattgaataattaaaaaaagacagtcccaaaaatctttttgacacaacaatctcattaaactgatattggttttttattacttttgtgatagaaaccaaagaaaactccataattgtgtcaactcctgttaagggcaaagagaggaatatcagccatgggagaataaagaatcagctgctgagcttctatttgtcttagataactagaagggacattttagctacacagggtgatggaagatgaaaaacagttgatagttaataatctattccaccccacacattttaagtgaaatgctaaagttttggccaggcccggtggctcatgcctgtaatcccagcattttgggaggccaaggcaggtggatcacttgaggacaggagttcgagaccaccctggccaacatgatgaaaccccatctctactaaaaatacaaaaattagctgggctaatcccagctactcgggaggctgaggcaggagaattgcttgaacccgggaggcagaggttgaagtgagccgggatcgcaccactgcactccagcctgggtgacagagtgagactccaactcaaaaaaaaaaaaaaaaaaagaaaagagaaagaaatgctgaagttttgactgacctctgatgagtatgaactgtgaaaaagatagtatggagccagctttgccttgacagcctttgccttgggcaatgaaataaggctgactctttgtggaattaaatatatgtttcattaagataccatattgaaaagatacttatatcatttttattcctaaattttcacagttgattatctataataaaagagtaatagtgactgtatctgaagaaagcagtatttcattttggtttaactctaagcagagcagtatattatgcagataaaagttaaagagggctgggcatggtggctcacgcctgtaatcccaacacttagggaggcagaggcgggtgaatcacctgaggccaggagttcgagaccaacctggccaacatggtgaaaccccgtctctactcaaaatataaaaattagccaggtgtggtggcacatgcctctaattccagctactcgtgaggctgaggcaggagaatggcttaaacctgggaggcagaggttgcagtgagccgagattgtgccactgcactctagcctgggtgacagagcaagaccctgtctcaaaaaaaaaaaaaaagaaaaagttaaagtggctttgaactgtcgttcagggcttgtcaaatgaagaacaatacaatgtattcccattatattgctttttatttttattgtggtataatatcttgtggcctgtaatgtttctgacttaaattttaggttaggtggagaaattttatatcaatgactgtgtataaattatatcattcatctcttttttttttttttttgagacagagtcttgctctgtcgccgaggctggagtgcaatggcacaatctcggctcatttcaacctctccctcccaggttcaagcaattctcctgcctcagcctcccgagtagctgggactacaggcacatgccaccacgcctggctaatgtttgtgtctttagtagagatggggtttcaccatgttggccaggctggtctcaaactcctgacctcaggtgatctggccgcctcggcctcccaaagtactgggattacaggcttgagccactgcgcccagccatcattcatctttaatgaatgcatgcacttatccagaaagtattgagtacctaatatatactgggcagtaagatacaaaaatgatcaaggccaattttcacatcaaagagctatcagactgattaagaggatgaacatttaaaaagatagtgacaatgcagtataatacatgctgtattagagacacataaaagattctgtgtagctgaacagagagaagtttaattctccctggggatgacttaattgggcagccctgaaatttagaatttacccttcaggtgatggatggctattgaaagctttaagtatggattatgataggaattaatttatgctttagggagataattctacatggcagtgctgaaggtggatttgagagtggcaagattaacagcacagacacttattaaaaatatattattgtagtctggtgacaaatgattacatcctaaattaagacagccacattgaagattaagtgcagatgaatgtaaaaggtatattccacaggattttatcacagaacagatgtggggatcatgactacactttttcccaacagagaacttacacaagattacatgatccttattcccaactcaatcaaaaaggttggtgttaatggcatccggtcttgcaaaataattttcaaatctcatcacaatggaaaaagaaaactctggaagcttactatataacattttgcaataatatgcttcctaaacaaatagctaagccttggttttctttttgaattttctgacaaaatgttattttaattgaaggctttaaagttcgatatttcataatcagcagagtaaacagataaccgacagaatgggagaaaatatttgcacactaagcatccagcaaaggactagtatccagaatctacaagtaactcaaatcaccaaaaaaaatataataatcacattagaaagtgggcaaaggacatgaatagacatttctctaaagaagatatgcaaggccaggcacggtagctcactcctgtaatcccaggacgctgaggcaggagaactggttgaacccggagatggaggttgcagtgagcggagatcgcgccactgcactccagcctggggacagtgtgagattctgtctcaaaaaaaagaaaagaaaaagatatacaaatggccaataaacatatgaaaagatgctcaacatcactaatcatcagggatatgcaaattaaaaccataatgaggtatcaccttaccccagccaggatggccattatttaaaaagtcaaaaaacagtagtttttggcatggatgtggagagaagggaacccttatgcactactagtaggaatgtaaattagtacaacctctatggaaaccatcatggagattccttaaagagctgaaagtagagctattcaatccagcaatcacactactgggtatctacccaaaggaaaataagtcacatcaaaaagatacctgcacttgcatgtttattccaccataatttgcaattacaaagatgtggaataaacctaagtgcccatcaattaatcagtggataaagaaaatgtggcttatatacaccatggaatactatcagccattaaaaggaatgaaataatgcattttgcagcaacttggatagagctggagaccactattctaagtgacttaacacaggattggaaaaccaaaaaccatatgttctcacttataagtaggagctaagatatgaatatgcaaagatatacagagtgatataataaacttttgaggttcaaaagtgggaagatgagagagggcctagggctaaaaaactacacatcaggtacaatgtacatgactcaggtgatggatgcactaaaatctcagaattcactactatataattcttccaagtgacaaaataccacttgtactccaaaagctattgaaataaaaaatataaactaaaactactgaaaatgtaatttaaaatactagcacacatgtagttgcagagatttgtttttaattgatctctatcccttgttattctcattggtctcccaggaagaataaactgttgcacaagaaaaataaataaacaaaaagaaaatttggtatttcaccacagtaacaggaataactcatttgttcagaagcacacaaaccctgttcttctgtggtaatagataacccaacagatttgggaaagttcctttcaattagttagacattttaacctactgttagaagattcactcttctatatctacattctcacctttgtaaagtactgtcaaataattatcttgccttcacaagttggttgaataggtatgttagttaactaattttgcagcaagaaattttcataactgaaggatatccagtatcttataaataaaactatgacctagtttatatactgtaatttcttaccaaaacttaagaactccttattgaattcttacttaattcatggaaaggaattgatatggctgacaggccaacctattttaaaggtacttatttggctttacattcccacatataagcaagtgaaggtttcatgtgaatcagtattagtactgcaaagcctcaagaatgagacattctgttccgcagttatgcttgttattggaaccattattttttttttaaaaaaaagatcatttttataaacaacaataactgaagtgttcatacatgccagagggactactggtttcctttcttcctgccctccctttcttcttattgtcaggagtccctcaacgattgaagttgttttagctccaaattgaattttttgaaggccttaaaccttgattaaaaataaatttaccaaaacattgtcaaaagttactttaaaaagtattatattgatagtaaatctactaaacttatttatacaagagaatgtctctggaaatacacaagtggtgagagaaggggaggggaggagaaggcctctgaggtaaactgtgaagggaagttgactgtgggtaaggggcagagaggcattcattgaactgctatttcttgaggtcactctgggcgaagggcagtgcctggggtcctacttgccggcccaggcacaggcacggagtcagaacatcctgccccgccccttccccccaacctttcaccttcctttccagccccaccccgctcccatggccccggaccttggcaacgctgcgcagcgcgtcagtcaacgtcacagggcgtgggggtggctagaggccccagtggcctctgatctcacagagcagatcagcgcgggtgtccagcgccccgatgtgggcagtcggggctagccgctggggcaggctgcccccagcaagaggagcggccgctccaaaccacaaaatctccaacgccggacagcgcggcctcggtcaccatacgctacaggcatcctgcaggccatcgcgtgtggtggagcgtccggcgcttatcgtggtcagtccccctctacgccaccgtccgattcccccgacgcccccgccgaccccggagcttgccctcagccccttcatctgccgaggcatacccttgctgcccatcccacccagggatcgccacctctgccctctaycaggctccgggcccggtgccgaggactggccgccaagggttgcggactatggccctaaagctcatccacaaggagttcctcgaactggcccgcgacccccagccccactgctcagcagggccagtgtgggacgatatgctccactggcaggccaccataacgaggcccaacgacagctcctacctgggaggggtcttcttcctaaagtttccctccgactacctattcaaaccacccaagatcaaatttaccaacggaatttaccatcaacgttaacggaaatacgcgacaggagggagtatggcagaatagctaaagactggactcagtagtgtaccatgtaatttcaaaatataattccatcgccttaataataaagatgcagaaagtggcagttcacttaattggttatgttttgattactttctatgaagggtagtctcctcattcttctgggcacgccttacgcgcttttcttagcaggcaatgagtggaggccatagaagtggtgaggttctgggggttggggacaggggcctgcacggttggtggagggtgtggccgagtgggaagtgagggtgtgtggggagtgtaagacaaacaggtcagttttcatttagttttgacaaaaagatttatttgttgatttaggattgtgaaacaaagcaagaacaagggggtggtggctttaagattgagaacagttccactgactagtgggaattttatttatttatgtatttatttatttgagactggagtctcgccctgtagcccaggctggagtgcaatggcatgatcttggctcactgcaacctccacctcccgggatcaaacgattctcctgcctcagcctcccgagtagctgggattacaggcgtgagccaccaggccctgctaatttttgtgtttttagtagagacggggtttcaccatgttgaccaggctggtgttgaactcctgacctcgtgatccgcctgcctcagcctcccaaagtgctgggattacaggagtgagccacgaccctggctgggaaagtttttgatgtgcagtctgttttgaactgacatcagttgggaaaagcaagatgaagattaataaagctcgtattcattttattctgaagaacctgtgtcttaagttgttttgattttgaccatgaataatattacccatcctctactttgagattcagatttaactggcccaaaatgaaatggattagttgttacaatataaaatgtattttgttcccagtttccgacagcccccacaccttcatcttccacctttttgcccactctgcctctctcccacgcccagagttgggttgtttgtgacttctcaggacatacctactagctcttacttgtcatgttttctcgagaaccatgtaaggtctgagattctacccagcctgcaagctacaagttagcttgtcacagtttggtggaggctggcaaaatgacagagagtcctgggttagaggcaggagtcatagcacagcaggcagcatgagcttcactgacatcagtttcccttgctccctcaagtcccaaggaggagaggtagatcagaccaggtgagtggtgcacacacagtgggtttgggtcacagttgagagaacttaagtttaggaacccccagtctttgaaaggggactgctagcaaacctgcccaccctttgcctagagagagaggttcttattaagctcatcaggaaacaggcaaatctaccctctcccctggagggacctctaacttccaaggctgttgtatacaagcatatgtcaataaaactatttgaaaagaaaaaaaaatactttcaatatgaaactgagttttcaataatccccttttattcacttaaacgcaatttttacattttttagtttttgtttacatttttacaaggaaaatcaactattaaagattagtatatctgtaagaaaatttatatttttctaaatataaaaatatatatatttgaaaggacagtccaggacaaatgttgtcacaggatgactagaattatcatgaagaattgcaccctgacagttttaactggactatctggttgtacaggtaaaaattaattttatgaaaatacttgtgtgtaaggaaaagcccaattcctccattagaacttgtacattcagggatgaccaatcagtgtaataagcagattactaccatcatcacatttaatacgttttgtaatttaatcaattatctaatcttagtaggctaaaaaagttttaattttctgaaggtaagtttaatccttaacacttcaaataaaagakaacaaaaactactcagcaggaaaaatatatgcttagtgttttactttcatgcacgtttaaaataatttatttggatgctaacaatgttattgacattacattttcaatacatgccaaattttctcttacctggagcacagaagaaaaagagacatagagaaacttcttcaggcctggcacagttgctcatgcctctaatcccagcacattgggaggccaaggagggcagattgcttgagtttaggagttcgagaccagttttggcaatatggcaaaaccccatctcaacaaaaacaaaattaaaaaaaaaaaaaagccagacataatggtgcacacctgtagtctcagctacttaggagactgaggtgggaggatcccttgagcccggggaggggggctgggtgttgaggctgtggcgagctgtgactgagccactgcaattcggcctgggtgtcagagtaagaccgtgtctcaaaaaaaaaaaaaaagtctttgcatttaaatatgttaatttgtaaattacactaaatctcacttgagaagactttataaactcttttttgaagtgtaaaagttaactttagtatattacctatgatctactcttgttaaaggggagatggagggatgaaggcaatactgtctaataaaactttctgcaatggcggaaacatcctatatctacacaatccaaatacagtagccgctagccatgcgtggctattgaacatctgaaacagaaagagagggagaattttgtttttacctagtttttagtaaaagctttattgcatggtttgcaaaccactttttaacctttgtattttagattttacatgcctccaagagatctttacaaaatgtttacattatgatatgtaactataaaaaaaagaataaaatttctgtccatgtcactagagatcattgatttagtagagagctatgctatgaatatgtttgatatttgtagattgttgaaacattaccacttaagaaatttctaatcaagaaattcaatattatagtctgttcctaagaagcaaatagaaacttttatggtagagattatgtatgtaggtcatcaatagtgatagctggaattttcagaatattaatacagtgatctcacactattatgagcttttcctattatggtccaattcacagttactaattatattgcctttattattttgcttcaaatatattttcaccatcaaaatcaaacccacataatagtaaatatttggggataaacaataaaatctaagcaggacattatgagacagtcaaaatggccatagtaggatggcaattctatttctgattagaatatttaaggttcttttttattcaaaatggttactcccatcttgctctgttagtccctacctaccagttcctcgatttcagtgaaatcaattatgaaatgttaaaatttgtatttggattagggagggaaagatgattgtattctattgtcagtattttcagaagcagaataactgagctgatttggggaaaaggttctatcctaggtatcaaaaaacatagcttttgcctcgtaaaactgctaacacataccctacacgtaaaattgagtactttcagcttactaaatgtttggcatgatttttaatatcgtgttttatgtgtattggggtaagatattatgactttgtcttgcctctatagataccatcagggcaagtctaattcagcttgaaagttaggccatgaacaaggataatctggcatatattattagcatttataaaaatatttagctaaaaatatttagctttctcatgttaggtatatgaaaagcatagcaaatatccaaccatccatggtacagctttctttcatctcatgatgagaaaaaagattcttatataatttatactggcctcaaatcatgatcttcacttgttttgggtttatactgtcaacaaaaagagtcaaactctgtagaatatttgaagagatttgttctgagccaaatatgagtgaccatggcccgtgacacagcccttaggaagctggtcctgagaacatgtgtcccaggtggtcaaggtgcagcttggtttcatacatttttatagagccatgagatatcaatcaaatacatttaagaaacacattggtttggttcagaaaggtgggacaattcaaagtgggggcttccaggcaataggtaaatttaaacattttctggttgacaatttgtccagtttgtctaaagacctgggatcaatagaaaggaaatgttcctgataaaataaaacattgtggagaccaaggttcttttaaaattttacagtggctgcccttagagacaatagatgacaaatgtttcctattccaatttttaatggtggtagactcttgcttaatctctttaggattggaagggcctggaagaaaaagatctagctatgttaatagagattgtttacagatgcagattttccaccgcaaaggacagctttgcagggccatttcaagatatggcaaagaaacatgttttgaggtaaaatattttgactttcttatttgtcacataatgttatgccagagtcagactggaaagtaagtcacaacatatagggttaaataaaacccatctgatgagaatttgtggttttcagggcatgactctccagacccctcagataggaatttgggcatgataaaaaaaaaaaaaaaatcagagcttagtcctcagtgcccccccttggacaaatgttcaggccaacaaacagcagcaggtcccacagtgctaggaaggctcattcctagagttgtctggtttggccatctggcaaggtttcctggcactaggaaggctcgttcctagagctctctgatttgatggtaatacttttaaatattaagctgggtgtggtggcttacacctgtaatcccagtactttgggaggccaaggcatgtggatcacaagttcaggagttcaagaccagcctggccaagacagtgaaaccccgtctctaaaaaaaaaaaaaaaaaaaaaaaagacaaaaaaattagcagagcgtggtggcatgcaccggtaatcccagctactcgggaggctgaggcaggagaatcacttgaacctgggaggcggaggttgcagtgagccgagatcgtgccactgcactccagcctgggcaacagattgagactctgtatgaaaaaatagataagtaaataaataaataaataaatattagctatttggatcacgggggaggacatggtctgaaccaatataatagccatttgtttaaggggtgagatggagtcaggcctagggtttagtaaaaayaaacaaaaaaaattcccgggccagatgtattttgcgagctatcatgatccgggtccttaattgtaccttttccttttgctgtatctggcataacatttacaagagttgtataatgctaatatagtaagaaatataataaagatagtgaagattgagtgtccaaggttataggtagaatcagagggcagtaaacaacccaatctgccagaaaatcccctgtatgcattattatattcttggatcaaactcacaatgtgttcaacccccttgttaagggttatttgaactttatgataaatcttatttgaggatagtaggagtgacattaaatcagaatccaataaatttagtgtctcttctagccaatttatctctataggtataacaacctgaggagggtattaatcaattgcaagaaacacccggtcctcagtgtctaaattgttatagacttgctaacagtagaaaaatctatttttcccaccacttttgtattgcaccatatactggtatttgggagagaaaagaaggctttgtcacaggagaagtcattctacagtgtcatttctttttgtccctcggcaggactccctatggctgagagccttaagagtcaaaagacttatagccaattaattgttctaggccagctaggaatggatgtggacaggcatttgttacttcttaaaattattattttaagtaaaaaagccaacaacaaaaccaaaaggcaaagttacaagacacttatttttaacttctatgtgttgaactactataagcttggtttttgttacagacttttagcaattagctatataaaacattagcattgttctgaaaaataattaaacatatctatatctatagctatatagatatagatatatttatcttcacaactcataattgggagtgttatacccaggaggctttgttacaaggtatttttatccggttattttactagttagtaaatatttccttctaattctatagtaagcagaaaatttttatggtcgtggtggatgcaaaagtgacacatgatagtttagaaggcaattaaacttgttttaccagatatttaggcatttttgtacccccttttagatttggagggtttgaccttgacttagtccctcaaaactgacccttacaatattatgcacccatctcttccacgatagtccctgggcctacagcgaggcagcttgtaaggttttagtagcagagcattagcagtgaaacagatctgggcccagggggatgccaaatgagggagattcatatctctggtctttagaataccatggctttggtttccttggaagtaaaacaaggagagatagataacatttatagtttgacaattataagagtcattgaggcctggcacctgtaatcccagcactttgggaggccgaggcgggtggatcccctgaggtcaggagttctggaccagcctggccaacatggtgaagccccgtctctactaaaaatacaaaaattagccggaagtggtggcaggcgcctgtaatcccagttactcaggggggccgaggcaggagaattgcttgaacctggaaggtggaggttgcagtgagccgagatcctaccatcacactccagcctggaggacaagagcgaggcttcatctcaaaaaaaaaaaaaaaaaagaataattgctatgtgagaacagaaaaggaaacctattcaattagggcaccaaataaaaatatgaagaaaaattataacgatttaatctgtactcgaaaaagttagggctgaaatccagtattaagtgttacgtttttcccttgaaagtatttttttagctgcctttatttagtaaagataaaattatagcaaggccaatttgtgtgcaaggtaagttttaggcttattatgcttgcctgattatttgcataaaatacattgagaattgattgaccatatagactcgttttaagttggctttgctggaactttgcttaaaaagaggctattttagtttaagtcttggtaaaataaccagtgtctccaattgttttttttagatagagtctcgcactgtcgcccaggctggagtgcagtggtgccatatcggctgactgcaacctccatctcccgggttcaagagattctcctgcctcagcctccygaatagctgggattacaggcgcatgccaccacgccctgctaattttttgtatttttagtagagacagggtttcactgtgttagccaggatggtctcgatctcctgacctcgtgatctgcccgcctcggcctcccaaagtgctgggattacaggcgtgagccacgtgctcagcctgtgtttgtggttttttttgttttttgcttgtttgtttttactattattgaactaatgcagacaactataatgtcataaaatttcaatctaaattttggagagctcagaaaggtaaattttcttacaaagacatactgtacccaaataacttaaaagaaaaagattctcttgagctttctttaaccagagtagcagcttttaaaacaagatgtttgtatacctttgaaatgccatttacaaaccaaacagctcctgagagctattaggcactgtagaatttagcagctcctcacaattagtcctaggaaagaggctctctgcttattaggtagcaagattttatataaaccatttttattctatcatggcactcttttgggaaacattattttcattagcatagggatagcttcagttaatatttcatagcaaggcagtaaatgccccattaagtagaaattctccagttcagtcattgtcattgaaaggtactcacagtttttgccaacagccctgataaaagctccacataaagggctatgcagtggaggatttgtcccaactagcactccagctcttaccctatattctgtgcacttaggcamcttactagtttccatttagcatgtgcaattaaacatttcttaaaagaacagatttatatgcctttagtttacactgctagatggggaaacatctaaccgtgtaagtttgatatagtatccatttttataagactttcagtaaaggggttacaactaccttatataaagcttgtttaaacattttaattttataattctatgagcctgtatgtttttatgttccggtctcagtaaccctttttttacccccagaccattttacattttctggtgaaaaggatttcggttcccacagggagttgcatttgtaagactgatgagggacagcatatttgataaggcttcttaaacagtcctattattctgtgggaggagctcccatgtaaaatgggctcccttaaccccaaaatttaccatgacctgggtaataggcacatttggtgggaagatatcccacttatcataaagttagtccaacatggcttgcatatgaagcatatcaactgcttaatctggggtgcttcacttagtattttatagggagagttgggcagtccccttctcaaggcaaacagaccttacaatggcattatctggcccactaggctgatcactttcttaggaataaacccctgttaatttggaacaaatatactcagtgatggttaagtgatgagctgtgggtcctgcattaatctaaacaaggtcttatattctgtagcatttaaaattaagaattttgttcttaaagtggttatttttacaatccactatagtaaagattttttttaaagaagctggatgataccaatctacaagatggaacaattcctttacattacatacttgggttttaaatagttactttgttttaccctttccccatatggactattgtcttggtaaccacagggctcagagttttgttgccctggcttttttttttttatttattttgttttatctgtataatttccttcattataaagcaactcttagtttttttgttttttttttttttgagacgaagtctcgctctgttgcccaggctggagtgcaatggtatgatctcagctcactgcaacctccacctggttcaagcaattcccctgcctcagcctcccaagtagctgggattacaggcgcatgccaccacgtccagctaacttttttgtatttttagtggagatggggtttcaccatgctggccaaactggtcttgacctcctgacctcaggcaatccgcccaactcggcctcccaaagtactgggattacaggtgtgagccaccatgcccggcctaactcttagtttcttaactgaaacaaaactaactttttttgaaaattgacatccttgtatttataaaatttttaccaaaggcatattttatgcttctactattttaactttttagtaacccaaatttccagtgggaaaaaatcctgagggtttaatatgactcaaagacttttaaattacaggagagttttaggattaaatttaccaaattaattttaccaaagattaccaaggttatgtgaattaaaaggcacctgagctaacttctaccaatatgataagcacttacttttttaaaagttacttgattgtaagggaggagaccacccctcatattgtcttatgcccaatttctgcctccaaagaaagaagaagtaaaaactaaaaggtagaaatgaaatccacaggcagacagcccggcaccgcaccctgggcctggttaaagatccacccctgacttaatcggttatgttatctatagattacagacattatatagaaaggcactgtgaaaatctccatcctgttctgttctgttctaattactggtgcatgcagcccccagtcatgtacccctgcttgctcaatcaatcatgaccctctcacacggactcccttagagttgtgagcccttaaaagggacaggaattgctcactcggggagctcggttgttggagacgtgagtcttgccgaagctcccgggcaaataaagcacttccttctttaactcggtgtctgaggggttttgtctgtggcttgtcctgctgcatttcttggttccctgaccaggaagtgaggtgattaatggaaggtcgaggcagcctcttaggcagcttaggcctgccctgtggagcatcgctgcaggggccagcttgagcaacacggatcctgagagtgctcccaggtaggcaattgccccggtggaacgcctcgccacagcagcgcgtggcaggcccccgtggaggatcaacgcagtggctgaacaccgggaaggaactggcacttggagtccagacatctgaaacttggtaagactagtctttggaacctgcccactccatttgagtggaagcgtggcctgatcacccatggtgtgcctgtaccggcactttggtttttgtttttgacttgacttggtttgcttgatactttggttttggttttgacctggcttggatttctggatactctgattttggttttggtttttgtttgatgtaaactgtaaaagtgtgtgtgtgcccttctcacccgttctttgttttgtggcatgcrtgtggttgtgagcctggtgttttgtctcgaagaagcatgggtcaggcacaaagtaagcccactccactaggaactatgttgaaaaatttcaagaaaggatttaagggagattatgatgttactatgacaccaggaaaatttagaactttgtgtgaaatagactggccggcattagaggtgggttggccatcagaaggaaggctggacaggtcccttgtttcaaaggtatggcacaaggtaacccataagccagggtacccagaccagttcccatacatagacacttggttacagctagttttagamcccccacacacacagtggttgagagaacagcagcatcagcggctggcagaggcaaagaaagaccagcagagagacagagagaggaaagagacagagagaaaaggaggcaaagacagagaggaaaagacagagaggaagagacagagagacaaagagggagtcaagaagagagagagagagaggcagagagagaggaagagacagaggcaaaaggaaagtcagagagagacagaaagtcaaagagagaaagaaagagagaaatatacaagtagttaagaaaaaaaacagtgtaccctattcctttaaaagccaaggtaaatttaaaacctataattgataattagaggtattctccataaccctgtaacactctaataccactttgttgtcagtgtaaacaagggcatatccgaaagcactgagaccttcctatcaaaaatctttaacccagtaacctgcggatggcccagatgcattcaatctgtagcgccaacagctttgctaacagaagaaagtaaaaaaaataacttttagaggaaacctcattgtgagcacacctcaccagttcagaagtatcctaaaaaagaaaagaaaagaaaagaaaaggatgatttaacattaaccactgaaaattcttttaacccagcagttttcctaacaggggatctaaatcttaattaccatacaaaggtccgaccagacctaggaggaactcacttcaggacaggatgatctatggttcctcccgggtaattgaagggggaaaaaaagccatctataccaattctaagttaatttggactaaacaagttcttattaatagcaaaggataattgaaatcccaaacttacaagttttcaacaaaagtaaagtttgctaaaagttaacagtgtaacaagtattatagtaacttctaatcttgtggccttagacagcctagtccacagacataaaggaagttcgctttggaaaagaatggttatcatcttcgaaaaaaaaagagggggaagagggggtagaatttatgtaaaaagagtgttatatggtaaattcttgtcctgaaataaattaactggttgtttaaagaaagaaatgtttgtaataagtcagaaagttaaggtatgtcgaagaattgtctgcgaaagtcgtgaaagagaaaaaagttataaaaaaagtatgcaagaaatgttgtataatttaaaagtaataaggcctcctgagtaatattgaagaaacagtttatgtgcaaagtgtataaggaaagtaaaatatacctttggtaaaaggattataaggaggcataagaatgtggatttttatctacattaaaaggttaaaaaatattgttttgaaggtttaagcaagttttaaaatgttaattataaaggaaattctgtgtgtaaacatattagctaaagttaaagcagtatcatccagtttttctgtgaactggacatgaaagtaaaaacacaacaggtttttcttaaagcactaacctgctctttaaaaaagattataaaaggttaaaaagagtctataaaaatcttaccttatggtccaacattaaaaattgaataaatatgtatacaaatttttttaaaactaagtttaacattaatagcacagtaatataaaggtaaaatttagcttatctggtataaaaatcatacaagaagcattgtcaaatataaaatggtgtttggcttctttggtccaaaaactaataaaaaataggtgctaaaggaaatttctcagtagaaaggcaccaaggactataaagtccactgctgatgctcccacacttaaaacagaaagtcaatttcttaaaaattatatacttggtttatcttccactttcctttccctcaaaactaaaagtcctttagcacgtgtaccacctctagaatttccagtaaaccagcaccagcctgaagatcatgttctcatcagagggtgaaaagaaaggaaactcgagccagcctaggaaggaccctaccttgtgctactaaagagactgctgtttgtacagtgaaaaaaggatagactcatcacaaccgagtcaagaaagcaccatcccctccagtgtcctgggccatagtcccaggggaaaaccgtaccaaactaaagctaagaaaaatttaactctttcatctattctattactctttcttctctcctcgctctattgctgaccatctagttattaacataatgaagtcaattttgcctcaaactattgcatttaatgcttgcctgttacaccctgtggggacttgccaagtcaaagacagctctctacttcaaaaaagtacctctgtccctcctgactctcctcagactgggcattagtaaattaggaccatttaatctggggaaattttgataaagactccagtgtcaaccaggagtgagtcttgccccccaatgtagagcttttatgccatagttggtccaacgttctgtggagcactaaagagcaaggttggactgccctaactggtttttataatttcctaaaatcatacattcattttactggaggatcatagaagttaaagacttaaaacaaactttgacaataaagagaagatgccaagtttcaaatgcctggttggaatggatcaaatattccatccacacattaaacaaaaggagctgttatgcttgtgcgcacagcaggctagaggcctagattgtcccctttccrctagggtggtcctccagttgaccaggcgtgggctgcgtggtagctcttttccaggattctacagcctggagtaacaagtcatgccaagctctctctctgctatatcccgaagtccagcatcctgtgggtcagcccccaagggccatccagcttccgtctcccaacactaagttcacttcatgtctctcatgacagggaggaaacttagmgttccttggagacctgaggtcacgcagtgagcttaagaattttctagagcttatcaatcagtcagcccctgttcatccccgagtggatgtgtggtggtattgtggtggacctttactggrcactctgctgaataactggagtggcacttatactttagtccaattggctatctctttyaccctggcatttcatcaaccagagggaggaaaaataagacatcataaagcgagagaagccccttatggatcttttgactctcacgtccacttagacacaattggagtcccatggagaataccagatcaatttaaagcttgaaatcaaatagcagcaggattttagtcaatattttggtgggtgacagttaataaaaatatagactggataatacatctattacaaccaacagcaacaagcttttcatgagttaaaagaaaaactcatgttggccccagccctggggctacccgacctgacaaaaccctttacaccctatgtgtcagaaagaaagaaaatgacagttggagttttaacccagactgtggggccctggccaaggccagtggcctatctctcaaaacaactagatggggtttccaaagcctggcccccatgtctaagggccctggcagcaaaggccctgttagcacaagaagcagataaactaacccttgggcaagacctgaatataaaggcctcctatgctgtggtaatttcaatgattaccaaaggacatcattggttaacaaatgctagattaaccaagtaccaaagcttgctatgtgaaaatccctgcataaccattgaagtttgcaacaccctaaaccctgccaccttgctgctggtatcagagagtccagttgaacataactgtgtagaggtgttggactcagtttattctagcaggcccaacctccgagaccatcgttgaactcagtagactgtgagcagtacatggacgggagcagcttcgccaacctctgcaaagtgactctgaagaagacaacaagccctgctccagtcacacccagaagctgattggtccacgcatggccaaagcatgagaaaactcatcaygggactcattttccttaaaatttgaactttttcagtaaggacttcaactgaccttcttcagactgaggactattcccagtgtatacatcaagtcactgaggtgggacaaaasgttgctatagtcctattattttatggttattataagtgtactggaactctaaaaaaaacttgtttgtataattttattctatacaaggtatgtagcccaggaaatgaccaacctgatgtgtgttatggcctatctgagcctcccatgaccacagtttttaaaataagattaaggactgaggactgctgggrgctcataaatgatacgtgtaaagtgttagccaaaacagaagaaaaaggggtgcccaaaccagtcatcttgaaatttgatgcctgtgctgttattaatagtaataagttagaaataggatatggttttcttaattaaaaaagaggctatatggcagaaaataagtacatttgtcatgaattaggactgtgtggaaataaatgtggatactggtcttgtgtcatttaggctacttggataaaaaatgaaaagaatcctgtccaccttcagaaagggaaaagtggcccttcctgtaccagtgctcagtgtaamcccttagaactagtaataaccaacccccttgatcctctctggaaaaaaggggagcatgtaaccctaggaatcgatggggctggactggatcctcgagtaaatatcatggtttgaggagaagtttataaatgctctcctgagccagtatttcaaatcttctatgataaactgaatgtgccagtaccagaaattccaggaaacaagaaatttgtttttgcaattagctgagcatgtagcccagtctctcaatgtcacttcatgttatgtatgtagaggaactgtaatgggagatcaatggccatgggaagcccaaaaattagtacctacagacccagttcctggtgaattcctggctcaaaagaatcaccctgattcttttgagaatctgggtcctaaaagcctccatcattagacaatactgtatagcaagagtgggaaaggatttcacccttcctgtgggaagactcacmtgccttgggcaaaaaactgtataataatattacaaaaacagccacctagtggagttcaaaccatactaaaaaaaatccatttagtaaattcccaaagttgcaaaccatgtggacccacccagagtcccaccaggactggacagcccccactggattgtactggatatgtgggcatagaccttatgccaaattgcccaaccagtgggcaggtagttgtgttattggcactattaaaccatctttcttgctactgcccataaagacaggcgaacccctgggcttccctgtatgtgattcccatgaaaagagaagcatagctacaaaaaataggaaagataataaatggccccctgagagaatcatacaatattatgggcctgctacttgggcacaagatggctcgtggggatacccgacccccatttacatgctcaaccgaatcatatggttacaagctgtgttagaaataatcactaataagaccagcagagccttgactattctggcctggtaagaaactcagatgagaaatgctatctatcaaaatagattggctcttgactacttgccagcagctgaaggaggaggtctgtagaaaatttaaccttactaattgctgtctacacatagatgatcaagggcaagtagttgaagacatagttagaaatatgacaaaactggcacatgtgcccgtgcaagtgcggcatggatttgatcctggggccatgttttgaaaatggttcccagtgctaaaaagatttaaaactcttataataggagttataatagtaatagaaacctgcttactgctcccttgtttgctacctgtacttcttcaaatgataaaaagcttccctaccttagttcaccaaaatgcttcagcacaagtgtactgtatgactcactatcgatctgtcttgcaagaagacttgggtagtaagaatgaaagtgagagctcccacaattgagtgagattctcaaaggtggggaataagggaggtgaccacccctcatactgtcttatgcccartttctgcctccaaagaaagaagaaataaaaactaaaaggcagaaatgaaatccactatgacaaacccacagccaatatcatactgaatgggcaaaaactggaagcattccctttgaaaactggcacaagacagggatgccctctctcactactcctattcaacatagtgttggaagttytggccagggcaatcaggcaggagaaggaaataaagggcattcaattaggaaaagaggaagtcaaattgtccctgtttgyagatgacatgattgtatatttagaaaaccccatcatctcagcccaaaatstccttaagctgatwagcaacttcagcaaagtctcaggatacaaaatcgatgtacaaaaatcacaagcattcttatacatcaataacagacaaacagagagccaaatcatgagtgaactcccattcacaattgctacaaagagaataaaatacctaggaatccaacttacaagggatgtgaaggacctcttcaaggagaactacaaaccactgctcaaggaaataaaagaggacacaaacaaatggaagaacaktccatgctcaygggtaggaagaatcaatatcgtgaaaatggccatactgcccaaggtaatttatagatttaatgccatccccatcaagctaccaatgactttcttcacagaattggaaaaaactactttaaagttcatatggaaccaaaaaagagcccacattgccaagtcaatcctaagccaatagaacaaagccagaggcatcatgctacctgacttcagactatactacaaggctacagtaaccaaaacagcatgatactggtaccaaaacagagatatagactaatggaacagaacagagccctcagaaataatgccrcatatctacaactatctgatctttgacaaacctgacaaaaacaagcaatggggaaaggattccctatttaataaatggtgctgggaaaactggctagccatatggagaaagctgaaactggatcccttccttacaccttatacaaaaattaattcaagatggattaaagacttacatgttagacctaaaaccataaaaaccctagaagaaaacctaggcaataccattcaggacataggcatgggcaaggacttcatgtctcaaacaccaaaagcaatggcaacaaaagccaaaattgacaaatgggatctaattaaactaaagagcttctgcacagcaaaagaaactaccaacagagtaaacaggcaacctacagaatgggagtaaatttttgcaacctactcatctgacaaagggctaatatccagaatctacaatgaactcaaacaaattcacatgaaaaaaacaaacagccccatcaaaaagtgggcaaaggatatgaacagacacttctcaaaagaaatcatttatgcagccaaaaaacacataaaaaatgctcatcatcactggccatcagagaaatgcaaatcaaaaccacaatgagataccatctcacaccagttagaatggcgatcattaaaaagtcaggaaacaacaggtgctggagaggatgtggagaaataggaacacttttacactgttggtgggactgtaaactagttcaaccattgtggaagtcagtgtggcaattcctcaaggatctagaactagaaatgccatttgacccagccatcacattactgggtatatacccaaaggattatagatcatgctgctataaagacacatgcacacatatgtttattgcagcactattcataatagcaaagtcttggaaccaacccaaatgtccaacaatgatagaccagattaagaaaatgtggcacatatacaccatggaatactatgcagccataaaaaatgatgagttcatgtcctttgtagggacatggatgaagctggaaacgatcattctcagcaaactatcgcaaggacaacaaaccaaacaccgcatgttcttactcatagttgggaattgaaaaatgagaacacatggacacaggaaggggaacatcacacaccggggcctgttgtggggtggggtgggaggcatagcattaggagatatacctaatgctaaatgacgagttaatgggtgcagcacaccaacatggcccatgtatacatatataacaaacctgcacattgtgcacatgtaccctaaaacttaaagtataataataataaaattaaataataataataataacaaaaaaaagaaatccacaggcagacagcccggcaccacaccctgggcctggttaaagatccaccactgtcctaattggttatgttatctatagattacagacattgtatagaaaagcactgtgaaaatccctgtcctgttctgttccattctaattactggtgcatgcagcccccagtcacgtacccctgcttgctcaatcaatcacaaccctctcacgtggacccagttagaattgtgagcccttaaaagggacaggaattkcttactcagggagctcggttgttggagacatgagtcttgccgaagttcccggccaaataaagcccttccttctttaactctgtgtctgaggggttttatctgcagcttgtcctgctacaattagagctctttcatgtattttggtagtgaaatatcacatccacaggacacatgtaaagatagagctgtaaaaggcatgtagaataaaagccatgttcaaaagatactttgcctgttttcaaaaaaatgtttctcccttactttagataattagtaaaacttatagaagccaacaaaattgaaggagagagccatcattcaaggcctttttaaaagagaaagagtggcacttttaagatatcaatctggaccaggtgcggtggctcttgcttgtaatcccagtagtttgggaggccgagacggccagatcacctgaggtcaggagtttgagacctgcctggccaactggtgaaaccccatctctactaaaaatacaaaaaattagtcagccatgatggtgsgtgcctgtaatcccagctacttgggagtctgaggcagraggattgcttgaacctgagaggcagaggttacagtgagctgagatagtgccattgcactccagcctgggcaacagagcaagactccgtctcaaaaaaaaaaaaaaaaaaaaatcaatctgaagaatgttraagagatagattagagaagttaaaaatttaaaaatgtcttgcattaaaagtaagtcaatatttgtaataaaatcttgttttaaccaattatttagttctgtattggtgcatattttaatattaaagacccatctctagaaagattattgtaatttccctttaattatatccaactgagttatataatccctttaaaaattcacttttattaaccttattacaactttcatagaccacttataacatagttaaactttctgctttaccctaaacattactctttcttgaacaacccagtcattgatttcagggcagaaattcaccacacatgattctttcttatataaaatcactttcctttttactttctttaccaaaaatacctctttatatctttaactttctttacatctcttatttcctgattcctttaccttgttttataaatacccttaaataagatttgaattagacaaagatatttcacctttaataagaacattaaaaaaatttttcctataattctgaaattggaaattaccaagatagttaatatcaaataataaccttaaatcctaaattatgacaagtctgtttacaagcatttatttcatttcatttatctgattaatagtttacgtakattatttacaaaaaccatgatagtcaaatattcaaagttatttttctattaatcatttttatacctgtgaatttcaggtatttacctaagtaataaaatgtatggttaattttaaagctatttataccgataacttaggatttagctgttttcactaggccaaaaatatttcataagcatacacaagcaaagattatcctgtcttgggctgggtcttayagttataacccttatggcaaattttatagtattctgcaggaataaacgtgaaacaatttgattgaaaaaaatgctaacaaaatgcttacaatgtttaagacattgctagtactattttaccaataattttaaaaccaccttatttattaaaaattatacttaagtgatgggaacctgaaaaagcattnagtcttttaawtatctgatttaagtgttcttatatattttcaatccaattaactagagctctttatatatttttagtagtaaaactttgcatacacaacacataaatacacagacgtatttaggcatgctgataaaagtacattttatagattcaaacagacttcctttttccttttttgtttttttttttctattttagactttcaaattcttgataacatgttgcatcaccctagggagttgtcagctaactagccctaaatttgcatattaaaggaaacaactcaatttgtaaggatcagatagtaaaatttacatcatatggggagaaaagtttggtgtgttagggaaattaaaatgaatttaactgctaataaaacataaaattatagaatttataaaggccttttaaatatacacacacaaagatctatagcattactttagtactttagccatgagataagtttaaattcaccagcttacaaacaaaacatgttagctccaaatggtggtttttatctcggtagaaaagtgacagcagatttcaagcaggaagaaaagaaaattgttaaagagaacttaggaactctatagtttccaagtcgactttagggctctttttcctcaatgtaaatatgcacaaagaccataattacttcaattttccataaactctggcaattaaatgtgccataaaacttacagagtgcttgaaagggggtcattctccttgttttctctttattcttgattgtttctttcccacattttcttttcttaaaaggaggaactgagctgtggcctaaggtttctgtgtggtggattgatatgtttcctgtattagctattcttaaaattaatttttgctgggaatttccctgcagggctgctgcacgtaatgggggtcaactccccaggcactcctatgaggcaccccctgtcacccaggagcactttttggctgagaggagcaaatgccctttctcttcagagctgaaaaaaaaaatactcagtctcttatttatctatgaaaatgacagctcagttcctcacgaaaatgcacacagacaatccaaactgaaattaattctgagaggaaaagcaatagagaaaaccctttagaatgcatctctgaactagaattaggacccttaaacaacaacttcctaggaaaaaaaaccagctcagaataaatcaaagaccttcaaccaaaacaggaggtccagggctcaggagaacttaccattttcactggaggagaatctcgaactcagtcaggcttcartggaccccagctggtaccatagctctggtttcaggcaaytccttctgggtcctgagtcttctctgaagccctacgtttttggggcaccaaattattgtcaagaaaaagagtcaaactctgtaaatatttgaagagatttattctgagccaaatatgagtgaccatggcccatgacacagccctcaggaggtcctgagaacacatgcccaaggtggtcagggtgtggcttggttttatacattttagagaagcatgagacatcaatcaaatacatttaagaaatacattggtttgatccagaaaggtgggacaactcaaagtgggggcttccaggctacatttaaacattttctggttgacagttggttgagtttgtctaaagacctgggatcaatagaaaggaaatgttcaggttaagataaaacattgtggagaacaaggttctttggaagtcttatggtggctgaccttagagacaatagatgacaaatgttttctattcagatctttaaaaggtggtaggctcttagttaatctcttaaaaagaaaaagatctagctatgktaatagagattttttacagatgcaaattttctcccacaaaggacagctttgtggggccatttcaagatatggcaaagaaacatgttttgaggtaaaatattttgactttcttctttgtcacataatgtcattccacagtcagactggagagtaagtcatgatatataaggttaaataaaacctatttgtcacacgtgtccatgtgaagagaccatcaaacaggctttgtgtgagcaataaaggtttttagtcacctgggtgcaggcgggctgactccgaaaagagagtcagcgaagggagatggggtggggccattttataggatttgggtaggtagtggaaaattacagtcaaagggggttgttctctggtgggcaggggtgggagtcacaaggtgttcagtgggggagcttctgagccaggagaaggaatttcacaaggtaatgtcatcaattaaggcaggaactggccattttcacttcttttgtgattcttcacttgcttgaggccatctggatgtatatgtgcaggcctgcgctcagaggcctgacactatctgatgagaatttatggtttgtagggcctgactctctagaccccttagataggaatttgggcaaaataaaatttaaaaaagaaaatcagagcttagtcctcaaaaccattactcttttttttttttcttttaagttcaccggtatgagtgcaggtttgttacatatgtaaatttttgtcatgggggtttcttgtacagattatttcatcacccaggcattaagctaatacccgttagttattttttctgatcctctccctcctcttctcctccatcctccaaaggccccagtgtgtgtctttcccatatatgtgtccatgtgttctcatcatttagctcccacttataagtaagaacacatgaatttggttttttgtttctgtgttaatttgctaaggataatggcctccacctccatccatgtccctgcaaaggacctgatctcattttttttatggctgcatagtattttatggtgtgtatttaccacagtttctttatgtaaaaagtaaagtagaggttcctcttcaaagactttcctccccatctaagtaggaataaatagtaacttctcttagaagcaaaatttattcaaagacatgtgctaacattcttaaataactgccagccttaataaagaaatcaatgtacgttatgttcttagctcccaaaatttagcctaaatatttgccctggcaaacacttatacttgtccaagcaagcattaggtcatagcctgttcctcttccttatgtgaatgtatttttacctttctcagcattccacaagttacttccaccttactttgttctcctcttccttttcctcttttaaaaagttytaagttgctagccagttgggacaaatacaaaatgtgaggtcctgttccatccaatggaaatcagacacagcagtagggtggattcctaaggttataaatgaccctgtctcctttgttcggtgtactctcatgacaaaactgctggcgagtgtaccctttctgcagaaagtaaaaaaaaaaaaaaaaaaaaaaaaaaaaaaaaggccttgctgaggaaattaaatttatgttcaagtgctatttctttatggcaccagggaacaagcatttcaaacatttatgtagtctatcactgatgggcatttaggttgattccatgtcttcgctattgtgaatagtgcttcaatgaacatatgtgtgcatgtgtgcttggataactggctagctatacgcagaagatgaaactagaccccttctttacacatatacaaaaattaactcaagatggattaaagatttaaatgtaaaacacaaaactataaaaatcctggaagacaacctaggcactaccattctggacacaggcatgggcaaagatttcataataagatgacaaaagcaatggcagcaaaagcaaaaattgacaaatgggatctaattaaactaaagagcttctgaacagcaaaagaaactaacaggttaaacagacaacctacagtacgggagaaaatttttacaaactatgcgtctgacaaaggtctaatatcagcatttataaggaatgtaaacaaatttataaaagaaaaacaaacaaccttataaaaaagtgggcaaaggacataaagagacacttttcttttttcttttctttcttttttttttttttgagacagagtttcctcttgtctcccaggctggagtgcagtagtgcgatcttggctcgctgcaacctccacctcccaggttcaagtgattcttccacctcagcttccaaagtagctgggattacaggcatctgccatcattctcggctaatttttgtacttttgtagagaccgggtttcaccatgttggccaggctggtctccaactcctgacatcaggtgatccgcccaccttggcctcccaaagtgctggggttataggcatgagtcaccgtgcccagccgaagagactctttttaaaagaaaacatatacgtggccaatgagcatgtgacaaaagctcaatatcactgatcgtcagagaaatgcaaatcaaaatgagacaccatctcacaccagtcagaatgtcagaatggctatttttaaaaagtcaaaaaacagatacgggtaaggttgtggagaaaaagaaatgtttatgcaccattggtggtagtataaattagttcagccattgtgggaggcagtgtggtgattcctcaaagacataaagacagaaataccattcaatccagcaatcccattactggatataaacccaaaggagtataaatcattctattactctattgttaattaaaaatttctcaccaaataaaattgtttatgcaactctgttgcatttgttatcaaggttacattcgttttaattttaaggtatctctaatgatagctagaagccatatgttatagaggtgaatattgtgggtttaagagcaccagtgcttactagctgtgtgaactcaagcatattatttaacatcttggaaccttagttttctcattgtttattaggaataataatagtttatacctcttatggttgacaagagtattcagtgagaaagtcaatgattattggctgttattattaactgttgcactttttctccttggtacttttttcagttgggttaggcaaatgttacaattaggatatggttttttctttggagatgcagctgctaatgcaggtatggacttcaaacttccaaagatttgtgcagttttaaaaacccaaaaacacgatttaaatataagctcatcattaacacatgtttccattgatggtatcatttaaacagcaccagaagctttactataatgcatctgataaatacaagataattacttttcaaatatacatttcagaattcttgaattacatcaaaagtgtttaattggrttgaaacagatatagaagtaaactatttttatgtaatcttttggagagattgttgatttgttacatgaggaagtatgtactttacagatgcagtacccttttgtatgcttatcactttgcttcttgactctctcaccaggtaactcaaaacacagacaattttctggcctattgattagagactacacaatcctcaatatagtagatcgtatatctatctgcccttttgtaattctgcatacaataaatgtattctgtctaggtagcaaattcctgaagggtaaaagtcaggattagcttagcctaatttartccctagaattactcagtacctttaaaaagcaacaaatatcagttgatcacttccagtgatggaastatcatttacaaagtgattttgaagccaagtaaacaaaagtttacttgtcaagaacattctcacggattcattattattaccaatcatttaaaaatcttgcacataagctgatctagaaagtaaaaaaaagacaataaagaatttaaaagcttatgcagaaatattacatataaatttttactaatttgcaaattcatcaaaaagcaagcacacttataattaccaaactccgatatttacttgtaaaatgtcgcagtacaacagcgagcatacttataattaccaaactccaacatttacttataaaatgtcacagtacaactttattgcagagttggagtatgttactgggtatgaataaataaattaataaacaaaattacttaaaaggagctattcccggtagctaattatttactgaaatattccttaaacacacagaggcatacacatatgcaatatgaagagtgggaaagtgtagtctgtgaatactacactagccattatttccttagttgagctcaatttcaatgatcttaaaattggtaattgattaaatttctttgacagcaatatctatatatgtttgtttagtgaaatcctagatgcagcagtagcactagccacataaccaaaatttccagactagtggaaaatgtggctactgtcatcactgttatgtgttagaagggaagaaagggctaaaaaaggtttcccttgtttctctcattttccctttgttgaagctttggaatacatttcaggctatcacgaagttttccaacctacaagttaaccttgggtagactcttcaaacatagatccctatattttcttacagaatacagatgtatagatgcaatgatttatgcaatgtcttttgaccctgaagagacagtttcctgcaatttggtgtaacaactgctatgaaatgactattataaatactgtcataatttcaacattggtcagcagcagccaaatgtatgatacaaaactcaaattttccattgtttaaaagtgtattcatgtcacaatgcagtttctgtatgaaaactcttagtgtaaaatatggataccattttcagatgacagaatagtagaatccataaagaaaagcaacagaaggaggaggatagtaattttccttcctttccatttgctgctctgctgaagaagtgatcaagactggtatgacaggtagacatttaacacatgcagatttttccttctttgaacattgacagggtgatatcaacataaattggactgaaaaaatgtaatttcaagaaatgaaattattatttatatactttaatttgtaaaatcatctcaggaacttatttacagcttcagggaggtttttaaagttccctctatatttttaaagggcataaaatatagattttttaaaaaagctatagtaaaattcaaaacatctgctaagtattgctagcacttaatcttaaagactactgtttttaatattttttctctagtttttattatattaaccttatataaccagaaccaaagaaagcattactaaagcaacagcatcgcattgaaaacttcgggctaatatttacccattacttgctgttttatcaagtggaagatgagtttagatcctcacaaaaccatcttccaacttttttgttagacatttttaggagacaaagtgtgctattcagtagtaccctatttttatttttttatttttggaatgacaatgtgaggaggaggtccttgtctatttgattagaatagactttgccacagaatgttcccataaaatgttcataagtggtcttataaaaattgctatattaaactacatttaaaaaaagtaagttaaatacaatttttaaagacttatcaggaatgtaaaatggtacaactgctttgggaaattgtctggcaattcctcaaatggttaattatagacttacaataggacccagtagttccattctgaggcacatacccaagagaaatgtaaacatatattcacatgaatcaacctaaatactcatcaacagtagactggataaagaaaatttggtacttatacaccatggaatactacacagccataaaaaataacaaggtcatgtgctttgcaggaacatggttggagctaagggacattatcctaagcaaactaaaacaagaacaggaaatcatataccacatattctcacttacacatgggagctaagcattggaaacacatggacacaagaagggcaacaaaagacactaggacctacttgagggtggagratgggaggagggagaggattaaaaaactgctattgagcactatgcttattacctgggtaaggaaataatttgtacacctaacccctatgacacacagtttacataaaacaaacctgcacatgtacccttgaacctaaaataaaaattttaaaaaagaaaacatatgtccatacaaagacttagacatgaatgttcagagtgacactattgctaagagcaaaaacgtggaaacaacctaaatgtcctcaaccaatgaatagataagcaaaatgtgacatacgcatacactggaatattatttgatcataaggaggaatgaagtagcaatacaagctataatatggatgaatctttaaaacattatgccaagtgaaagaaactaggtaatgtattgtacaattttatttacatgaagtgtccagaacaggcaaatccattgagacagaaattagattagtgtttgccagataasccaattaatgacagttctgtgggaatgagtctttgaaggacctccaaccctgttctgcctcctctgatgtctgtcaggtccctggtcatcccggtgaktgcaggatgttggttttcaaggctactgtggaagttcatagggggataatggaaatagggcatattaaattgcaacaaagctcactgttctctccaatattcagttgattttcttgaataagtggccacaaattgcagcaagcatgtggttaattgctagagtttttgtttgtttgttttttgttttgttttgtttttggagatagagtcccactctgtcaccctggctggagtgcagtggtgcaatctcagcttactgcaatctccgcctctcaagttcaagcgattctcctgcctcaacctcccaagtggctgggattacaggcgaccaccaccacacccaacaaattttttgtatttttagtagagatggggtttcattatattggccaggctggtctcaaactcctgacctcaggcaatccacctgcctcggcctcctaaagtgctgggattacaggcgtgaaccaccacgcccggcctacagtttttaaaatggttgattctgacacttactgctagttttctcgttgcttttatggaggaaataatttttttttcttcatttcttctaacaaacaaaaaacgggatacatgtgcaaaacgttcaggtttgttacataggtatacgtgtgcaatggtggtttgctgcacctgttgacccatctgctaatttccctcccctcacccctacccctcaacaggccctggtgtgtgtttttcccctctctgtgtccatgggttctcattgttcaactcccacttatgagtgagaacatgcagtatttcgttttctgttcctgtgttagtttgctgaggatgatggcttccagcttcaaccatgtccttgcaaaggacatgatctcattcctttttatggctgcatggtattccatggtgtatatgtaccactttctttatccactatgtcattgatgggaatttgggttggttccatgtctttgctattgtaaatagtgctgcaataaacatacatgtgcatgtgtctttatattagaatgatttatattcctttcggtatatacccagtaatggggttgctgggtcaaatggtatttctggttctatatccttgaggaatcaccatactgtctttcacaatggttgaactaattacattcgcaccaacagtgtgaaagcattcctatttctccacagccttgccagcaactattgtaacctgactttttaataatcacctttctgactggcatgagatggtatctcattgtggttttgatttgtgtttctctgatgatcagtgatgttgagctttttttcatatgtttsttggccacataaatgtcttcttttgagaagtgtctggtcatatcctttgcccacttttaaatggggttgtttgtctttttcttgtaaatgtgtttaagttccttgtaaattctggatattagacgtttgtcaggtgggtagattgcaaaaattttctcccattctgtaggttgcctgttcactctgatgatagttttttgtttgtttgtttgtttgtttctgtgcagaagctctttagtttaatttggatcccatttgtcaattttggtttttgttgcaattgcttttggcattttcatcatgaagtctttgccatgcctatatcctgaatggtattgcctaggttttcttctagggtttttatggttttggttttacatttaggtctttaatccatcttgagttaatttttgtataaggtgtaaggaaggggtccagtttcagttgtctgcaaatggctagccagtttttccaacaccatttactgagtaggagatcctttccccattccttgttttygttagrtttgtcaaagatcagatggttgtagatgtgtcatcctatttctgaggtctctgctctgctccattggtctatatgtctgttttagtagcagcatcatgatgttttggttactgtagtcttgtagtattttttgaagtcaggtagcgtgatgcctccagttttgttgtttttgcttaggattatcttggctatacggggtcttctttgattccatatgaaatttaaaatagtttttttctatttctgtgaagaatgtcaatggtagtttgatgggaatagcattgaatctataaattactttgggcagtatggccattttcacgatattaattctttctatccatgaggatggaatgttttttccatttgtttgtttcctctctgatttctttgaggagtggtttgtagttctccttgaagaggtctctcacattccttgttagctgtattcctaggtattttattctctttgtagcagttgtgaacgggtgttccttcatgatttgactctttgcttgcctattgttgctgtaaaaaaatgcttgtgatttttgcacattggttttgtatcctgagactttgctgaagttgctcatcagttcaaggagttttgggactgagatgatggggttttctaaatataagatcatgtctctgcaaacagacaacttaacttcctctcttcctattggaataccctttatttctttctcttgcctcattgccctggccagaacttccaatactatgttgaataagagtgatgagagagggcatccttgtcttgtaccagttttcaaagggaatgcttccagcttttgcccattcagtatgatattggctgtggatttgtcataaatagctcttactattttgagataccttccatcaatacctagttaattgagagtttttaacatgaagagatgttgaattttattgaaggccttttctgcatctattgaggtaatcaggtggtttttttctttggttctgtttatgtgatggattacgtttattgatttgcatatgttgaaccagccttgcatcccagggatgaagcccacttgatcatggtggataagctttttgatgtgctgctggattcagtttgccagtattttattgaggatttttgcatcaatgttcatcagggatattggcctgaagttttctttttctgttgtatctgtgccaggttttggtgtcagsatgacgctagcttcataaaatgagttagggaggagtccctccttttcaattatttggaatagtttcagaggaaatggtaccagcttttctttgtatttctagtagaattcgactgtgaatttgtctgtcctgggcttttttggttggtaggctattaactactacctcaatttcagagcttgttattggtctattcagggattcttcttcctggtgtactcttagtagggtgtatgcatccaggaattcatccatgtcttctagattttctagtttgtttgcatagaggtgtttatagtattctctgatggtaatttgtatttcttcggggtcggtggtgatatctcctttatcactttttattgcatctatttkatttttctttctcttcttctttattagtctagctagtggtctatctattttgttaagtttttccaaaaaaaacagctcttggatttgttgattttttggagggtttttcatgtctctatctccttcagttcttctctgatcttagttatttattttcttctgctagcttttggattagttttctctcgccccactagctcttttaattgtgatgttagggtgttaatttgagatcattctagctatctgatgtggacatttagtgctataaatttccctcttaacactgctttagccatgtcccagagattctggtatgttgtctctttgttctcattgttttcaaagaacttctttatttctgccttaatttccttatttacccatgagtcattaaggagcagattgttcaacttcataaaattgtgtggttttaagttagtttcttaattctgagttctaatgtgattgcacagtggtctgagagactgttatgattcagttcttttgcatttgctgaagagtgttttacttccaattatatggtctattttagaataagtgccatgtggcactgagaagaatgtatcttctgttgatttgagatcgagagttccttttttttttttttttgagatggagtctcactctgtcgcccaggctggtgttgatctcggctcactgcaacctctgcctcccaggttagagaaattctcctgcctcagcctccatagtagctgggattacaggcatgcacccacatgcccagctactttttgtatttttagtagagacagggtttcacaatgttggtcagactggtcttgaactcctgaccttgtgatctgcctgcctcagcctcccaaagtgctgggattacaggcatgagccactgtgcctcgctggtagagagttctttagacatctcctaggccacttgctccagagctgagttcaagtcctgaatatccttgttaattttctgtttgttgatctgtctaatactgacagtggggtgttaaagtctcccactattattgtgtgggagtctaagtgtctttgtaagtctctaagaacttgttttatgaatctgggtactcctaaattgggttcatatatattcaaagtagttagctcttcttgttgaattgtttcttttatcattatgtaatgcccttctttgtcttttgttggtttaaactctgttttatcagagactaggattgcaacccctgctttttttcactttccatttgcttggcacatttttctccatccctttattttgagtctgtgtgtgtctttgcaggtaagatgggtctcctgaatacagcacaccaatggttcttgactccttatccaatttgctmgtctctgtcttttaattggggcatttaacccatttacatttaatgttagtattgttatgtgkgaatttgatcctgttatcatgacactatttggttatcttgcacacttgtttatgcagtttctttgtagtgtcattggtctttatattttggtgtgtttttgcagcagctggtactagtttttcctttctatacttagtgcttctttcaggagcccttgcagggcaggcctgctggtaagtgaaatcccttagcatttgcttgtctggaaaggattttatttctccttcacttatgaagcttagtttggctggatatgaaattctggattgaaaattcttttctttaagaatgttgaatatttgcccccagtctcttctggcttgtagagtttctgctgagaggtctgctgtcagtgtgatatgcttccctttgtagtttacctggcctttctctctggctgcccttaacagtttttccttcattgcaaccttggagaatctgaggattatgtgtcttgaggttgatcttctcgtggagtatcttaatggtgttctctgcatttcctgaatttgcatgttgccctgtcttgctaggttggggaagttctcctggataatatcctgaattgtgttttccagcttgtttccattctcctcatctctttctggtacttcaatcaatcataggttctgtctttttatgaagtcccatatttctaggaggctttgttcattcctttttattcttttttctctattcttgtctgcatgtcttatttcagtaaggtggtcttcaaactctgatatcctttcttctgctttgtcaattcagctgttgaacttcatgaagttcttgttctgtgcttttcagctccatcaggttgtttatgttcctctctaaactggatattctagttagcaattcctctaacatttcttcaaggttcttagcttctttgcattgggttagaaaatgctcctttagctcactgtagttttttattacccatcttctgaagcctacttctgtcaattcatccatctgatcctctgtccagttctgcgcccttgatggagagatgttgtgatcatttggaggacaagaggcactctggccttttgggttttcatcattttttcattgattctttctcatcttcgtgagtttgtttagtttyggtctttgagtatgatgacccttggatggggtttttgtggggrctttttcattgttgttgttgtttrtgctgttgttgctttcctcttgwttttctttcaataatttggtccctcttctgtagggctgctgcagtttgctgggggttcacttcaggccctattcatctgattcgctcctgtgcctggagatgttattcaaggaggctggagagcagcaaagctgggcgcctgctcctttttctgggacccctgacctcaaggggcaccaaccygttgccagcaggattgtttctttatacggtgtctgacaacccctgtcagagggtctcacccagttgggtggcatggggagcaagacccgtttaatgaagcactttgtcccttggtagagagggtgtgtttcactgggcgtgggggggaacccactggtctaggctgcctggattcctcagaactaccaggaggagaggctaagtctgctggtctgcagagactatggccacccttccccataggggctcagacccagggagatctgaattctctccctgagcctctggctagagttattggagatcctgcagggaagccctgcccactgaggaaggatgggttggggttaagcctgaagaggcactctggctgcagactgccacagctggtgtgttgggctgtgtggacaagtcttgggaccaagccgtccagcctccctggctccagcagggaaaaagcatggcttggagctatagaaattggtgccacccttcccctgcccagggagcttagcatgttaggtaattgagagtcccaatgctggctgttgaccctcccccaaggagctcaagtggcttagacagcaggctgcttcagcaggtgctggtcacccctcctgccaggagtttggtaggcttaggcagattcctgctgggaggctgtaagcatctgtgtgttctggggttgggatgctaggccctggtgatgtgggttcatgagtgggatcttccgatccatgggttgcacagttctgtggaaaaagcacagtttccttggctgggtagtgcactcactcaccacctcccttggctgggaagtaggggttccccttccccatgtggctctcagttgggccccacaccacactgctcttccttctccccgtgggtcataccagccttgtagtcaattttgatgagagaacctggataccttggttgcccatgaaggattcacacgcttattatgggtttttttttggtgggagcctccaaacrcagctgcttctagttggccaccttggcccccttccatcaggaaataattttcatggatccttactgtgctatttttgctggtgtccttggacttctttttggggtgatgaaaatcttctggagttagatagtagtgatggttgtcaaactckgtaaatatgcttaaaaatactgaagtacacattttaaaaggatgactatggtatgtgaatgttttaataagttttattatttgtatttgytatttatrtattattatatatgttaaggctaacagaccaggagatgactgctaytgagaaaagtttgttgttcacagatccaaataggaatggrcatgccatgttactggaggatagagtgtggtacatggaaagcaccaaggtcttcggatcttcgtatgaggcagggcaaacaagttttggattggttagtcagaataatttcaatgggctctagggtttaggggctgtacctagttgtctggtacctggtcctatggtgattatggcaggcagacagtggtctgaagtgtcagagcccaataaaggaagtggttcggatattggctgtcgattggttgatttgcatttggaaggtgcactcacaggcaaattgtttgctatctctaggaattgtctaaccctaggaggggtagtgcctcgaagattagcaaggtccgagatgtcaaaatattagaatacagaaaataaaagacatggttaatatagttaattgtatagttaataatagctaataatatagttaattatatagcaataaaaaagacttctcagagcctttaatagtatcctatactatgaagctctaagtaataattatatgttattttctcaattattggccatggaatcatgtgtgtgaggagcgggtggagcctttcatgagactaagatyctaggaaatacactttgagaaacactagactagaatattctgtcccttgaagaaagaaagtaattcttttggggattctttacatttatyaatgatttggaggaatctgaatatgtctatagtgtctattatagtgctatcctagacctacagatctaagatagaatgtgtcaaacagaaggcaagggaattaagtgtgttgatgtaatgtgatgaacagtatctctgaacttaaattttctttcagattgtttctgtgactccaaactttcaatacaaacatgctcaagatgtttctgaggatttcatctatttctgccctrttgatgtggaagttcaggataagtccagaagacaaaaacaacagaaaccaagtatggccccctgacaacacactgaagaatgtatccattagarggccttggggattatcagtccagtggtaatggttaccacctccccactaactaaggagttagaaggaatagcccttataaaaccaaaaacattttagggtttcttcacctagagaaaatgacagttaaatctccaaggatcctagaatcccaacacatagatgttacagaaattgacagtccagagcaaaggggaaaggatgccacaatattgttgctcttgtacctggaaaggaagagctagataatacagaaattccaactttgaaattcactgggcttatacacctggaagctttaacaaataattgttcagtatcctctggatagagtcacccacaaactccaaaaaatctggaatctccagaaaatgcagagtccccaggaagtgatgaactggaagtagcaagaagcatgtattctctttttttttttttttttttttttttagatggagtctcgctctgtcactcaggctggagtgcagtggtgcgatcttggctcactgcaagctccgcctcctgggttcacaccattgtccttccttagcctcctcagtagctgggactacaggtgcccgccaccacgtctgactaatttttttctgtatttttactagagatgggtttcaccatgttagtcaggatggtctcaatcacctgaccttgtgatccccctgcctcagcctcccaaagtgctgggattacaggcgtgagccaccgtgcccggcggaagcatgtattctcttagagaaagaccatctttcggcagttcctgggcagagctcctggaagcactgctgattggtgaagggatccacattctccaaactattctgacagaagaggagagagagattggctacctccagctaccaccagaagaggagaatcaagcaactaccatactcaagggtgaccatctccatgctttggaaggcccttttccattgctgcccccagcatcttaagtttcattggtggcacagtcacagactgccaggatacagcgatgtcaggagctgaaaactaaatgcaccaaagttaaatgcaacagagttaacatccagaagagaaatgcttcttcttctcaaatgatcataatttgttcacagaaggtaagattttcaaactcgcttcaactacttttgtaaattatgtataattttccagacaagcagattttcatcagtgaattcattttcaaacttaccacctggaaatctgtttctttatatcccataaggtatcagctttttctaagagaattggggagttccctacaattgtaagcctaatatttggtgattacagtattgagaggtgacaatgtgctagcagcccttgctcactctcagtgcctccttggcctcggcgtccactctggccaygcttcaagagcacttcagcccrtggctgcactgtgggagcccctctctgggctggccraggccagagccagctccctctgcttgccgggaggtgtggagggagaggcgaggcgggaaccggggctgcacgtggtgcttgcgggccagggcaagttccaggtgggcgtgggctcggcaggccctgcactcttggagtggccctgggctgtgaggggcttagcacctgggccagcagctgcagagcgtgcatcaggtcccccagcactgccggcccgcctgcaccttgcttgaattctcgccgggcctcagccgcctccccacggggcagggatcaagacctgtagcctgccatgcccaagccccccccccccaccaccgtggcctcccacttggcccgagcctccctgataggtgccaccccctgctccgytaaagagtgcaggcccgtggagtgggactggcgggcagctccacctgtggcctcagcgagggatccataaggcaaagccagctgggctcctgagtagggtggggtcttggagaatttttatgtctggctggaggattgtaaatgcaccaatcagcactctgtgtctagctcaggttttgtggatgcaccaatcagcactctgtatctagctagtctggtggggacttggagaacttttatgtctagctagaggattgtaactgcaccaatcagcactttgtgtctagctcaaggtttgtaaaggtaccagtcaaaatggaccaatcagctctctgtaaaatggaccaatcagcaggatgtgggtggggtcagataagggaataaaagcaggctgcctgagccagcagctgcaacccccttgggtccttttccacgctgtggaagctttgttctttcactcttcgtaatatatcttgctgctgctcactctgggtctgcgaagtctttaagagctgtaacactcaccctgaaggtctgcagcttcactcctgaagccagcgagaccatgaacccaccggtaggtacgaacaactccagatgtgctgcctttatgagctgtaacactcaccatgaaggtctgtggcttcactcctgaagccagcgagaccacgaacccaccagaaggaagaaactccagacacgtctgaacatcagaaggaacaaactccggacacaccatctttaagaactgtaacactcaccatgagggtccacagcttcattcttgaagtcagtgagaccaagaacccaccaattctggacacagtatgactttaagttggatactttcaatgagaccccagttaataattatgagaaaataaactcttaaaatatacaaactagttatgactttggaaatttggaataaattttctcttttaaaaataactttcagttaagtgggtaatcttgagaaaatgactagtcctcattctatcacagattttaactgacagaatggcaacatttaccctctaacacacccatccacccagtaacaaccctgttggttaaaacagaaacactccactccatttcctcctgcatgtgagcaccatagtggctaaaaagtattaattgacaaataaatgattaatattatagcctatacctgaagtaatattaacagaactacttatgatgtatttataatgtacattaaaatcctaggctgaaatctgcacttaactgtaaggtaacatttttgtttttatcattagagctatttaaacatatatgaaaataatactatgaataccaaatagtactaggaatttttaattctaactcatgttagaaaccgacccccataacttcatgaaaatggtgtcatcaactagaaatctttcttagaaatagccccaccaaactacagaaggtagttccagagaagaatctggaatctaacacaaactttgtatgcaaatcataatttggtcattctgtaatttgtttctttttctacacacattcaagactgataaattatttatcaggcactaaaatttaagtattcaaaatcagcttagatcactttatcatttgaaatgtttataaaattggctcaaccccaaaatcacatccaacaccctcctcaaaattcctgcaaattcctagaggcttccgttttcatggttacccctctctctgatttcatagttccactgaactcttcatctcatccttcatttatcacccctctgcagctcctctctcatcacaatattgttcttcctctctcggttgttcctccatttttctactttccactgtccacaaattcctggtcattgtgtgaaaccattaaccacaactttggatttttttctgttcaccttttatacccaaaacagatattaagatattttgctaaacagaaggttacataccgtgatgatagtgccatgtgatttggaactgttagatgattggattggtatcaaatttggatatacttatctgtcattcttacagtttcttctcaaaacagtagtcaatcttccatcttttaaaaacaacttctgattatgtgttttagaaaatgcaaatgaaagagacagcattaaagaagcttggcaaaaggccattttgtcaggttctgcagactattttcctatcaattcaagcttttagaattcttctgaaatttggggtaaaattagaattcctgaagatagtactggacttcccaggaacaatgttagaattcccagaaataatgtcagtattcctatggttaatgttggaattcccatggataatcctgaagttcatggaggcaatgctgaagttcctcataagtttaatattgaggttcctacaaataatgctggggttcccagaggcaatgctggagcattgctggaacttcaatgtaatcttgaagttcctagaggcaatggtagtgttcccaagggcagtggtgttggggttcccatgggtaatgttgaaactctcaggcgcaatgttggaacttccagcagacatactgtatcctctccacctcttgagctctcagagataggtgatctccaattataaaagctgacatcttacaaagtagtcctaatagttaaataaacacatcacaacacttaacatctaaacagctacgtaccaagtcttacaactcaaaatagtaaatgtaatatttaaattcaaaatgaataaataaatatataaatacactgatgattgtcttttttggcattggattgggtttatttgctagtttattctgaatgggaaccatcaattatctatgagataatttggttaggggttgagttgtgaaggagtaagatgcttaattccttaagcctagatttctacttgctaaagagatacagtgtctatatcactaaacaaaatagcaactaaccttcaaataatattgtgtatctcatattcccaacaatggcaggtcttcttggatattttgatgggcaaatgaaagcaatctcatagttattaacagttatctatatgagtctagcttaatatccaagaaatttattgactgaaagctaaggaaacaggaaatttggcaaaagattattgaatacagtgcttctctgaaatgtccagatagaacctctgcagaaagctcattaacaagagtacttaaatatgtgtatttatttttgtgaaacacatctgagaaaagtataaacacttactggaattctttctctttttttttttttttttttgagacggagtcttgctctgtcacccaggctggagtgcaatggcaggatctcggctcactgcaacctctgcctcccggattcaagcgactctcctgcctcagcctcctgagtagctgggattataggcacccgccaccacgcccagctaatttttgtatttttagtagagacggggtttcaccatgttggtcgggctggtctcgaactcctgacctcgtgatctgccctcctcgatctcctaaagtgctgggattccaggcgtgagccaccgcgcccggcccatttactggaattcttaaaaatattagaagaaaaacaactgtagaactgtaaatattatatgtagtgttaatgtaaataatataaataagacaacactaacaacactacaggatgcctaaaatattgcatgttaatacttttgttttgaaaattaatttagtttattcctctcaactaccaaattagtttggcataaaaagacacagggcataagggggaaattattgaaatattttaccaaatcactgagtagaatgcccttctcagagagaagaggaccactttttaatggccagatgatcatcatggtattcaaattacacaatcatagttacctgtaaaatttggttttaaaaaacatttatttcagccaggcgtcccagcactttgggaggctgaggcgggtggatcacctgaggttgggagttcgagaccagcctgaccaatgtggagaaaccctgtctctaataaaaatacaaagaattagccgggcatagtggcgtatacctgtaaacccagctactcgggaggctgaggcaggagaattgcttgaacccaggaggcggaggttgcggtgagccaagatcgtgccattgtgctccagcctgggcaacaagagcgaaactctctctcaaaacaaaaacaaaaacaaaaacaaaaacaaaaacaaaaaaaaacaaaacaaaaaagcaaaaaaaaaaatttatttcacaaaaacctttaagataggtaagatatgactggaaggtaatgaggctagctcataaactacaggggggaaataatctcattatattcaaacataatatatttttttccaaagtttcggggtgtatgggccattattcaatttgtacatttaaattttcaactatgctgaataatggtagctgttgtttttacaaaaccaagggtaatttaaattttaggttaccacctaacccctaattgtgtgtcttaccacataatgcaagtggtggtaatctgtagtctaatggcaaactcctgcccactcacaggatccatttggtctttgaggaagaaggtaaagaggatagccctctcttcactaccccctggttcagtgtgtgcttactgaaccatggctttggcatcagaagaaaaggacaagtagtgagatttctttcccctatttcttaccagcccagaagatagcataccatttcagacttgagtaacctgaatttcgtatagggtagcaagaccacagaagtaatggaaggatacaggatgccatacttcagtgactgtcaatgcctgactcagaaaaaaacaaactgacaattcaccttgtttaacagagagtctatatatacacgatgttgtcacactgactttgtgaaatagaactattacatttctgatcttcaaagggaaccaccttatgggtgcaaaaacagtaaaataagatggaaactgrgaaatggctcactaagaactaacatttactacaaagcaagtgaaaaaaaagacaaacaaaattgtgctcaaccatatataatactgacatataattgaaaatggtcactaaaacactaccaccatcaacaacagcagcaaaaccctgctatatcagtgttatttctcatcctttatgattaatatatttttggggtactgtatttagtgactttaaacataaaaaattatatgtgaagtggccaggtgcttctttgcaaaattttaagaaactgaatgaaactaaggtaaagaatcaaatgtgaagatggtctaagaagataattctgaatctcgtaaagaaaattacttccaaatattgttagttcagaactgagcaatgcaaaagtttcaatgacacatcactatttatcttccaagattgtcccatgtcttcttagggctctctacgtcaagtaaattatctaaagtcattcaataatcatcataattctagaggaaagagagagtaaagaacatggaatatacggaataagaaattttcctcacaaatttcacataaattgaacctgaggccttcatggaaaaaaaaaatgttaaaattgaaaatctaaaggcataggattgaagaaggaaaatgatgagccatttctaattctcttactttttccaaataaatgacagattaaaattacctacatgtaatatttctatattttaatatgctcctataaaataagaagaaaattacttgctaaaattgatgatagcgtaggatgggagaaagaactctgaaagtgtcctgcatattttactatgcaagaaagaacagttaatcagaaaacaacaataaatagttattggttaaccaccataattagccatattgtttccttctaaggctctagaaaaatgtaaagtgtgcactgctcagtgtgagtaacagatgaattcttctaattttacagatgttttacatacattcccctaattatactaaaataattttaatttgtaaattaaattgtacaatgtgcattcagataagttgaaataatttttaattcacaagttacttagcagaagaatgaaagagttttctttactaaataatatttcttttatgtctgtttaagtcttcaaaaattaagcaaatgaaaaaatattttcctcaaaggttaatatgatggaactaaggagaaaaatatttgacacaaaaacacttatctaagaaccaacaaaatgtagtattcaaatatcataactgctactttcatttcaataaacacagcgttagaaaaatatttctcaaaccatttaattcaattcaaaatatttttgaagcattctgaatagggaaatcattcatacataaccatgacctgtacattagaacaaagggacttcaacagtttgtaacattaaaaaatatatatttcagatggtctgtttgtctataattagaaggtaaaatgaagaattgaggctttacacatgtagtgaagccttaatttatttcagaaaaccacaatatcaagaatcattataaaattacaacacacaactatgaagaaaatttatccaaaaaatcaagcaagggcattaattttgaacattaaactcatggtaactgaatgcacaacagtatttctttttaagaatgagacagtatagacagtgtgtataatttatattaaaatccattaactagcaagaaagcttcatttattgcatgtggcgtttccatctaatgattaagtatgttttagaagtgaaaactcaaaatattgcaaattgcttttagtagatcatagggtataaagtgcatatgactgttcaataaatcttttaagagcaaagagcctcattgatgtgtgataatcttgtagaaagtggggggataaaagaagagcaaaacagaaattagaataaaactgtagcaaaccaccatggcacacatttacctatataacaaacctacacgtcctgaatatgtacccctgaacctaaaagttgaaaatcaaaaaagaaacttagaaattaatgataaaatattgtgagcagtcccagatcatattttagcattcttttgccaagtgaatggaatgattatgaaacagatatctcatttgccattagaaaaggaattagttgcataataatagacgattatattgtttgtctcactgtcttcccacttttcatgtgggcagcatctcattttttttttttttttgtatcctttgctggtatgcaaaatagattgatacattagttttaaaaaaggaaaaaaataaaatgatgtattttgaaggtttttacgaacttttttgcacgtttgaacttgtcattttactttttattaatatgaacaaataagccttacaataattaaactttagcactaacatccctaaagtttatgctaccactggccgggtgcaggggctcacacctataattccagcactttgggaggctgagatgggtggatcatgaggtcaagagatggagatcatcctggccaacatgctgaaactcagtatctattaaaaatacaaaaattagccaggagtggtgatgtgcgcctgtagtcccagctacacaggaggctggggcaggagaatcgcttgaacccgggaggcagaggtgcagtgagccgagatcatgccactgtactccagcctgggtgacagagcaagactccatctcaaaaaaaaaaaaaaaaaaagtttatgctaccaccgatttcctaattcttatgatatacatcatcaatttatgaatttgcctacagcatatttttgctattaaaaagtaatatttaagagtttatttttaaagctgacttacctccagtagatttgattatcttatgcgactagtatttacctacaaactacrttttctattcttatactagagtaaaataagagatcatcttcaaaataaaactttagaaatgcagtgacattcaaaattataggtaatataatattaaattgtgttagaattattaacagttaatattgctgattttccccaaagcccaacaatactgaagatcatcatgaaaatactaattttcataattcttccataagtgtatctagtcattcaaaaataaatacacatacatttcagaattttaaagctgcagaataataatggacaaagttcattcctgaaacttaacatttcaatactatgtaacaagtgctaatggcaacacatgtgcagtactcagacggattaaaaagtctgtgaagaagaaaagatcacaaagatgtcgtattgacttggaaatatccattattgtcaaaattcagtaataacacctctacacattacaccttctcaaacctttaagcctgtcaaattctcaaaccaagtgtttgtttgttgtatctgtgtgcagtatgtttcaagtaagtgactttatatttctttttctacatttatcaccagtgactagagaacaaatctgttttaacttaaaaaacaaaaaacaaacaaacaaacaaaaccctttcctgattcaagaaaatgagcaagagctgatgcagtgcttaaaattttactattcattatgaatttaaattt

SEQ ID NO: 93596 - DNA, 84278 bp, Homo sapiens
ctgtatctattggtgccattttttgtctttaactgataggcatctccctgatcatttgcttgatttgttgaataatatcaagtagaaatgaaagttttttttgtttgtttgtgttgttttttttttttctgagacagagtttcgttcttgttgcccaggctggagtgcaatggcacaatctcggctcactgtagcctctgcctccggggttcaagcaattctcctgcctcagcctcccgagtagctgagtttataggcatgcactaccacgcccagctaattttgtatttttagtagagacggggtttctccatgttggtcaggctggtctggaactccaaagctcaggtgatccacctgcctcggcctcccaaagtgctgggattacaggtgtaagccactgcgcccggcctgttttgttgtgttttgtttgacagtttcactctgttgcccaggctggagtgcagtggcatgatgtacaacctctgcctctcaggttcaagcagtgctcacgcctcagcctcctgagtagtgagtagctgggattacaggcattgccaccatgcctggctaatttttgtatttttagtagagatggcggtttcaccatgttggccaggcaggtctcaaactcctgacctcaagtgatctgcctgtctcagcctcccaatttgctgagattaaaagtgtgaggccgggcgtggtggctcacgcctgtaattccagcactttgggaagccgaggcgggcagatcatgaggtcaggagatcgagaccatcctggctaacacggtgaaaccccgtctctactaaaaatacaaaaaattagccaggcatggtggcaggcacctgtagtcccagctactcgggaggctgaggcaggagaatggcatgaacctgggaggcggagcttgcagtgagccaagatcgtgccactgcactccagcctgggcgacagagcaagtctctgtctcaaaaaaaaaaaaaagtgtgagccactgcagccgacctgaaagtttcttttttttgagacaaggtctcactatgttgcccctgtcggagtgcagtggcatgatcagggctcactgcagccttgctttcccaggcccaagcaatcttcccacctcagccttgcaagtagctgggaccacaggcatgtgccaccacccctggctaatttttgttttgtttttttcagaacagagtctctgtcgcccaggctggagtgcagtgatgtcagtctcagcttactgcagcctctgcccgccccccgggctggttcaagcgattctcatgcctcagcttcccgagtagctgggattacagatgcatgccaccacatctggctaattttttgtatttttagtagagacaggtttcaccatgttggccaggctggtctcgaactcctggcctcatgtgatccacccaccttggcctcccaaagtgctgggattacaagcgagaaccactgcgcctggcctgggaattgaagtttcttagtgtttggaatagtttaaaacgttttttatttggaaatttctgggttttgaaatgtatatggactggctgggcaccatgactcatgcctgtaatgccagcactttgggaggccgaggcgggtggatcacttgaagtcaggagtttgaaaccagcctggccaacatggtgaaaccctgtctctactaaaaaaaccaaaccaaaacaaaaaaaaattagccaggtgtggtggcgggcgcgtctgtaatcccagctactcaagaggctgaggcatgagaatcacttgaacccgggaggcagaggttgcagtgaactgagatcgcgccactgcactccagcctggacaacagagtgagactctgtctcaaaaaaaaaaaaaaaaggtatatggattaaaactagagggacaaggatggttgtttagaggtgacatcttgaccatgtaacctagtagtttttttagttcaattagttgtgtaaatggacatgtgtcatcacagttggcactaaaaacagcaagtgggttattagatattcaatactgggttagtaagtcaagtcacagtcaaaatctgctgctttggaaaacaggttagtttactgaaagtgatgtattagaacacagactatagtcatttctttcacctatctaaatagataaaatcttccagcctcacacctgtaatcccagcactttgggaggccgaggcagcagatcacctgagatcgagagttcgcgaccagcctgaccaacatggagaaaccccgtctctactaaaaatacaaaattagctgggagtggtggctcatgcctgtaatcccagctatttgggaggctgaggcaggagaatcgcttgaacctaggaggcaaggttgcagtgagtcgagatcgcgccattgcactccagcctgggcaacaagagtgaaactccgtctctaaaaaaagaaaaaaaaaagccttcctccaggacagacttgatgtgaatttactataaatatattgtggtggagtgggggtggtgcacacctgtaatcccagcactttgggaggccaagagaggcagatcgcttgagaccaggagtccaggagtttgagaccagcttgggcaacatggcgaaaccctctctatgaaaaatacaaaagttagctggtggggtggtgtgtgcctgtagtcccagctactagctacttgggaagttgaggcacaagattcgcttgaacctgggaggaggctgcagtgagccgagatcacagtactgcactccagcctgggcaacagaaccaggccctgtctcaaaaaaaaaaaaaaaaaaaaaaaaaaaatatatatatatatatatatatatatatataaaatatatattctatatatattatattaatgtaatattaattagaatatatattatatatataagaaatatttaagccagttagaattgtcttgttaatgtgttgtcttaaaggggagttggaaataaagtatcttgaagacagctctggcctaagtgtcagatctctggactctagttccaggttagattccaacaaggttagtgatctaggatgaaatatgtttcctgagtctcagttttgttacttaaaatcaagaagtttgagtttgtgattttaaaaatctataacattaatcccatgattctttttattattattttttgagacagagtctcgctctgtcgcacaggctggagtgcagtggcgcgatcttggctcactgcaacctctgtctcccggtttcaagtgattctcatgcctcagcctcccgagtagctgggattagcacgcaccaccacacccagctaatttttgtatctttagtagagacataatttcaccatgttggcaaggctggccttgaagtcctgccctcatgtgatccacccgcctcagcctcctaaagtgctgggatgacagtcatgagccactgcatctggccctaatcctgtgattctaagcaatattcaaattgtgttaatttcaaaaattaaggacttatttccattcacttctgcatggcctcatccagtccatggcttcaaatactgtgtattatacattctataaaatgctgaggacccatatctctcccgcctctatttgtagctgttatttcctggatgtctagtaggcacctcaaatatcacatgactgaaacaaactcaatgactttctctatttcctccactaaatctgttgcttccatgcttttctcatctccacaaattcaccacagtccacaatagctctgttgaaaacctggcagtcatcttttattccttcctttccgtcatagctcacatccagtttatctattggcgctttgagagctgcttccagaatacacccagaatctgatcacttctcagtcttcattgtttaagccactggtggttttctatgtcttttaggttgaaatccacattccctacctgcagcccacatccaaacaatttacagggggattcctaaccctccttggtgtccatcctgtcactcattaattagctcaggccttcttacccttggcatggactgccagaacctccagtctctatccctcttcaatgcttctcgcagctaccacaggtgggcagcaagccacggggggcgtggggagcataaactcatcttggagtgtcactcgttggtttgctttttttctttaatcaactatgttgaggtaaaatttacatacaataagtcatgtacagttaaagggtacagttcagtgaattttgaaaaatgtgcaaatctattcaatgaccactaaaatcaagacacagaacttttccatcatctttaggtgtaagaaagtaaaatagtacagaggcaagtaaagtaaaaatatgagcctttctccaactccattatagctttttgcaaaaacaactcaacatggccgggcacggtggctcatgcctgtaatcccagcactttgggaggccgaggcgggcaggtctcctgaggtcgagagttcaagaccagcctgaccaacatggagaaaccccatctctactaaaaatacaaaataagctggggtggtggtgcatgcctgtaatcccagctacttgggaggctgaggcaggagaatcgcttgaacccaggaggtggaggttgtggtgagctgagctctcaccattgcactccagcctgggcaacaaaagcgaaactccgtctcaaaaaaaaaaaacaaaaaaaattcaacatttctgtgtgtgttgcatgagacaatacatatacatttttttggtgcccaaactctcgaataatgttctcaatcttgactgtacttcagaattacctgggaagcttaaaaattcccagtgcacaagaagcactccaggccaattaaatcagaacataggggtggaacccaggcttctattttatttactaatattttagagatgagatttctctgtgctacccaggctggagtcatcatagctcactgcagcctcaaactcctgggctcaagtaatcttcttgcctcagcctccctggctcaaatgatcctctcacctcagcctcccaagtagctagaaccacaggcgtgccagcacacctggctaattattttgcttattttttgtagagggtctcgctatgttgcccaggtaggtcttgaattcctgggctcaagccatcctcctgcctcggcctcccaaagtgctgggattataggcatgagccaccatggctggccctttttttgtttttttgttttatttttaagcttcccagtgcaagcaatgttgagaactaatcttttgccaaagtatttttagctctttgttctctactaggttaacacctaccgggtcttcaaatctcacctcagagttcacttccaagggaaacgtgttttctgaatccgtctccaatggtggactctccttgctgtattacttctgcttgtgtttttagtcaagtctattattattactattttctttgcagagacgagggctacgttgcccaggtcttgaattcctgggctcaatagatcctcccgcctcagcctcccaaagtgctgggatttcaggcgtgagccactgtgctggctttagtcatctgtttcccggatagactgtgagctccccaggatctagcacaagcctggcatatgacaacataaataaatgagtgaatgtatacatgaataaagagcgtgtacggagaaagttgccgcattatttagcgcaaattaaggcagacatcagcctgcccaggacgcctctttggctctggcgcgaaacaccctcacgggccggcgaggctgacgcgctgcgctccatcgcactaatcagccgggcgtggtgygggcgccgggaagactgggcggggcgaaggcatcacctttcgatggggccggcgctgtgcgtcctccagtcgaggtggggcgctgtggaagagcggcagcttccggtcggcttttctcttccttcggctgccggcgccagsacgtcctgttttcgttggccgcgctgggatggccgccacagctgtaggkgctgctagtgtttagcgctggtctttgccgggcgttgagggcagctcagcctccttgtttgtccggttcgcctgtgcgtggtactcaagggcaccagtattcccgcsgtcggcagcatgggtcgggagtcacggtgaggcagagcgccgagcgggctagcgggcgagcggcttcttggggtcgtgagaagaggcgggagttgaggtggccgccgggccaggcctggcgcggccccacgtgcggtcagcgctgccccgcgagcattggaagggctgggggacctcggctgagggaatggttgtgtttgggccagcgacggcttcccctgcactaccatcagagggttcgagcccctggagcgggaacaaccctccaggacgttagtgattgggcaccacatcccgccacttcaagggagcctgccctgattacttcagtcagaagtgatcccagttggattgcttattgcttcgcgtttccaacatttcctcgactcctgtcattctgtattttagttctttgtgcgcgtatgatcttttcccaagttacttgaaaggagcgtgtgggcagacatttttaccgcatcgacagcactatacacgactaggcttttactgggctacaataaatacttgttgcgtgggcatttacttcgcaaatagatttcgtatttaagcaggtaactttgttacctgcttttctgtccttttgaagttgtggactatgagctcttattagaactcattagatctcatcacaactttagattgttgatagattgttaggaaccttgagatttttatgttaaaaatgactatttgctatgtatttagcaatgactgaaagatattttatgtctaggaacaatgaaggcttttgttgttagtgctaacagttctttgttgaggtacaattaacaatcagggaaatggacaaaacgtaagggtaaagcttgatgaaatttagcaaatatataaaccgtgtaatcatcacctggatgaagataaaaaatatttctttaactacagaaaattcctgtgacggtgttttaaatctccggaaggctgtccagaccagaaatctgaaagtgatatttatttgactcattcttctctctcactacccacagcctgttagattctacatcctttgcccattctggttgtccctgacttaattgaggccctaattatttattgtccagactactacatctgttttaaattgattctctgaattgattgtcttcctctgttgctctcctaattgttagatcccttacactacagccagagtgacacttctgaagtagagataagatgatgrcatgcccctgacttagtctccattggtttctactgcttccaagatgaaatttaaactctatgacagccttcaaggcccttcacaagaaggtccattctagcccgtcagccttctcctttacctctctggtgtgcatggcctgtgctctaggtttgttcagggaatcatgaaaggcttagaggtgggaaggcgcaaggtgttagagaaatagctaaaaagcccaatttttctgcatatgtaggtttcatgaagggattttatcttttttgagaagtagtaggaggtaggtcctgaataggacttgggcccagaaagcgggtggattgtagattttgaagatcagaatttgtttgtgaacctttgaagattttgagtaaaaagtgtgtaatagaatcagaattctccttagcagcaatgagtaagatttaatggaaaagtaatagaaacaggaagacyacagtctttaagaatctcctaggtagatatgtctgatatagaatagtgacggttggaactctgtggaggtgatataatgtgaagggaattacagaggtgaaattggtattacttggttgtttttttgtttttgtttttgtttttgagacagagtctcgctctttcgccaggctggagtgcagtggtgggatctcggctcactgcaagctccgcctccagggttcacgccattctcctgcctcagcctcccgagtagctggaactacaggcgcctgccaccgcgtcaggctaatttttgtattttttagtagagacggggtttcaccgtgttagccagggtggtctcgatctcctgaccttgtgatccacccgcctcggcctcccaaagttctgggattacaggcgtgagccaccgcacccggcctgtttttttgtttttgagacagggacttgctctgtctcccaggctggagtgcattgaaacaatcttggctcactgcaacctatgcttcccaggttcaagagatcctcccacctcagcctcccgaatagctgggactgcaagcgtgtgccaccacgctttgctaatttttgtattttttgtagagacagggtttcaccatgttgcccaggctggtctcaactcctgaggtcaagctctctgcccaccttggcctgccaaaatgctgggattacaggcatgagccgctgtgcccagccaattggtgttttatttattgtatcgaatgagagcaagagaaaaatattgatgatgactaatgttttgagcctagtgaccggaagttggtacgattaatcgtttggggagggaagggtaacaagtttgggtttctacagattgaacttgaggtgcttgagagataatcaggtgcattcatctcctagtgatcttatttaggtttatagctttaaatagcctttgtacactaatagctgtccagtttatatttctagagaaacctcttccttgaactmcaggctaatatttcaactatatactatatatctccacttggatacctaatattctgatccaccttctccctggatttctccctcagccttcccatcttggtaaatggcaactgagtgatttctctcttgctgtcacacttgacatttagttcatcattaaatcccatcggtgctagcttcaagatatccagattttgatatttctcaaaatctttccaccttccattttgatctatgccaccactatctcatgcctggatgattgctatagtgctggtctttgctaatcctgcctattctttctccttttgtccttgcctccctttgtttggtttgttctctcagcaaccagaataatactttaaaaacattaggccaggtgcagtggctcacacctgtaatcccagcattttgggattacattaagtggaaggattgcttgagcccaggagtttgagaccatcctgagcaacatagcaagactccatctctacaaaaatgaaaaataaaaagaaataaataggtgggcatagtggcacacgcttttatgcttttggtcccagctacttgggaggctgaggtgggaagatgcttgaggccgggaggttaagacaatcctgagcaacatagtgagacaccatctctacccaaaaaaaaaaaaaaaaaaaattggtgggcgcggtggtgtgtgcctttggtctcagctactctggagattgaggtggaaggattgctggggcccagtaggttgaggttacagtgagtagcaattgagctgctgcattccagcctgggtgacagagtgagaccttgtctcaaaaaagaaatttaaaaaaatgataaaaaggctgcatgcggtggctcatgcctgtaatccatcccagcactttgggaggctgaggcaggtagatcacctgaggtcaggagttccagaccagcctgaccaatgtggtgaaactgcctcatctactaaagatacgaaactggctgggcgtggtagtataggcctgtaatcccagctgcttgggaggctgaggtaggaggattgcttgaacctgggaggcagaggttgcagtgagctgagatggtgctattgcattccagcctgggcaacaagagtgcgactctgtctcaaaaaaaataaataaaataaaataaaaataattagctgagtggccgggcgcagtggcccaagcctgtaatcccagcactttgggaggctgaggcaggtggatcacgaggtcaggagatcgagaccatcctggctaacatggtgaaaccccatctcttctaaaaatgcaaaaaaaatttagcctggcgtaatggcggacgcctatagtcctagctactcgggaggctgaggcaggagaatggtgtgaacccgggaggtggagcttgcagtgagctgagattgtgccactgcactccagcctaggcaacagagccagactctttctcaaaaaaaaawaataataataataattagctaagtgtggtgacgcatgcctgaagttccggcttcttgggaggctgaagtgggaggattgcttgagcctcagagagttgaagttgcagtgaactgtgagcacatcactgcactctatcctggataatagagtgaggcctgtttctaaaaataaaaataaaaacattaatgaggttgtgtcactcctctgcttaaagtcttccagtagattttcatcttggtgtaaaagacagagtccttatataatggccagtaaggccttccaggtttggcttccctgctgtttttctgacctcgtcttatggcacgctgtgtcactctttcaacactagccacaactggcatccttgctgttccttaaactcaccagtcaagcttcctctttagggactttgcacttgtgccttttgcgtggaaaattccctgtatatctacatggctcctttatttcctccaagcctctgtaacaaatgtcatatttatattgtatataaacatactatatacagtgtttgtttcttcacttgtctgccgtcttttcctttaccggagtgtaagctgcctggagctcaaaggcaggagcttggtctgttttgttcactgtccttgcctctctttcaagacagattttccacctctacatgtgtctgtgctgaagcagaagggttcattttttccctcctaattttagaaaaattcataaaaagttctttgagtgttaaatttgtctgctgaaattatttttagaaaaaatgtaataaaatgtaatagaagctaatggtgtttgctgaacttaatctttgacttattgttctagccactatcgaaaacgatcggcatcccggggtcgctctggaagtcggtctagaagtcgctcaccctcagacaaaagaagtaaacgtggagatgacagacggtctagaagtagagatagagataggaggagagagaggtctcgtagcagggataaaagaagatctcggtcaagggacaggaagcgtctgaggtaagacattaattaatttccaaaagacragtgataaattgggccttctcggctatagcaggcttcttgaaaagtatgttttcaactggagtttggtggcccaattgcaggcccttttctttatcccctacttgtttgattagacccagaaggatgtgcctacaaagactctatcaaacagtgtttttttttttttttaatcttttttgagacagagcctcactctgttgctcagactggagtgcagtggtatcatctctgctcactgcaacctccacctcctgggttcaagcgattctcatgcctaagcctgccaagtagctgggatttcagatgtgcaccaccacacctgtctaatttttgtgtctttaaaagagacggtgttttgccatgttggccaggctgctctcgatctcctggcctcatgtgatcctcccaccttggcctcccaaagtgctgggattacatgtgtgagccaccgtgtccgaccatcaaacagtgtttttagtttggaaactttaggctgtatttcctgtaacccaaagacatcccttgaagccctctgagggacatacaaaatgaagtaaaaagtaaagtaataagttatattcaagagggttctattccaattctgctccaggagagctgaccaaggtgttaattttctttccttttttttttgccacccttgttgaaatttgtaaaatttccttcctctctccctccttccctccctcccttcctccatctctctcttccttcctccctatctccttcccttccactctctctcccttcctccctcactctttctctctttctctttctttcttcattttgctaaacagtgtgtttagagcagcctctaaagcaggcagaaaaaggaaacaaagcagaccctctccaagcctcttaaactattttaatgagctgtcatagatttaaactaaagagcgccttaatcttttttttttttttaatttattttttttttgagacagagtctcactctgtcacccaggctggagtgcagtggcacgatctaggctcactggaacctctgcctcccgggttcaagtgattctcatgcctcagcctcttgagtaactgggattacaggcatgctccacaaagcctggataatttttgtatttttaatagtgacaaagttggccaggtatggtggctcatgcctgtaatcccagcactttgggaggccaaggtgggtgaatcacgaggtcaggagtttgagaccagcctggccaacatggtgaaaccccgtctctactaaaaaaaaaaaaaaaaaaaaaattagccaggtgtggtggtgcatgcctgtaaacccagctgctcgggaagctgaggcaggagacttgcttgaacctgggaggtggaggttgtagtgagccgacatggtgccactgtactccagcctgggcgacagatcaggactccatctcaaaacagaaaaaaagaaaataatcttctgtgcacaccacacccagccaattaaaaaaagcttttcatagagatgggggtcttaactgtgttgctagtggcctcccaaagggttgggactacaggtatgagataccataccttgcccagtttctcattaaaataggaaaggaagacaagattgtgttgtgagtggatcatagaaagaatttaactttatccttttcagacattggagtacattgttgttacgtaggattcagggaaaatattcacccgtgacaatgtggatagcattttcacattttgtggtcctaggaacaatttcacacaattaattcaagtacttaagtgaaaatggttatttaacatttggtctttgacttttgggtgtgaaagtagaatcacaagattttagagcaagagggattttaaagatgtctagtgaagtctccatattttatagatgatgaaactgagacccagaaagttggagatctgaccttcatcatgtcattagttaccaggagtagcaggatagaaattcttgcctcttcatcttcagattagtgatcttttagtagacccattatgcccatccttatacttaggtttaggctatctgaaactagatattctatcttagmccatcgattttcaatcgatgttaattacagacttattatggttttttcacaaacatctttatgaaattagtattctctggcctggcatggtggctcacgcctgtaatcccagcactttgggaggctgaggcaggcagatcacctgcggttgggagttcgagaccagcctgaccaacatggagaaaccccatctgtaaaaatacaaaattggctgggcatggtggtgcatgcctgtaatcccagctactcaggaggctgaggcaagagaatcgctttaacccaggagatggaggttgtggtgagctgagattgcgccattgcactccagcctgggcaacaagagcaaaactctgtctccaaaaaaaaaaaaaaaattagccgggcatggtgatgcacatctgtaatcccagctgctggggaggctgaggcaggagaatcacttgaacccagaaggcagaggttgcagtgagctgcaattgtgccactgcactccagcctgggtgacaggtgtgagactttgtctttaaaaaaatgaaagaaataaattagtattctcatttttttcgttgagcacttataagacttggctttacttcattgagacctccacctttaataatggtagtgattaagattctttcaatgtgggacagaatcccctgatctgaaatagtagctccatttggtcatagaataaatgaaaagtgtccccctttcagacgttccagaagtagagagagagacagaagccgagagcgaagaagatctcgaagtagagacaggagacgctcaaggagtagaagccggggccggcgatcccgatcctccagtcctggaaataaaagcaagaaaactgagaataggtaatgttatcattgggctgcatctatagtgcagactggggactgcttcccttytctgcgccttttttttttttccctgtaagtttgtatttatagagaattaactgcatttggctcctaccatgaactgttggcagtgttttattttaattggctataatgtttataattcaactggaaaataatagattctgtcagttttaacattcaatacattgtattcttacttaatacataactgtcaatcagaaatgtattttatagacatctttgtagaaactctgtcattttcttttcaggcagggtctcactctgttgcccaggctggagtgaagtggcaagaacatagctcactaaccttaaacttgtagactcaagcaatcctctcacctaggcctccaaaagtcctgggattatatgaagaggcagacataatatcccagctaatttttatgtttttagtggagatggggttttggcatgtttgccaggctggtctcgaactcctgacctcaagtgatctgcccacctcggcttcccaaagtgctgggattacaggcctgagccaccgcgcccagccaagacttgtcttaaaagttaagaaattaggccaggcgcggtggctgacgcctgtaatccttgcactttgggaggccaaggtgggcggatcacctgaggttgggagttggcgaccagcctgaccattgtggataaaccccgtctctactaaaaatacaaaattagctgggcgtggtggcgtatgcctgtaatcccagctactctggaggctgaggccggagaatcgcttgaacccaggaggcagaggttgcggtgaggtgagatcatgccgttgcactccagcctgggcaacaagagtgaaactccttctcaaaaaaaaaaaacaaaaaaaagttaacagaaattaagacaatgtgcaatttgtttagcagtggacagacagattagtgaaccatgtaaagagcccagaaaggcatccatacacatggtaatttgatagatgacagaggtgatgatgtaataagtgaagattttttttttttttttaacagccaaagtctcgttctgttgccctggctggaatgcagtggtgcaatctcggctcactgcaaccttcgcctcccgggttcaagtaattctcttgcctcagcctcccgagtagctgggactgcaggtgtgtgccaacatgcccagctaattttttgtattttttagtagagatggggtttcaccgtgttagccagaatggtctcgatctcctgatctcgtgatccacccgcctcggcctcccaaagtgctgggattaaaggcgtgagccaccgtgcctggccagaaaaatttttaaattgctctagggatatctagtatccttttatgaaataagactgcctaccttattctgtgtacaaaaagcaattccaagcaaagaccaaattagatggcaaaattctaaaccttttagaagtttgtgccagagagtatcttcttcttcacctctaggtatcttacatcaaatctggaaggatttctaaactactttaaaaagcaccaattataaaggagaaaaaaggttgactaatttgattacattaaaattaagaaattttattcattatgagatgccgtaagttggggtgcgtaaacaagttgggtttattccaagaatggcaggttattttaacattaaaaaatcattagaagtctgggtgaagtggctcacgcctgtaatcctagcactttgggaggccgaggtggatggatcacgaggtcaggagtttgagaccagtctgaccaacatggtgaaacctcgtctttactaaaagtaaaaaattagtcaggtgtggtggcacacacctgtgatcccagctactcgggaggctgaggcaggagaatcacttgaagccgggaggtggaggttgcagtgagccgagattgcgccactgcactccagcctggccgacagagagagactccgtctcaaaaaaatcccctaaaatcattagaacattagaacattcgaaatgcatgtcccttgggattttaaacgttattacatatataaattatcttgcagaatattaatatattggtctgtttcttcatttatcacattttaactatcctacctataaacaaactatattgtttgtatgtagtatgttcagtttttcttgggttgaatttccaaatatttagtaatgcttcccattagtgtcatgggattaatttttttcgttatattttcaaggttttttttttttttttttttttgaggcagaatcttgctctgtcgtcaggctggaatgtagttgtgcaatatcagctcattgcaacctctgactccctggttcaggctattctcctgcctcagcctcctgaatagctgagattacaggcacgtgccaccatacccagctgatttttgtattttttagtagagacggggtttgttttttttgtttgttttttttttttttttgaggtgaagttttgctcttgtctcccaggctggtgggcaatggtgcaatctcggctcactgcaacctccgcctcccgagttcaagtgattctcctgcctcggcctcccacccctgagtagctgggattacaggcgcctgccaccaagcccggctaatttttgtacttttagtagagacagggtttcaccatgttggtcaggctggtctagaactcctaacctcatgtgatccacctgcctcggcctcacagagtgctgggattacaggcgtgagccaccgcgcccggccgagttggggtttcaccatattggccaggatggtctcgatctcctgacctcgtgatctgcctgccttggcctctcaaagtgctgagattagaggcatgagccaccatgcccagcctccaggtgtttgttaatggaatatgaaaacacagttgactcttagaagtttatttcttacctaaatattggaatacaagtctaataagtgtacttatgtattttttgttttaatttaatagagacgaggtctcactgtattatcctggctggtctcgaactcctgggctcaagtgatcttcctgccttggcctcccaaaatactgagcttacaggcatgagccactatgcctgaccaaattttttttttttttttttttttttaaaaagagacagggtctcactttgtcacccaagcttgagtgcagtgatgggatcatagctgactgcagcctcgaactactgggctcaagtgatcgtcttgtttctgcctcctcagtaggtaggactgcaggtgcacaccaccatacccagctaattcttagtatattttggaaagattggatcttgttatgttcccctggctgatctctttaactcctgttttcaattgatcctcctgccttggcttcccaaagtgctgggtatataagtgtgaggcaccttaccccacctgtaaaagtattttaaggccgggcgaggtggctcatgcctataatcccagcacattgagaggctgaggtgggcagatcacctgaggttagaagttcaggaccagcctggccaacatggtgaaaacctgtctctactaaaaatacaaaaattatatgagtgtggtggctggcacctgtaatctcagctattcgggagtctgtgacaggagaatcgcttgaacccgggaggtggaggttgcagtgagctgagatcgcaccatttcactccactccagtctgggcgacagagtgagacactgtctcaaaaaaaaaaaaaaaagtatttaaaaatgaatgtttctaagtacaaatgaatgacatttctcttgtctcttttatttttttggtagatctaggtccaaagagaaaactgatggtggggaaagttctaaagagaagaaaaaagacaaagatgacaaggaggatgaaaaagaaaaagatgctggcgtatgtttattaacttaaaaataattttctttctttctttttgtctttctttctttcttttctttctttccctctttctttctttctttctctttctttctttcttttctgtctgtctttctttctgtctttctttctgtctgtctctgttgcccaggctggagtgcagtggcacattctcggctcctgagttcaagcaattctcctgcctcagcctcccaagtagttgggactataggcatgcgccaccatgcccagctaatttttgtatttttagtagagatggggtttcactgtgttggccaggctggtcttgaactcctgaccttgtgatccccctgcctcggacccccaaagtgctgagattacaggtgtgagccaccgtgcctggccatcaaacttgtttctatgggccaggcacggtggctcacgcctgtaatcccagcactttgggaggccgaggcgggtggatcatgaggtcaggagatcaaagctatcctggctaacatggtgaaaccctgtctctactaaaaatacaaaaaaaaaaaaaagattagctaggcgtggtggcaggcgcctgtagtcccagctacttgggaggctaagccaggagaatggtgtgaacccgggaggcagagcttgcagtgagccgagattgggccactgtactccagcctgggtgacagagcaagactctgtctcaaaaatcaaaacaaacttgtttctatgccaacaaatttttttctttttaatgctgtaagctttattttaaaataaccagatgtgaaagataaaaaaggaagattaaataatatttacccctgtgggaaaattttctaaaagaagttgcacatctatacgcaatatctgtttttacatacaaagtgcagtcttaccatataaacattatcaattgccttccaaaaaatttgtataaatttygacttaaggctgggcacagtggctcgtgcctgtaatctcaccactttgggaggccaaggcaggtggatcatctgaggtcaggagttcgagaccagcctgaccaacatggtaaaaccccgtcactactaaaaatacaaaaattagccaggcgtgatggcgcatgcctgtaatcccagctacttgggagactgaggcaggagaatcacttgaacctgggaggcagaggttgcagtgagccaaaaatcacaccattgcactccagcctgggcaacaagagcgaaactctgtctcaaatgtgaaggccaggcatggtggctcgtgcctgtaatctcagcagttcgggaggccaaggtgggtagatcacgaggtcaagagattgagatcatcttggccaccatggtgaaaccctgtctctactaaaaatacaaaaattagctgggtgtggttgtatgtgcctgtaatcccagctactcgggaggctgagataggagaatggcttgaaccccggacttggagattgcagtgagctgagatcccgccaatgcactccagcctggtgactgcgagactctgtctggaaaaaaaaaatgtagacttaagaatttagacatgaggccaggtgctgtggctcatgcctgtaatcccaggaatttgggagttcaagcagttcccctgcctcagcctcctgagtagctgggattacaggtgcatgccaccacgcccagctaattttttggtatttttcgtagaaatggggtttccccctgttggccagactggtcttgaactcctgacctcaggcaatctgcctgcctctgcctcccaaagcactggaattacaagcatgagccaccgtatctggcctattcatttttttgagacggagttctgctcttgttgctgaggccggagtacaatggcgtgatctcagctcgctgcaacctctgcctcctgagtcgaagcaattctcctgcttcagcctcctgaaggaggaactacaggaatggggaaccatgcccagctaatttttgtgtttttagtagagacagggtttcaccatgttggccagggtggtttccaactcctgacctcaagggatcctccagcctcagcttcccacagtgctgggattacaggtgtaagccaccatgcctggccataaacttgtatttttttaataacacagagtctccctttgttgctgaggctgatctcaacctcctgtgctcaagggatcctctagcctcagcttcccaggtagctgggaccacagacatgtaccatgtgcctggccataaaatttctttatcatgttgatgtcgtttattttctaacttgtaatagaaaattgcttttcatagaggcaattttggaggcgtttaggggattaaaattgagaataactgggaaactttgcttgctaattactttagtttctgttgttaggaagaaataaagtttatgtgtgcataatgcttgtaagtaaaatgagattgatttatagtgtttgaaatctatcttttggctttcttatttgaagatgctttttttgtgatttcattttggtaatatatttgtgtgtatatttataaaggtatgtgatctaagtctaccctgaggggtttgtatatatgccttttttccccttctttatactttgaagaacttactggaatgtcacttggagcaaaattattaaatttggttttgctttttattttcccccatctctttctttcttttattcccccaagaactttgaccagaataagctggaagaagaaatgagaaagcgaaaagaaagagtagaaaaatggcgagaagagcaacgtaaaaaggctatggaaaacataggagaactgaaaaaggaaatcgaagagatgaaacaagggaaaaagtggagtttagaggacgatgatggtatattttttagcctaatagcctgtataacacctcatgtagaatattatrtgaataatatttcataaggggtttttaatcttttttattgttgaaaactatgcataatatgctgtttaccattttcatcattttcaggtttcaattcagtgataaatacatttgcagtgttgtgcagtcgttaccactgtctgtttccatgactttttcgtcattccatacagaaactctgcaccttttaaataactctatgacgccttttctcgctacttcttgtgacctttgctctattttctgtctctgaatttgtttagtctagctacctcacataagtggaatcataatacatatttgtctttttgtgtctggcttatttcacttagcataatgtcttcaaggtgcatgtatgttgtagcatgttggaatttcctttctttatatggctgaataatatttcactgtatatatatgccaagttttgtttgttcattcacctgccattggataatttggttgtttccacccttttgttatcgtgagtaatgctcctgtgaccattggtgtataaatatctgtttgagtctctgtattgagttctgtgaactatatacccagaagtggaattgagattgtaaaagctccttttaatatttatgttgtaatttgaaatatagaattgtgtttagtaagcatcactgattttactttagaatgaatcattgagtgttattgggcatagccagtaaatagttctttaatatattataccaatgtgaacgttagtaaggagagtaaattaagggcatgctttcaagtgcctcctctgatttttcttttctttttcatgtttttggagatagagtttcattctcttgcctaggctggagtgcagtggcacagtcatagttcactgcagcctcgacgtcctgggctcaagtgatttttctgcctcagcttccagagtagccaccatgcctggctaattttgtctttttcttttttcttttttgacagagtcttgctctgtcacccaggcggcactgcagtctccgcctcccaggttcaagctattctcttgcgcctcagcttttcaagtagtcaggattacaggcacctgccaccatgcctggataatttttgtatttttagtacaaaaatatgttggccaggccggtcttgaactcctgacctcaggtgatcctcccactttggcctccsatagtgctgggattacaggcgtgagccaccatgcccagctaattttgtcattttttgaagagccagggtctcgatatgttacccagctagtcttgagctcctggggtcaagagagcctgctgctttgacctttctcagtgttgggattacaggcaggagccactgtgcctggctgctgatatttcataatttaggatggaaacatttcccttcacatctgattttgactttcgagattttagtaaagtaggagattgtagaattttataggaaaatgggattttggtccattgtctgtgaaagttccaaagaatggtttaaatagattctatctataagtagtcatgatgtcttttttttttcgctctgttgcctacgcttgagtgcagtgccgtgatctcggctcactgcaacctccacctcccaggttcaagaaattctctgcctcagcctcctgagtagctgggattacaggtgtacaccaccacgcccagctaatttttttgtatttttagtagagacgaggtttcaccacactggccaggttggtgtcaaactcctaaccttgtgatccgcccgccttggcctatttttagtagagatggggtttcactatgttggccaggctagtctcaaacgcctgacctcgtgatccacctgcctcggcctcccaaagcagtgggattacaagtgtgagccattacgcccagccaagtagtcgtgatgtcttaattctagacaatctaatcttttttacataactgagatatgctatcttctgtgattgaaaggtaattgaaagaaaaatacagttgacccttgaacaacttggtagctaagcacaccaacccccacacagtgaaatatccatatgtaactttttactccccagaaactaagcattacctgcttactgttcaccaataacatgaacagttgaataacacatactttgtatgctttatgtattgaatactgtattattttaatatggtaagckggagaaaagaatgttattaagagaattagaggctgggcgcgctggtgcatgcctgtaatcccagcgctttgggaggctgaggcaggtggttcacaaggtcaagagatcaagatcatcctggccaacatggtgaaactccgtctctactaaaaatacaaaaattagcttggtgtggtggcgcacacctgtagtcccagctactcgggaggctgaggcagaagaatcacttgaacctgggaggtgaaggttgccgtcagtgagccgagatggtgccactgcactccagcctggcaacagagtgagactgtctagaaaaaaaaaaaaagaattacgagaaagcaaaaatatacttactgtccattaagttgaagtagatcatcttaaaggtcttcatccttgttgtcttcacattgagtaggctgagaaggaagaagaggaggaggagttggtcttgtctctggggtggcaaaggtggaagaaaatttgcttccatgtggacccatgcagttcaaacctatgttgttcagggatcaactgtaattgaaaatgtcatttagctgggtgcagtggctcacgcctgtaatcccaacactttgggaggctgaggtgggtggatcacaaggtcaggagttcgagaccagcctgacaaacatggtgaaaccccgtctctactaaatacaaaaattagctgagtatggtggcgcacgcctgtaatcccagctactcaggaggctgaggcaggagaatcgcttgaacccaggatatcagaggttgcagtaagctgagatcgcgacactgcactccagcctgggcaacagagcgagactctgtctcaaaaaaaaaaaaaaaaaggccaggcgtggtggctcacgcctgtaatcccagcactttgggaggccgaggcgggcggatcacgaggttaggagttagagaccatcctggctcacatggtgaaaccccctctttactaaaaataaaaaaaattagtggcatggtggcgggcacctgtagtcccggttactcgtcaggctgaggcaagagaatggtgtgaacccaggaacctgggaggcggagcttgcagtgagctgagattgtgccactgtactccagcctgggtgacagagcgagactccgtctcaaaaaaaacatcatttagcagagaaagtttgtagttctgcatccagctgtatagctgtaaaatctattattggagatcaccttttttggcataattaatcttttgacccttttacaaccaatttatgttttattcatatttattttgtcattgttaatattcagaagtaatacatgcttcatgtaaaaatggaaaaacctcagaatatgagcatttgaactgatggatggctggagtaattggaaaaggggtgtttgggcagtggcagaaaaggttagagaggtggggtgtggtctgattgtgaaayactgcatttttaaacagatgtttaaagaatgtgtattctggtattttagatgacgaagatgatcctgcagaagctgaaaaggagggaaatgaaatggagggtgaggagttagatccattagatgcttacatggaagaagtgaaagaggaagtaaaaaaatttaacatgagaagtgtaaaaggtggtgggggaaatgaaaaggtatggaatttcttatttttaaagatttccgtttcctcttgggtaacttgagttctccattgcattgtcctactgattggcatgactttgtaaagctaacagttttctttctcctcatctgagagatggcagtactttttctragtaccagagatactggtaaattttagctataagtgttctttcaaaagtcactcttttaacaccatcaacttagtttgatatctttgcttacatattaacctttttaataagttctctggagacttctctagcactcctgtctttgatactcttttttttttttttttttgatacagagtctctcttttgcctaggctggagtgcaatggtgtgatcttggcttactgcatcctccacctcccaggcctatgcagtctacctacctcagcctcccaagtagctggaactacatgtgtgcaccaccatgcctggctaatttttgtattttggtagagatgaggttttaccatgttgctcacgctggtctcgaattcctggcctcaagtgaaccacctgcctcggcctcccaaaatacttggattacaggcatgagccaccatgcccagctgtgtctttgatacccttgatgcccctcactttattctatttttcctctttttcatagcatttattacattttgacaaattatataatttttttgtgtttacagtatgtcccttctcccttctaaaatgtaagcactctaagggcagtgacttttacctgtgttatttgttgatttattcaggctcccgstacaagcccctggcttgcctagtgattggaaaataccatttagtagtattttgtttcattttatttatttatttattttttttctgagacagagtctcgctctattgcccaagcgggagtgcagtggcgcaatcttggctcactgcaactgctgcctcccaagttcaagcgattctcctgcctcagcctcccaagtagctgggattacaggcgcctgccactatgcccggctaagttttgtatttttagtagagaccgggtttcaccatgttggtcaggctggtctcgaactcccgacctcaggtgatcctcccgccttggcctcccaaagtactgggattacaggcgtgaaccaccgtgcccagcctcattttattttattttatrttaatttaatttatttttttgagatggagtgtcgcctttgttgcctaggctagaatgcagtggtgtaatctcggctcactgcaacttccacctcctggcttcaagtgattcttctgcctcagcttcctgagtagctgggattacaggcccttgccaccacgcccagctaatttttgtatttttagtggagatggggtttcaccatgttggccaggctggtctcgaactcctgacctcaggtgatccacctgccttggcctcccaacgtgctgggattataggcattagccactgcacctgtcctattttattttttttgagatggagtcttgctctgttgcctaggctggagttcagtggcactatctctgctcactgcaccctgtgcctcccaggctcaagtgattctcctacctcagcctcccgagtagctgggattacaggcgcccaccaccatgcctggctaatttttgtatttttagtagagacagggtttcaccatgttggccatgctggccttgaactcctgacctcaaatgatctgtctgccttggcctcccaaagtgctgggattacaagcgtgagccaccacactcggccttattttattttttatttaagaaaatgttttttagagacagggtctcgctgtgttacccaggctggagtgcagtggcatgatcatacctcatacgcctgggctgaagcaatcgttctgcttcaaccttcttagtagttaggactacaggcatgtaccaccacatctggctaattgtttatagagatggaatctcacgtgttacccaggctggtctcgaactcctggactcaagtgatcttcctgtcttggcctcccaaagtgctgggattacacacatgaaccactgtacctagcctagtagtagtttaaaaatacataatcatgccggacgtggtggctcatgcctgtaatcccaacattttgggaggccgaggcagacggatcacctgaggtcaggagttagagatcagcctggccaacatggcaaaatgccatctctactaaaaatacaagaattagctgggtgtgatggcggacgcctctaatccaagctacttgggaggctgaggcaggggaatagcttgaactgggagcaattagcctagatcacaccactgtactctagcctgggtgacagaataagactcagtctgaaaaaaatatatgtgtgtgtgtgtgtgtgtgtgtgtgtgtgtgtgtgtgtgtatatgtatatatgtgcatgtatatgtgtatatgtatatgtgtgtatgtatatatgtatgtgtatgtgtatatgtgtgtatatgtgtgtgcgtatatgtgtatatattatatatttttatatatattattgttatatataattggctgggtgtgctgactcacgcctgtcatctcagcacttttgcaggggctgaggtgggtggattacctgaggtaaggagttcgagaccagcctgccaacatgatgaaaccctgtttctactaaagatgcaaaaattagccggactagtggcgggtgcctgtaatcccagctcctggggaggctgaggcaggagaattgcttgaatccaggaggcagaggttacagtgagctgaaatcatgccattgcactccagcctgggtgacaagagcaaaactttatctcaataaataaataaataaataaataaataaataaataaataaagtatgtataattatataaaattatttataatacagtaaattatgaatggatgtattataaaatataattatattatgcttaaaaatttatacaaattaatgagaaaaacaggctattgtttgtcttttcatttaataactcagttggctcagtgccctggctcacacctgcaatcccagaactttggtaggctgaggctggtggatcactggagccaagtagttcaagaccagcctgggcaacatagcatgactctttctacyaaaaaacaaaaaaaattaactgggtttggtgacatgtgcttgtagtcctagcaactcaggaggactgatgggacgaatccttgagcccagaaatttgaggttacagtgagctatgatcacaccactcaagcctgggtgactgagaccatgtcactaaaaaaagaaaaaaaactaaagatgaaattgtgtcagttactgtgtgcttcagcagtcatataacttgtgtttcagctttgcaaaatattctatatttgttctttattttagaagtctgggccaacggtcacaaaagttgtcactgttgtgacaaccaaaaaagcagttgtggattctgataagaagaaaggtgagctgatggagaatgaccaggatgccatggaggtgatttttsttaattttgactttgtttatgatactatcctggaagcatttattagaaagcattcatggagatgtgcgtttcatttgtgtgagctaggagaaattcccagaattgaragacattcttgctattcttagtagtataatagtatctagttaaatatctgtttagtggaacattctgatgtcttcattcctaactgtatgatctttctgcccctcatcagctcacttcaggcatacaatatggagagaaaaaaatggagtaacagaatgaattaattttctttccattaacacgtaaagatttatatagtaaaaacagtagcaaagccttattagagctgtctctgatgattactgttttagctttatattggcattttaaccttctaaaggcaaagaaaaaaaaactaagttgaaaaattcttcaggagctgcttgatacgtttctaattcaaggtgtcatacgtcatttgaggtgattttaaaattatgaggtttaagtgtgctggagcactataaaaatcttgtgggtcaaacagtgtgtygtagaaagtaaaatattagagtagtttctaggagaggaagatttgaaaagctaggagtattgcttcccacaaggggaaaatagtaatgaacttagcgctttaattttttcttttaaactatagtattcttcagaggaggaagaagttgatcttcagacagcccttacagggtatcaaacaaaacagcgaaagcttctagaaccagttgatcatggaaaaattgagtatgagccatttaggaaaaacttctatgttgaagttccagaactagcaaaaatgtctcaagaaggtaaaattccattttttcatttactggttataagggaacagaagaggatacatttcacattgctcaagagaaatgtggatagtgtctcatgaaggagggtgttttggaaatatttttaaaatgatcaaaaattaattggccagctgcggtggctcacgcctgtaatctaagcactttgggaggctgaggtgggcggattgtctgagctcagaagttcgagaccagcctgggcaatacagtgaaaccccgtctctactaaaatacaaaaaactaggctgggcacagtggctcacacctgtaatcctagcactttgggaggccaaggcgggcagatcacaaggtcaagagtttgagaccatcctggccaatatggtgaaaccccatctctactaaaaaaatacaaaaataaaaaaaattgttggttttgttttgttttttttttgagacagggtctcactccattgcccaggctagaggctggagtgcagtggtgcagtcattgctcactgtagccttgatttcctaccacaccccccgttcccaccccaggctcaggtgatcttcctatgtcagcctcccgagtagctgggactacagacatgtgccaccacacccagctaatttttgtactttttgttgagacagggtttcaccatgttgcccaggttggtcttcaactcctgggttcaagtgatctgcctgcgtctgtctcccaaagtgctagttgctaggattacaggtgtgagccgctgggtctggcataagagttaaagtttgttaatcttatgcctaattgaaaagtagaagacaccaatagaacaatatttaagaacttttaatctgggttttgttttgtagaggtaaatgtgtttcgattggaaatggagggcattacagttaaaggaaaaggttgccccaaaccaattaaatcctgggtccagtgtggaatttccatgaagatcttaaattccctcaagaagtaagtggttggtggttgtttatgttttccgtgtcttgctgctcaaaatagtccttccacaccagtgtctccctgagttacatttttactctaaaaaaacccttacrttttaaaaaactttcattgagataatttatatatcaaaatttaccctttaaattatacaactggtttttttttgttttgttttgttttgttttttgagacagagtcttgctctgttgcccagggtggagtgcagtggtgcaatctcactgcgctcactgtgacctcggcctcccgggctcaagcagttctcctgcctcagccttccgagtagctgaaactataggtgtgtgccaccatagctggttatttttatttttagtagagacagggtttcaccatgttggtcaggctggcgttgaactcctgacctcaggtgatctgcccacctcggcctcccaaagtgctgggattacgggcatgagccwccatgccyggcctttttaattttttatttatttttttcttttttgagacagagcctcccgcccctgtccgtcaggcgtgcattggcagaatcttggctcactgcaacctctgtatcctgggttcaagcgattctcatgctgtagcctcttaagtagctgggattacaggtaccctccaccacacccacccaatttttgtatttttaatagagacagggttttgtcatgttggtgaagctggtccaaactcctgacttcaggtgatccccccaccttggcctcccaaagcgctggttaaattatacaacttagctggacgctgtggttcacgcctgtaatctcagcactttgggagccaagaagggcagatcatgatgttaagagatcgagaccatcctggctgacatggtgaaaccccgtctctactaaaaatacaaaaattagctgggtgtagtggcgcatgcctgtagtcccagctagcctgtagtcccagctactcaggagcctgaggcagcagaatcgcttgaacctgggaggtgaaggttgcagtgagctgagatcatgccactgcacgccagcctggtgacagagagagactctgtctttaaaaaaaaaaaaaattatgcaacttacggttttttcttttttcttttttttttcttttaggcagagtctcactctgtcaccaggctggagtgtagtggcgcaatcccagctcactgcaaccttcgcctcccgggttcaagcgattctcctacctcagcctcctgagtagctgagattgcaggaacgccccaccatgcccggctaatttttgtatttttagtagagacggggtttcaccatgttggccaggatggtctcgatctcttgacctcatgatccacccgcctcagcctcccaaagtgctgggattacaggtgtgagccaccgcgtctgaccaacttaatgatttttagtgtatttttgtagttgtgcaactatcacaatagtctaatttttgaaaatttttttgaattttttttttttaattttatttatttacttttttgagacagagtctcactctgttgcccaggctggagtgcagtggtgtgatctcggctcactgcaacctctgcctcctgggttcaagtgattctcctgcctcagcctcccaagtagctgggactacaggtgtgtgccacaccatgcctggctaatttttgtatttttagtagagacggggtttcaccatgttagtcaggctggccccaaactcctgacctcgtgatccgcccgcctcagcctcccaaagtgctgggatgacaggcgtgagcctccatgcccggccttttttttttttttttgagacggagtttcactctcgttgcccaggctggagtgctgtggctcgatcttggctcactgcaacctccgcctcttgggttcaagtgatacttttgcctcagcctcccaagtaggtgggattacaggcatgtgccaccatgcctggctaattttgtatttttagtagagacagggtttctccatgttggtgagggtggtctcgaactctctacctcagatgatccacccgctgcggcctctgaaagtactgggattacaggcgtgagccaccaaggccggccttttttttttttttttttaagagatggggtgtcgctatgttgaccaggctggtctccaactcctggccccaaatgattctcccatctcagcctcccagaatgctgggatttcagtcatgaaccactgcgccctgcctaatttttaaatttttcattatcccaaaaagaaacttttgtccattagtagtcagtcttctcccctctccccacccctgggcaaccattaatctattttttgtctctagaatagatttggctattcctaacatttcatgtaaatgggatcaaacaatatatagtctttactgcctgatctttttcactttacataatgttgtaaagattagtccatattgtagaatgtgttagtacttcattcctttttattgccaaatagtattttattgtatgatatataccaccttttggaagttcatttttatgggaacacataggacctgtctggggcccagcaatctcaattcttaccttttcttcctttggttttctttttaaggcatggctatgaaaagcccacgcccatccaaacccaagctattcctgctataatgtctggacgagatttgattggcattgccaaaacaggaagtggaaagaccattgcttttctgttgcccatgtttagacacatcatggatcagaggtcattagaggaaggagaggggccaataggtacaattcttttcattaaactatttttcaaataacagctttgttgtcaaacagaaagaccttatagtttataatgttcttaattatgacaatgaagttgtctttatgtacattttctttatcaatttggcactttggggctgatttccccttaccagcaggtggagtgagaatcttcagagctctggagtgacatctcagaagtacaaaaacagcctctcctggcacagctcagtttttaaactctgacttggcaggtagactcctcgtgcatctatctgtttatttatattgaggtttgttagcccagtatcagtggatatataaaagcgacatggaagatatcctagggaaacatattttcctaggtagtttttggccttaacaggctataatgccagcatttcattcaagattacttgtttagattctggtttcttgattcatcttggcagagataactcttggaaagttgagtagggttttggaaagttgttcagcttctctcttaggaacacggggcatagtatatctctcctctgtctgtgcccctcagaccaaggttgtttctggaagcagcagtatggcttctgtggcacagtgagtcacttgattttctttgttctgtgatttgcattagaaaactgtttgcattcttttgaaccaagtattttcctgagggttggatgaggcatttaactgtcatttatcttcttttagcatgtttttaaaaatctgcttatatttatccttccccacaacctctgctgttatacaacttttgaaatagttttcagggatgcataacaaaacaaaaattaggtgaaacaatctgaactttattgtaaaggttaaattgaacactataaagcacagccttaagaattttggtggtkaggctactgatgtatttatctttccagctgtcatcatgactccaactcgagaactggctttacagattactaaagagtgtaagaagttttccaagactttgggacttagagtggtctgtgtttacggaggaacaggaatcagtgagcaggtagttatataagaaacattcatgttttccattcttttctcaagttggatgattcaataaagtaaaagtgacttttacttttagttttttgaatagtgattgcttctaaaatcatttaaaaaatgaagtataaaaataatagtaagaattagttattttatgtaggatgaatacctttggagatgtaatgtacagcatggtgactagttaatgttatattgtgtgctgaaaattcgctaagccagtagatctcacatcatgttttttttttttcttttttgagatggagtctcgctctgtcacacaggctggagtacagtggcgcgatctcggctcactgcaacctctgcctccctggttcaagcgattctcctacctcagcctcccaagttgctgggactacaggtgcctgccaccacgcctggctaatttttgtatttttagtagagacggggtttcaccatattggccagattggtcttgaacacctgacctcaggtgatcctcctgcctcggcctcccaaagtgttgggattacaggtgtgagccaccgtgcctgaccaatcttacatgttcttaccacaaaagaaaatattggtaactatatgaggtgatatgttagcttgattgtgttcatcatttcagagtgtatatgtatatcaaacatgttgtacaccttaaatatatataatttttgttaattatgacccaatatagttgtggcaaaaaagaacatactatgttaatgctagattagaatttttgaatctttttacatagattatccctcctccctcttcccctgcctgagaaagcagattttttttttcattttacatatgaggaaatattcagaaagatttattaagttgaccaattaggttaatacgttctagagtttgtcctggaacctaggtctctgatctctgagcatttgtttctctaatctatgctgacatctttaaaaagtgatggtggccaggcacggtggctcatgcctgtaatcccagcgctttgagaggccgaagcgggtggatcatgaggtcaggagctcaagaccagcctagccaacatggcgagactccccgtctctactgaaaacacagaaattagcctggcttggtggcgcctgcctgtaatatcagctactcggtaggctgaggcaggagaatcacttgaacctgggaggcggaggttgcagtaagctgagatcacgccactgcactccagcctgggagacagagcaagactccatcttggggggtggcggaagtgatggtgattactgggatgcattaatatcagaggtgttttgttgttgttgttgttgttgttttttggttttgttttattggagacagcatcttactctgttgcccgggctggagtgcagtggtgtgaccttggctcactgcatccttgacctcctgggcttaagccgtcctccctcttgagcctcctgagtatctgggaccacagacgcatgctaccacacccggctagtttttgtatttttttgtagagacgaggttttgccatgttgcccaggctggtcttgaattcctgggctcaagcaatctgcttgccttggcttccctttgtaacacctccgaaaggtatagacgtgagccactgtgaccagcccttcagctgtcttctaaagaatgaaatagttttcagatattttgcttaactagaagaaggcaaaaaagtaggttctgtgattggataagttttggaaatgttggagtataaaaagttaaaaccactttctttcctgtaagacttctttgttcttaataagctaatgtatattgtgttgctagataaatgggataaattaagtgacgttttctgaacttaactacaaaactgtttcttaggactattgttacaagaacacacttcaagaatatttgcttttgttaactccagtgctattttaattacttcaaattacttcattttctaagtttatctttatgatttttcatgactgtagtttgtagaaatacacttacaaaataacatggtacatgcctgcacgttgtatttatataaatgccaaacaaaagttttatgatgttaagggacttctggtattttccattccatttcatttaaaaaatgctggttgtggttgaacactatggctcatacctgtaatcatcacagcattttgggaggctgaaatggaagaatcacttgagtccaggagtttgtgaccagcctgggcaatgtagtgagaccccatctcttaaaacagtaaataaattagcgagtgcctgtagtcctagatactgggagggtgtgtggggtggtggggggaggggctgagatgggagggtcacttgagcccaggatctaggctgcaatgacctatgatgacactgctgcactgggcaacagagcctgggcaacagagtgagaccctgtctcaaaaaaaaaaaaaaaaaaagctgattatgactgttaaagtgatttcatgattcactaatgtggcaaccctcaatttgaaaaacactagtctatgtggtcacttagaaatttctttttctgaggcagggtcttgctcttgctcaggctggagtgcaaggatgtgatcatagctcactccaaccttgaactcctgggctcaagagattatcactttttttttttaaactkctttcttaagttcatttcttggttttgagggatagtggcaaatcaaatttgcagaattctctagttcttatttgtttcaaatttatggcactatgtggtcacgttgttgctatttctttagtagtgccccgagattcaaaataattaagcaggaagcttggaagtcttctaattagactaggcaagaactaaatgcagtattttttagtgtttaagtaagcattagtaatagactataaagtttcatcttttttattagattgctgagctgaaaagaggtgctgaaattattgtttgcacacctggtcgaatgattgacatgttagccgctaacagtggtaagtcaggggtatttttttggtgtcttttatttttgaattctttacttttttttgttaaaacagatgcaagaaaccaacaaagggtttctatatttcttcttaaagctgcagtatcttaaaatttgtagcctgtagtcccagctacttgggaggctgaggcaggagaatagcttgaacccgggaggcggagcttgcagtgagccaagatcgcaccactgtactccagcctgggtgacagagtaagactccgtctcaaaaaaaaaaaataataattgtaacaagttgattattacaagcattaatgatatttttgcaatttaaaattttttttcagaagtaactccatctgatcataacttggattcttaatccakttttggcctggctttgcttagtaaaagagtggggtagtagctttttctttattacaaaatttagactttttctccacatgagctagtattttcttagatactacataaattaagatattgcagcttcaagaaattttatcttttgtaaatattgcatgtttgtagctcaaatgttatgctttgttaaattattccctatcaaaactcttactaaactgttgacattatttaacttctgtggagaaaggcccttcaagatttatagaactgggcttccgagacttaaaccatcaaaggtaggtaatttaatgctgttcccgaccttgcaaaactaattggggctacaaatgctagtgtggaatacttaaatattagatagcacttattttggcactttttattttttgaagaaaatgctctcagaggtttccattgcaatatttagtgtgtacataatagagtattaaaaactgagttagtgcatgtttctagtagtattctgcttgaatttctaattctaattgtacatgaagttggcaaagtgacatcgaaattgagaagtcattgtgcttgtctagcatatggaaagttttggtttgaatgctgattaaataatccctttttttttttctcaatgctgcattgattaagtctcctcctgaaattcatcttgattaattttacckttttctcttatctgtcattgtggtctatttttaaataactattttatacgtgtttttgccaggtgattgattcaacagttgatagcaatgcttctgttaatattttagaaggaatttcctatgtatgtattttgttttcactggttaggaagccagttgcatttatttaagtcagtgggttcacttaataaaattgggatttatatctttgtatggaaaatgtatttatgtaatgtgttttggtatttaaagtttttgtgtgatactttaatttcctaatgctgtcaaatagcttctcattaagggtttgacatgcccatttaagaagcttctaaatatatggaagtaggttataaaataatatagagagacattttctgtgtctaaaatagttagcactagaacttgctttccacacatacgctgtaatctctaatatgtttttttctaggtgatgctgtcagataatggctgatgtggctcgatgcttcatctcagtcttagttttatgatgtgttttggagagggctgttttctgaattttacaggttcttcaggccctatgatggtatgcaagagacgagtttgacaaaataaagggcctcatatacccattgtcagaaagtatttgccactagattaagacattgtagatcaaaatttcttttcactttttaaagatacctaacttacccctctggttaagtcaggcattttagtttcctttacagtttttaaaagttcttggtagccataaaatgaattgtgactgatttttagttttctttttgtctttatttttcttttcatcttaggtcgggtcacaaatcttcgaagagtgacatatgttgttytagatgaagcagacagaatgtttgacatgggttttgaaccccaggtaatcattaaatttcttaagtgttttgaaatgtaaatataactttgtagttgccatgagaatgaaatgttcatgtggtttctgaaattcacacacacacttttctgttgcacggtaatacagaagactggggacatacagtattgaagtacatatttatgtttcagattcctcacaaaacttcttcaggaggtatttataccggcatttcttagccatctaagaccaacaccaacaaagctagaattggagtgctaataatagagcttaagccttatttttttttttcagatggagtcttgctctgtcgcccagactgcagtgcagtggagaacgatcactactcactgcaacctctgcctcctgggttcaagcgattctcctgcctcagcctcccgagtacctgggactacaggtgcccgccaccacgcccggttaactttttaatagagatggagtttcaccacgttggccaggctggtctcgaactcctgacctcaggtgatccacccgccttggcctcccaaagtgttgggattacaggcgtgagccactgtgccyggcccattgtctttttaaataaattcttttaattcatgcttttagatacctcattatctagtctagatagcacgtcatttacgtttaccaaagtcattcacgtttgctaagataatggcccaaagaatttatctagcttaggtttttatgttccttatatatgctctttgctcaggtacaaaatttcagtgatacacatttataggaacacattttaaaggtggtagatgaggtcaggagatcgagaccatcctggctttcacggtgaaacctcatatctactaaaaatacaaaaaaattagccgggcttggtggcaggcrcctgtagtcccagctactcaggaggctgaggcaggagaatggcgtgaacccgggcggcggagcttgcagtgagctgagatcacgctgttgcactccagcctgggagacagagcgagactccgtctcaaaaaaaaaaaaaagtggtagaaggttttcttaagaagatcattgtgaattgtcagtaggctgtagttgccaaaaaatgaataaaaaaggattataagagaccatagtaatggaaatgtgcatggaaaagggataaggcaaatgtcatatttagccttttcagtttatccatgtactctccaaaaatttattgccagttatatgttagtgcatgtattgtatttagatttagggactgcattctaaatgagatgtaaatagaggaacacagaggaagcaggattatggtaatgcttgaaccatatgcgaaacagttaaaatgatatttagctttgggcagggaatggtggctcatgcctttaatcccagcaatttgggaggccgaggcaggcagatcacttgaagtcaggagatcagcctagcctggccaacatcgtgaaaccccgtttctactaaaaatacaaaaattagctggacatggtgacgggcgcctgtaatcccagctacttgggaggctgagtcaggaggatcacttgaacctgggaggcacagggtgtagggagccgagatcgcattactgtacttaagcctgggtgatagaacgagacttagtctcaaaaaataataatataataataataatagtaataataatcagctttgagtagaagataagatagcatcctttaactctgaacaagtgtcacatgaaagcagcattgaatttatttttttcatcccaaggagtacaaatgggatccagtggggaagtcatatggagcttgatctgagtttagtttgaggaaggactgaataaacattatttggagaggaaacattgcttcgtgagggagcgggggcggatatactgaatatctgtttcttccaggtgttcaagcagagtcaaggggtctgtttgttgtggtaagagagtaaagagaattgaagtgtcagatggaacacagtcacatgccctttaatgtctttcccaatcatgtgaaatcttagattttattataatgctttaagtagatagagtgattgatagggaccttctggtaaaccaagttcttatagagtgagttcaacacaacattttccattgaaaggcaaagtgtgaatcattccttgccataaatacatacaggtacataagtacatataaacaaaataaatgattaattcagcattatctcatgtatttatgtccgtgtatgtgcttaggtacatgtatgtgcgtatgtacatgtgtataagtacatgagagagaaatgctgaataattgtttgttgataactgaaaacctgctggaggcttggcgtggtgatgtatgcttaggatctctgcactttgggaggtcgaggcaggtggattgcttgaattcaggagttcaagacaagcagggggcaacatggcgaaacctcgtctctacaaaaaaatataaaaattagctgggtgtgggggcatgcgcctatcgtcccagctactcaggaggctgaagtagcaggattgcttgagcctgggagatagaggctgtggtgagccaacataatacctctgcactccagcctgggcgacagagtgagaccgtgtctcaagaaaaaagaggaaaatttcgatttagtttgtgattattttgtgagcttcatagattaaaaaaacactaagtaaggtttcagtgtcatgcagcactatttggaggtgtagcaacaaaagacactgtcatgtaaatgaaagctagtgctattgaatgcaaagctgcacactgacttatgcctagagaagagttggcaagcagtagtgtgcttccaggcatgattctgtattgaaaatagtgagaattgggaattatttttatttatttatttattttgagacagagtttcactctgtcacctaggctgaagtgcagtggctcactgcaacctccgcctcccaggttcaagtgattctcctgcctcaccctcctgagtagctggtattataggcacgtgccaccatgcctggctaatttttgtatttttagtagagacagggtttcaccatgttggctggactggtctcgaactcctgagctcaagtgatccgcctgccttgacctcccaaagtgctgggattataggcctgagccaccacacccagcctgaaaactgaacagttgaatttagtaatgtggtaacttgggaatcagattctcccctttccctagggtttactgttttttattactgttattgtttattatttttatttttgattgttgtaggcagtctggcaaggattgccctgaggtgtaaacttaaggtcatttcatgtgttttctgagcctgtggtattctctatgtgtggttactttgtaattttctctggatattcatttgttttttaatctcctagtatttaatttttggctgtcgaaaggagaaaaattaaggcagagggaaggggcatcagattttaaatcccctgctagtcacttcagcttgagaggtccgggcttgtagtggttggcggsgtgtgaatgcaacaataacaggcaggtgtctctttgtcttcacctctgtgatcagagtagcaatcagagcagagatcctccgtatttggaggacagagtccttcttgatgaccctggctcttgcaagctctgtacagtttgcttcagaaacatgtgtacgcctgcctgctgttgggctgtatgtgggggatggttaactgctactgtgctaccagctgaaaatggcagaaaatagccacaatttatcttccaggcttttctcaggaagttgcaaaccttctgtaggctccagagttccraagtggttacatcagacagattctatcagcacaattgttgtctaggtgtggatacagattcctggtgattcctgttctgccaacttcccagaatcctcctctttttgtctgtttttgttgcatattcctagtacttagaacagtacctggttcaaaatgggtctttaataaaaatgtgttgaataaatgaaggaaaacagtggtagttggttgtatcctagatataatttgaagatagaccactatatttgttgatggattggttgtaagatgagtgacagagattaatcaaagatgtctcctagatttttgtcctaagcatgtgtggagttgtcatttcttgagattgggagactgtgggagtggcaaaactgagacagttgttctcaaaagttccttttacttggttttaacattgcataagctttgaagaccatatttaccatatttatttgtaatgttttctttttctcaggtcatgcgcatcgtggataatgttcgtcctgatcgacagacggttatgttttcagctactttccccagagctatggaggctttggctcgcaggatcctcagtaaacctattgaagtacaagttggaggcaggagtgtggtttgctcagatgtggagcaacaagtggtgggtaccatctttaggaaattcccagtttccttgatacttaggtggtrtgtatgattcttctatgatcactgtttgtgaggtaggcaaggtaatttctaaaatcaagtcgtataccactactctagccttcagtattttaccagataaacytaactgtgctgttccacggagctatttaaaatgctrgtttttttttttttttkttttttttttgctgggtgcagtggtgcatgcctgaagtcgcagctttgcagtccccggagttctgggctgtagtgcactatgcctatctttgtccatgctaagttcagcatcagtgtggtgacctcccggtaacaggggaccaccagattgcctaaagaatgggatattctgtccagggcagaaaaacagaacaggtcaaaacttttgtgctgattgtagttggagcacatctgtgaatagcaccctaggcatagtgagccctgtctgtttaaagacaagtaaaataaaacgttgttttagtttctgtcaccaaaagtggtgagtggtgaatggtgagctgatatatagaaatgtcacataccagatgggcatggtgactcatgcctgtaatcccagtattttgggagaccatggtaggaggatcacttgaggccaggagctggagactagcttgggcaatatagtgagacccctgtctctacaaaggaaaaagaaatgttacatayctattttatttcttggttactaggatatgaaattaagagccagagagaacagatgatcatttgccctcatttgcaagcctgttaaaccctgaaartttacaatttttatcatttacaattaaaatcaacatcttcctagcccttggtaaagatatagcaagatattgtcattcattcactacaaataaaatgaatatttctgtccaggggatccatttgcattttcacttcattaacttgatacaatatggtgttttcagattgtgattgaagaagaaaagaaattcttgaagttacttgagcttctaggccattatcaagagtcaggatctgtcattatatttgtggataagcaggaacatgctgatggtcttcttaaggatttaatgagagcatcttatccttgcatgtctcttcatggaggtaattattcacttgattcacacataaaatatctattaagtacttgccaagcattgtgctgtgttctcgatgatacttactttgttctctataattcagaactaaattttatgtcagtttttactctaaagtgctttgtgggagtaagattattattgtctcatctaagagaaagaagatcatacaggcatactttggtttgaccaagttccatcgccatttatcaactatggaggaattgaatttaacttttctctgtgttataccctttccattgtacgtgctatctgtaggttttcatgattcactttaaagagcttttattgaaatttcaaagtaacgttttaatttcttgtgatattgctatcacatgcatgtaatagcaatatcacagtatgtggaactagaacacaaaacacagaccgggcatggtagctcacgcctgtaatcctagcacttggagaggctgaggcgggcagatcatctgaggtcaggagttggagaccagtctggccaacatggcgaaactccatctgtactaaaaatataaaacttagctgggcatggtggcacatgcctgtaatcccagctacttgggaggctgaggcaggagaaccgcttgaacctgggaggcggaggttgctgtgagctgagatcatgccactgcactccactctgggcaacagagtgagactctctccataaaaaaaaaaaaaaaaggccaggcgaggtggctcacacctgtaatcccagaactttgagaggctgaggcgggcggatcacctgaggttgggagttcgagaccagcctgaccaacatggagaaacccgtctctattaaaaatacaaaattagccgagcatggtggtgcatgcctgtaatcccagctacttgggaggccgaggcaggagaatcgcttgaacccaggaggcggaggttgccgggaggcagaagttgcggtgagcggagattgcaccattgcactccagcctgggcaacaagagtgaaactccgtctcaaaaaaaaaaaaaaaaaaaaaaaaaaaaaacacaaaacacatggaacagagacagtttgaattattctcattaactaagtgttctggctatcagtagcttagtaatgaatcactccaaaatttagttgcaatagttacttattttgcttatgaatcttcaatttgcgcagagctcactatatatatctagtctctgtttcatgctgtatgtgctgggacacagtggagctgggcatcacctaccaatctacctcactttatgtggctggcaaattggtactggctcttgactaggagctcagttagaccttggtcatgggcccttgtgggcctctctatgaggctgcttggccaagaggaaagaacaagaagctgcccagccagttaaggatgatactggagttggcagagctttcatttctgccatatacaaataggttggttaccacactggcccagattcaaggggatggaggcataggtgtcacttcttgattgagagagtgtcatcccacatgcagaaaagcatatggaataggacatatctttgaaatacagtctacttccagcaggcttcatatgggatgaaattaaaggggctttgaagatttgtgtttggttaacttttaatgtttgaaaatgattttttatttatttattttgagacagagttttgctcttgttgcccaggctggagtgcaatggcgcaatcctggctcactgcaacctccgcctcccacgttcaagtgattctcctgcctcagcctccccagtagctgggattacagacatgcaccaccatgcctggctaattttgtatttttagtagagacggagtttctccatgttggtcaggctggtctcgaactgccgacctcaggtgatccgcccacctcagcctcccaaagtcctgggaatacaggcgtgagccaccgtgcccggcccgaaaatgacttttttgtgtgtggtaaatactcactatataaaatatccccgccccccaccgtttttttttttttgttgttgtttgtttgtttgtttgagacagggtcttgctctgtcacccaggctggagtgcagtggtgtgaatctcagctcactgcaacctctgcttcccgcctcctgggttcaagcagttcttgtgcctcagcctctcaagttgctgggactataggtgcatgccaccatgcctgactaattttttgtgtgtgttttagtagagacagggttacgccatgttggccaggctgttcttgagctcctgacctcagataatccacttgccttggcctcccaaagtgctgggattacatgcgtgaaccaccacgcccggccttagaatgtaccattttttgtatataattcagtgacattaagtatattcacaatgctataaccttcactactgtctatttctagaacgttttaatcaccctgaatagaaactaccattttaagtaacaagtttcttttcccatccctgagcagttgctcataacctctattctgctttctgtctctatgcatttgcctattctgggtacctcctataagtagaatcatacattgtgtctttttgtgactggtctttttcacttagcaaaatgctttcaaggttcatctgtgttgtagcatttgtcagattttctttgtaaggctgactaatattccattgtatgtatatacagccagcccttcgtgtccatagactgcagattgaaaatatttggaaaaaaatttgtccgtcctgaacatgcacaaaatctattcttgtcattattccctaaacaatacattataaaaactatctattaatacatagcatttacattgtaattggtggttttaagtaatctagagttttttaaagtttccgggaggatgtaggtaatatgggcttactatgccattttatataagggacttgagcatcctaggattttggtatctgccaggggctctggaaccaatcccctgaggatactgagcgatgactacatttgtttatgatttttttagctactattctttgtctacccacacatcagtttttcttaatttttcacacatttcaaataaataggagatcaggttatcacatttcatgtcaatgtgcatatcattaacactagttcaaaacttgtttcactttttttttttttctgagacagagtctccctatgctgcccagcttgtcttgaacttytgggctcaagcaatcatccctcctcagcctcctaagtagctgggactatagcaaaatttgtgaatatttaaaaaaaaaaaaaagctgggtgccgtggctcacgcctgtaatcccagcactttgggaggttgaggcgggtggatcacttgagctcatgagtttgggaccagcctggccaacatggtgaaaccttgtctctactaaaaatacaaaaattagccaggcgtggtggcaggtgcctgtaatcccagccactcaggaggctgaggcaggagaatcgcttaatcctgggaggtggaggttgccataagcagagattgcaccattgcactctggtgtgggcgacaaaagcgagactccgtctcaagaaaaaaaaaaaaaaaaccctaatctgggcacagtgttgcatgcctgtagtcccagctactcaggagactgaggtggaaggattgcttgagtctaggagttcgaggccagtctgggcaacatagtgagactctgtctcttaaaaacaaaccaaaaaaaatctaagaaatttccctcagtttatctctgtccctacccctccagagttaaccacttttactttttttagatggaatgtcgctctgtcgcccaggctggagtgcagtggcatgatctaggttccctgcaacctccacctcccaggttcaagtgattctcctgcctcagcctcctgggtagctgggactacaggcatgcaccgccatgcccggctaatttttgtatttttagtagagacgggatttcaccatgttggccaggatggtctcaaacgcctgacctcaagtgatccacctgcctcggccttccaaagtgctggggttacaggcgtgagctcctgcacctggcctgagttaagtactttaaacaaattttttcaacatggattagttttttttacctcttagagttatagataaatggaatcatatgtaatgcattattatttatgtaaggtttcttttagcatatgccttttgagattgatccatgttgttgcatgtatcagtagttcttccccttttattgctgaataayattctattatatgactatgccacagtttagtcatttctgttggacactggggatgggggctgcttccagtattttggttgctttagccacatcccgcagaatataccataatcaggttgcagaacagttccatcacttcctaaaaaactccctcatcgtgtccctataaaggtaattaattataaaggtacctttccctatccataaycgctggcaaccactcgtgtgtgtttttgtttgtttgtttgtttgtttttgaggcagagttttgctcttgttgcccaggctgtagtgcaatgatgccatctcggctcactgcaacctccgcctcccgggttcaagcgattctcctgcctcagcctcctaagtagctgggattaccggcatgtgccacctcgtctcactaatttttgtatttttagtagagatgggttgtcgtcatgttggtcagggtagtcttgcactcctgacctcaggtgatccacctgcctcagcctcccaaagtgctggggttacaggctgagccaccacacctggcctcatgtattcttttaagaacgtttgtaggccgggtgcagtgactcatgcctgtaatcccagcactttgggaggccgagttgggcagattgcttgagtctgggagtttgagaccagtctgggcagcatagcaagaccccatctctatgaaaaaatttaaaaactataaaaaattagcctcccagctactcaggaggctgaggtgggagggaggattgtttaagcctgggaggcggaggtttcagtgagcygagattatgccactgtactcccaccttggcgacagagtgagaccctgtctcaaatgaaaaaaaaagtttgtaatggaatcctacagtatgtaactttttgcagttggcttttttttactcagcttaataactttgatatgcatccaagttccaagttcttgcatagtttatttatttatttttttccttgagacaacttttctctgttgcccaggctggagtacagtggcactctctcagcttggctcactgcaacgtctacctcccaggctcaagcgatgctcccacctcagcctcttgagtagttgggactatacgaatgtgccaccatgcccaactaatttttttatatttttttgtggagatgaggtttcaccatgttgcctaggctgatctcaaactcttgggttcaagcagtcctcccgccttaagctccagagtattgggattcaagcctgagccacggtgcctggcttatagttctttttttcttattactgagtagtattcattgtatggatttatcactgtttgtgtatctgttcatctgtttaaggacattttagttggttgttttttttataattatgaataaagctgctattattcaaataaaggtttttgtgtgaatgtcagctttcatttctctaggatggataacaaaaaatgggattgctacatcatatggtgactatatctagggatggtattatttgtatttattctgtgtggggttcatttaacttctagaatctgtaaatttatgtcctgttctgaatttgggaaattcttcgttatttctttcctgccttattctctctttgggacttcagttatgtatatgtttgactttttgatattgtctcactgatgctttgttcagtctttttcaaccttttttttcccctctgtagatcaaattggataatttctttcttttttttttttttttttttttgagatggagttttcttcttgttgcccaggctaaagtgcaatggcactatcttggctcaccgcaacctccgcctcccaggttcaagtgatttttgtgcctcagcctcctgagtagctgggattacaggcgtatgctaccacatccagctaactgtatttttagtagagacagggtttcatcatgttggtcaggctggtctcgaaytcctgatatcaggtgatccacccacctcggcctcccaaagtgctgaggttacaggygtgagccaccgtgtttggccctgataatttcttttaccctgttgtcaacattatcgttttttttttttttgtcatcgcctatcaaattctgttaagcccatctagtgaatttttgaattcagtttttgtatttttttagttctaaaattacaaatatgttctcttttagattttcttgtttgtctgattagattttctagacgttccttgtaagcatttttaaaaagtcttgatcataattattatatgtgctttgaaatctttgttaattttaacatctgggtcatactggtgtcagtctctattgactgtcttttttcttgatttttgttttatggttttgtctttgtatgtctagtaatttctgtttgcatactggactttgtgaatgatccattgtagagattctaaattctcaattctctgatgtccccgtcaagtggtgttttgtttttgtttttgtgtggtttccaaatagggcattaacttggcagaacccagcatccaaactctgtctgcctttaatgggcagcatctgaaatctcttactttttaattttattattattttttatacggagtcttgctctgtctcccaggctgtgtgcagtggcgtgatctcagctcactggacctccatctcccaggttcaggcgattttcctgcctcagtctcccaagtagctgggatgacaggtgcgtgccaccacgcccagctaatttttgtgtttttagtagagacggggtttcaccatgttggccaggctggtctggaactcctgacctcaggtgatccacccaccttggcctcccaaagtactgggattacaggtctgagccaccgagcctagccctgaaatctctgaatttttttttttcatcccaactgcttagatttttgcctcatgaatctgtagcttaggggtcagccagatagttgggcagcatatatacgcacagttgtgggtttctgctccattcttctcaggatttatctcctctgtttcccagtcctgagtttgttttgaacactttctggtggtttttcttataagactgagtttctgttcaagttttgacttcctcgcttggtctgtgcacggcctgcccctaagcaaagagtttgaaataaataagtaagtaaatagaatcctctacactttgccagtgccagtgcaatactttcttccaagtgtcaactttcttcccatttctgctgctgttagtcgctctctggtgtctttacgtagttgctctttattttgcccagagttcatggttgttacctgccggagggattggtccagtaaggtttctcctacattgttgggaatgtgtgtttttatatagtaaggaagttgtttcccgtaatacttgtctttaatactccttttatctttttggccagaattgtatcatatcctatgcgtaagcctcatttcataggcmaagagaatgacaagtgatgatgattcttcttytttttttttttttttttttttgagacaatttcttattgtcttgctctgtctcccaagctggagtgcaggggtgtgatcacagcttactgcatcctcgacctccagggctcaagctgtcctcccacctcagcttcctgaatagctgagactgcaggcatgagccaccatgcctagcctatttttgtactttttgtaaagatgggtttttgctatgttgcccagggtgatctgcccactttggcctcccaaagcgctggaattacagacgtgtgtcctaggacctctgagagtccctgagatgtcaggaggtttatgaggctatatgtattttcataataatccaatgatgttatttgcctttttctcattctctcttctctctagtatgtagggtttgccacagactaaatgacatggtatattgtgacagattaaatacagaagatatgacactccaattatcttccattaagcgagacctgaaaaagattggcaaaaatgtaaatcagtgccatttgtctttttattttttttgggacagggttttactctgtcgcccaaggtggagtgcagaggcacaatcacagcttactgtagcctgaacctctctttgctcaggtgatcctcccacctcagccacccgaggagttgggactacaagcgtgtgccaccacaccaggctaattttttgtagagagggggcttttccatgttgcccaggctggcccgtttgtcttaataaattattttattgttccggaaaagtcatttttcacaaaaatatgctttttattttaacgtgtcattgctattttttttagtcttttaatttttattcaaaaataatttttaaaatttagctctctgactctgtgcttgtgccttcaacactttcaccatgattttctgttccttgataaggaaagcatgcttaatcctgtcatgatcacatttaacacacatggaaccaccataggctctgctgacatgtttttttttgttttggacattcacgtaacaatattagatctcacaacacaaaccccttgaagtctgcatgggcacatgccacctgcagattttggtgctttcccaactttgttggtataaaggtaaacaattctattaccagggattccagacaacctagttttgttaaaggctgtattgtagaaagcctatgacaggcagtatgtcaaatgcttgaccattctgagtgcctctagayaacacccctgaaagaagaactgtatttttttttttttttgagatggagtcttgctctgtcgcccaggctggagtgcggtggcacgatctctgctcactacaacctctgcctcccgggttcaagctattctgcctcagcttcctgagtcgctgggtctataggcgcctgccaccacgcctggctaaattttgtatttttagtagagacggagtttcaccatgttcactaggctggtcttgaaatcctgagcttgtaatccgcccgcctcggcctcccaaagtgctggaattacaggcatgagccaccgcttctggctgaggaactgtatttttaaacaaatccagtatttaaaaatttcctcagttctgatttcttttcttttctttttttttttttgagacagagttttactcttgttatccaggctggagtgcagtggcatgatcttggctcacggcaatttccacctcccaggttcaagcaattctcctgcttcagccttctgagtagctgggattaccggtggctgccaccatgcctggttaatttttttttgtatttttagaagagacagggtttcaccatgttgaccaggctggtctcaaactcctgacctcaggtgatcctcctgcctcggcctccgaaagtgctgggattacaggcgtgagccttgcccccagcctctctgttctaatttctaatacattaagtattgatagacaagacctaaactaaagctctttgggtgcgggttcttattgattttaagatataaagacatcctaaaggccaggcctggtggctcatgcctgtaatttcagcactttgggaggtgggcggatcacccaaggtcaggagttcaagaccagcctggccaacatggtgaaaccctgtctctactaaagatacaaaaattagccaggcatggtgacagtcacctgtagtcccagctagtggggaggctgaggcaggagaatcgcttgaacctgggaggcaaaggttgcagtgagtccagatcacgctattgcacaagcctgggcaacatgagtgaaactccgtctttaaaaaaaaaaaaaagagacatcctgaaaacagaaagtttgagaagggctggtttacaccaagcacaattcactctttgagactgggattaggcccgtctctcatttgatgtatacctgactatgtgttgggttggtatgtgaacaaaattggggttattttaaaaaggaagggggttcatggtttttgggttgacatcccatatgctgcttcagttagcatattatattcaattctaaggaatcaattttatgtgattatgttagtaaggatactttaggctaaagtaaaagttttggtattttcaaattataaacaaatttatattgatattgatttcattaaattttcttaggcaatttttttggtgaagtgttagattccagtttctttgacaatgattcaaatacttcctttaaatcaatccttgaagagtacctttaaaattttaggtagtactaagaattaatattggtaattatttacgtgctaaacagtgtatgttaaacccagattttctgtgaaatcttccattgaaagcatgagttttaagttttgagagtttatcttattcccttctctattaccagagtttcctgggaacctcatcataaaatattttgtggtctgggcatgtcgtaatagaactttatggtattttatactctgctttgccattcatactaaacctctttggatcatttatttaagagatatccatttgggtacttctaaaccagtattcctaaaactttaatttgcatatgataatcacctaaggttttttaaaatgcagattttgattcggtagtttggagtataaccctagattctgcatttccttttttttttttttccccgagacagagtcatgctctgtcgcctgggctggagtgcagtggcgcaatctcggctcacggcaaccttkgcctcccaggttcaggcatgtgccaccacgcctggcttttttttttttttttttgtatttttagtagagacggggtttcaccatgttggtcaggctggtctcgaactcctgacctcatgatctgcccgcctcggcctctcaaagtgctgggattacaggcatgagccaccgcacctggcctagattctgcatttctaacaagctcccaggtgatgctgctctggtccttggacaaaaccgagtagcaaggctctaaataacctacagggaaaggagaaagatctaactcttgtcaatataggctgaatgtttctgccttttctcgctttggctcccaaacaggtttagattaatttctgatattggacctttgcaaatataaaccttatatagaagaaagggggcaatacaagaccagagttgaaagattcataaatgagttaatagcaataacctttaatcttgccattacattttcttagtcttttattttctatattttaggagttggatgtgtcaatttgttcttcactgagtttagattcttggtcagaagacatggaaaatttaatttgaacatgttttaaagctctctaatttacttgcaggcattgatcaatatgacagagatagcatcataaatgactttaagaatgggacctgcaaacttcttgtggctacctctgttgctgcccgaggtctagatgtgaaacatctgattcttgtagtaaattatagctgccccaaccattatgaggattatgtacacagagcagggcggactggaagagcaggaaacaaggtaaaaataagytttttatagttgatcttcattatattaaaatacaggtgtttstttagtatttcaaggagtagataataggagttatggagacattttgaaaatctttaatccacataatgtgaagagtggttgatgttaataatttatatacatgtacaggtctaagtgttgttcaaattatcagatacctagctgctctttgtaggcagatcctgttaacagtttgtcttcccttttaggtttttcccctcatgcctaaacgtttctatacagatgttccttgatttatgatggggttacaatgtcccgataaacccatcgtaagttgaaaatgcatttaatatacctgacgtactaaacatcatagtagcctagcctacctttagcatgctcagaacacttacattaggttatacttgggcatcatcatctaacacaaagcctattttataataaagtattgaatatctcatgtaatttactgaatactgtactggaagtgaaaaactggttgtataggtactcaaagtacaatttctactgaatgcatatcacttttgcaccatggtaaagttgaaaaattataaattgaatcattgtaagtcggggaccatctgtatacacatacacataaatgtttatrcttcaggatctttttttaaaaaaaaacatgggatcataaaatatacccatctccacacctaccaatttctcctactcccctctttacctccctatcattcatacatacatatgttacttgcttttttgactcacctgtattctagaaactgtatgggtctaactcattccttctagaggcagcagactagtctgttgttggagacattgattatgatatatttaattttctaaccctgtacattgcataataaagcaataagtagtatttatatgccatagcttacattaatggataacgtattatctgccatatataatgtcattttaactgttttacatatataatgttattttatccttacatatataatgtcattttatccttaaaacgatttaagtgttttacatatgtaatgtcattttatccttaaaactttcctttgaggtaaataatattactctattttatagatgagaaaaattcatgcacataggatttagctcacctgcttatgcacatttaataagtagtaatggcatttattcttctaacctgttggaaggagtcaagaatatttttttggaaagggccatgtactgaaaattgtagcctatttgggctctgtcacatattcttctctttctctctccttctctgtatatatatgtgttattgtatatatgttcataaccctataaaaatgtaaatacttgtagccccgtaggagtacaaaagcagaccatgggtcaaaggcagtggctatttagatatttctgtttttgtttttgtttttttgagatggagtctcgctctgttgcccagactggagtgcagtggcatgatcttggctcactgcaacctctccctcccaggttcaaacgattctcctgcctcagtgtcccaagtagctgggactacaggcgtgtgccaccacgcctggctaattttttgtatttttagtagagacggggtttctactaaaacctgtgttagccaggatggtctcgatctcctgacctcgtgatctgcccgccttggcctctcaaaatactgggattacaggcatgagccactgcacccggccaagatatttctgaattaaaatcttaaaccatgttttaaaattcgtaacagttggccgggcgcggtggctcacgcctgtaatcccagcactttgggaggccgaggcgggcggatcacctgaggttgggagttcaagaccagcctgaccaacatggagaaaccctgtttctactaaaataaaaataaaaaattagccgggcatggtggcatatgcctgtaatccgagctactcgggaggctgaggcaggagaatagcttgaacccgggaggcagaggttgcgatgaaccaagattgtgccattgcactccagcctgggcagcaggagcaaaactcttgtctcagaaacaaacaaacaaaaaatcgcaacagttgactgtttgggtcagattgtttttttggttttgttttttacatttttgtggagatgtggtcttgccatttttgcccaggctggcctccaactcctaggctcaagctatctttccacctctgcctccccaagtgctgggattacaggtgtgagccattgtacccagcaaggtcagattgttttgtgaagatagcaaactctagcgagactccatctcaaaaaaaaaaaggaaaaacaaaaaacaaaatcaaaaggtatgaccacacaattgtgcatttgtgtaaaattacctatgtttcttttttttttttgagacggagtttcactcttgtcacccagactggagtgcattggcgccatctcacatgcactgcaacctccgtctcccaggatcaagtgattctcctgcatcagcctcccaagtagttgggatcacaggcatgccaccaccacactcggctaatttttttgtgtttttagtagagatggggtttcaccatgttggtcaggctggtctcgaccttctgacctcaaatgatccacccccccttggcctcccaaagtgctgggattacaggcgtgagccactgcgtccagccaattgcatatatttctacctctgtgtmaagaaattagaaattttctagtttgcttgtgttattttaaaatattaaacttgggccgggcacagtggctcgtgcctgtaatcccagcactttgggaggccaaggcgggcggatcacctgaggtcaggaatttgagaccagcctggccgacatggtgaaaccatgtctctagtgaaaatacaaaaattagccgggcatagtggcaggcgcctataatcccagttactcgggaggctgaggcaggagaatcacttgaacccgggaggcagaggttgcaatgagccaaaactgcgccactgcactccagcctgggcaacagagtgagactccatctcaaaaaaataaaaaacaacaaaaaataaaaattaaacttggatatttcactttgaaccattaagtaatttagtaagactctttcgtggcttttaaaattctttagttaatgttgtcaatctcgaggatttattaggtggatcagattttatcttatgatctaagtaggatccatcttgttagtgtctaataattgtactttttcatcatgcattagggttatgcttatacttttatcacagaggatcaagctcgctatgctggtgacataattaaagctcttgaattgtcagggactgcagtacctcctgatttagagaaactgtggagtgatttcaaagatcagcagaaagctgtgagtttttaacccatgttactcttctagaaatcattaatgtgactaaaccttgattatttaattcttggaaatcttttatttaacacttgaaaattttgctacgactatttttatttctctctagagggaaaaatgagtgaaagctaaaatcctatcttattcttgaacttagtattttgtggtgtctatgtagagctcttagtttatcttacatgctagatgaagtgtttttattacattgacatacaccaccttgaaaaatatttaattagtatgaattcctaaacattaaagtttttactatgagattaacttcgttttctttttttgaaaggaggggaaaataattaaaaagagtagtgggttctctggtaagggattcaagtttgatgaaacagaacaagctttggctaatgagaggaagaagttacaaaaagcagctcttggtctacaagattcagatgatgaggatgctgcagttgatgtaagtactattattctctcattcttaattgaagcagttatttcttttgtactggaggtcttgccatatatggttatcaagatagacaatcactggaaacctttacaagaggttggttccagaacagttttggaaaatctgcctactacataccagtacccctcctctcaatatatagaccactcattagcacttcaaaggatgtgaaaagtccttttttttttttttttttttttgcgatgggagtctggctgtgtcacccaggctggagtacggtggcgtggtctccattcactgtaacctccgcctcctgggttcaagcaattctcctgccttggcctcctgagtagctgggattacaggcatccaccaccacgcctggctaatttttgtatttttagttgaggcggggtttaaccttcttgcccaggctggtctcagattcctgacctcaagtgatccgctttccttggcctcccaaagtgctgggattacaggcgtgagccacctcgtctggccatggatgtgaaaagtctttaacgaatcttgtttaacttcattaaacccagaaattccccaacatacctgatctcagaacacttttggacatatcatgttaaacttaagttcagaaaataattttggaaatcagaaattcaacctgatcttatcattaggaaattgactccaagaaaagatgttaggtccaggaccacagtgggagttaacacagacaggaccagaacccagttgtcctattaaccttaagccatttctttctaggataccatactagctcaaaaaattagccgggcgtgtcttgctctgtcacccaggccagactgcagtgtcgtaatctcagctcaactgcaacctctgcctcctgggttcaagcgattttcctgtttcagcctccctagtagctgggattacaggcacccaccaccacrcccggctgatttttgtatttttagtagagatggggtttcaccatattggccaggttggtctcaaactcctgacctcaggtgatccacctgccttggcctcccatagtgttgggattataggtgtgagccactgtgcctggccaataaagtcatttttttttttttgagacggagtctcgctctgtcaccaggctggagtgcagtggcttgatcttggctcactgcaacctctgcctctcaggttcaagtggttctcctgcctcagactcccaagtaactggaacgacaggcacgcgccaccatgcttggctaattttttttgtatttttactagagacagggtttcaccatgttggccaggatgatcttgatctcttgacttcgtgatccgcctgcctcggcctcccaaagtgctcagattacaggcgtgagccaccacgcccgaccacatttcattttttaaatttatctgttaccatgtaacaaatcaaaacttagcaggttaaagcaataaacacttattatcacatagttccttatggtcaggaaatcaggagcagtttagtcaggtagttctggcttaggcgctygtgagattgcagtcatctgcaggcttgactgttgctggatgatctgcttccaacatcagtcactttgatgtagataggatgcctcagttcttcacctctttgcctgtccttacccacatggcagctggctttccccacagtgagtgatcaaagagagcaaagagaaagctttagtgctttttatgactgtctctgaaattacacactgtcacttccactttattctttatggggttttttttgtcttgttttgttttgttttggaaacagagtctgactctgttgcccarrctggagtgtagtggtgcgaactcaactcactgctgcctcagcgatcttcccacctcagcctcttgagtagctggtactatgggtgcaccaccatgccctgttaatatatattttaaaatgtttttttttttagagtcgaggtctcactgtgttgcctaggttggtctgaaattcctgggctcaagtgatcctcctgcctcagcctcccaaagtgatggtattacaaacatgagccaccatgcccagcccactttcttctattagaaggaagtcattaagtccagcccacactcaagaaaaaagactattaaataatttgtagccatgttttaaaaacatctgtcactttttgacattatggtagtttcctcttttctgtggttttagttgccataggttaaccacagtctgaaactattacagtattttgagaccacattcatataacttttattacagtatattgctataattgtcctattttattgttgttaatctcttaactgtacctaatttataaattaaactttatcataggtatgtatgtataggaaaaaacagtgtatgtcggtgcggtactatctctgtttttaggcattcactggggttcttggaatgtattccatgtgtaaagggaaaactgcagtatttttaactgttttttaaaatcttgtgataaaatacggtgattgtttcttcgggtgttaaagtaatatataattttatgaaaaatgtaaacagtacttaacacgaataaaatcamaagtaaggttagctctaccagctagcattgtatacttccccctttcctgattttatgaatttgttcagattgtaataccatgaatgctatttaatttaaaacggttttactcaggtaaatgttgagttttaaaactagttgataactgaccccctgttggtgttttcttggggttttgttttgttttgtttttatgagacaggatctcactccatcaaccaggctggagtaaagtggcgtgatcttggctcactgtagcctcgacctcctgggctcaggtgattccccacctcagccttctgaatatctgggactacaggcatgtgccaccatgcctgggtaacttttatattttttgtagagacaaggtttcgccatgttgcccaggctggtcttgaactcctgggctcaagtaatcctcctgccttgaactctcaaaatgctgggattataggcaggagccactgtgcgtggccataactaaaaccctttaataggtaataaatgttttaagaagaatctaaggctgggtgtggtggctcatggcctgtaatcccaacactttggaaggccatggtgggaggatagcttgagcccaggagttcaagaccctcctagacaacacagtgagaccccatctctataaaaaggtttttaaaaattagctggacgtgctagtgcacgctgtggtcctagctacttgggaggccgagatatgaggaacccttgagcctgggagttaaaggcgaccctgtctcaaaaaaatacaaaagctaaacggactgtttttattgtagtaaaagagctttgtaaattaaccaattaatttttaagccctaaataagcttttctgtgcatttgagatctagaagatacagctttattaatctgatctaaatttctgaagggggcttgtatttctgtaatcagtgatatcagtagtcactgttgggcaaagggcattttttaaaagaaatgcacatagcaggctggcggtggtggctcatgcctgtaatcccagtgctttgggaggccaaggtgggcggatcacgaggtcaggagatgagaccatcctgcctaacacggtgaaaccccatctcaactaaaaatacaaaaaattagccaggtgtggtggcgggcacctgtagtcccagctactcaggaggctgaggcagaagaatggcgtgaacctgggaggcggatcttgcagtgagctgagatggcgccattgcactccagcctgggagacagagcgagactctgtctcaaaaaaaaaaaaaaaaaaaaaaaaaagaaatgcacctagcagtagggctcatgtgactcctgtcaaagcaaagcattcatcattgcgcttgccttgatggggaaacaacctgcatttgtttcctttcttgattcaaaggaataagggaataagccttttctggttcagttacccagtttttaaggcaaatccaattggattttatgggttgggaagagttttgagagctttaccttaggaacatgttatatcactccccctgagaattattgactatatttttagtaggccactgaccttgagttatagtccttcttccagcctgtttcattgcagtataatttggtctcaaggcctgagccctggggtaagtcagctgcatcctattggctattctgtcttgaaagcacatgtttcctcatttattgaacagggatgaagtttctggtcctctcaggagtctgatgacgtggttcatgcaatgttgtttctctgttttctatttttctccctaccatagacaactgattttttaaatgaaatgtgacttttaacaaataggtggtatattttcccatggatctgtgtagtaggatttgtgtaamtataactatctgattccagccttttggtggaaacattccttatttatttctgtagaataacttaatttggtatttctaattcagttttttactagtcctttttttccttttgatctagattgatgagcaaattgaaagcatgtttaattcaaagaagagagtaaaggatatggctgctcctggaacatcaagtgttcctgctccaactgcaggaaatgctgagaaattagaaattgctaagagattggctcttagaatcaatgcccagaagaatttgggcatcgagtctcaggtattaagtaatttgttccaagtctcagtcaatacttttaagragttctttgattttacttttcaggaattatgttgaacacaagtaaacaagttgtcctagacattgagtttgtgagaatttaacattctcaatacagaattttttgataattgcatttggatgatttctcagtgctattgactgaggactttgggcctattctggaatttctaactgttagccactggtagttttatagggtagtattctgatgagtcttaacaaaatcttaaagatgtattaataattctctttttctttctttatctgcttttattgggcacacaactccctggatatacaaacacccagttacatgactcaaatcaatatggtcttaaacagtggagaaatgtgatttttaaatatttcacgttatctttttcttggaagcttacttgttattttgaagcttttgaggcagtcattaactataacgtttgtaatgttgggttgggtcatagagatgaaggagctcagtgatggtagtagtacaaacattcaaattcggaggagactcctaggaattagagtatgcaaatgattttcraaatatttactgtgtctgacatcaagagttagctaattatcaactacatctctatgatctagtagaatatttaatagagttgaatgttctccagttttcttatccactaggaggtacattaaactacattataaatatatattgctaaatcacacatatcaatgagactatgcattagaaaggtttatttattaaacttgcatrcaaagttagtagcttttcagagaataatttgtggtgtggtccctactcttgtctctgccctcatttgagatttaactaagtcttctttaactacaggatgtgatgcagcaggccaccaatgcaattcttaggggtggcaccattctggctcccactgtttctgcaaaaaccattgcagaacaacttgctgaaaagatcaatgccaagctcaattatgtgccgttagagaaacaagaagaagagagacaggatggtggacagaatgaatcttttaagagatatgaagaagaattagagatcaatgacttcccacaggcaagtaacaggtttaaacctttttttattgtgaagtagcaactcttctttggaggaaaaatctcatctttaaaacccatgaacattttaatagctccttcactctttacctaaatggaggatataacaatagaaatttgatttttatgagtatgttcaaggtacattaggatctaaatgaacttatgatgcaggtatgtattaataatgatctttgttttctttgcttgtttgttgtttttttttttttttgagacagacttttgctcttatcgcctaggctggggtacaatggtgcgatctcgactcacctcaacctccgcctcccgggttcaagcgattctcctccctcagcctcgcgagtagctgggattacaggcatgcgccaccatgcccagcttatttttgtatttttagtatttttagtagagacagggcttcaccatgttgttcagtctggtctcgaactcccgacctcaggtcatctgcccgcctcggcctcccaaagtgctgggattacaggcatgcaccaccaagcctggctaatttttctatttttagtagagacggggtttctccatgttggtcaggctggtctcgaactcccaacctcaggtgatccgcccaccttagcctcccaaagtgctggaattacaggtgtgagccatcacgcccggccaataatgatctcaatattgaccatagggcccggtgaggtggctcacgcctggaatcccagcactttgggagactaaggtgggtgaatcacctgaggtcgggaggtcgagaccagcctgaccaacatggtgaaaccccgtctctactaaaaatacaaaaataagctgggcatggtggcgcatgcctgtaatcccagctactcgggaggctgagggaggagaatcgcttgaacctgggaggcggaggttgcggtgagccaagattgcaccattgtattccagcctgggcaaaaagagcgaaaactccgtctcaaaagaaaaaaaaaaaagaatatatatatatggagagagagagagagagagagaccaaccataatatgatatcagccagcctagtctttgtcagcactcctggatttttttgtcctgttatgaagtgatttttcttttccttaccttttcttttagactgctaggtggaaagttacctctaaggaagctctgcagagaatcagtgaatactctgaagccgcaattacaatcagaggaacctacttccctcctggcaaagaacccaaggaaggcgagcggaagatttacttggcaattgaaagtatgtactgttagttctgtttcaatcttgaatttagatcaaggttgatgtagatgtaataaacgcaaagagcatgtgaggtcaattctagagagaactgaaagtaagaaacacctctgaaaacaaaatcttatgacatttgaggtctttatatataagaatttcagtacatatgcaaaggtaaatgatctgtttccgagactcagttttggcaatttagtcaaatttgaaaattaaaagaaaacttacattttaaggactgacctgtttatgcttctagtaagtggaatattctggcctaagtttaggttggaaagtaaatcaagtgtattagtccacttaatgaatgtttatctaggcaaatattgcctgtgaaattatccccatgaaagtttatgcctttaacaaaataagaagtagacaatgccacaacctaacggatataaataatacattatgtaacagcaatcaggtttggtttttaactttatttcatacattcatgaatgaattcattccagaggcaatttccatctttatttattttgagacagggtcttattttgtctggctggagtgcagtggcgcaatatcagctcactgttgcctcaacctcctgggctcaagtgatcctcccacctcaacacccccaagtagctgggactacaggaacatgccaccacacctgacttttttttttttgtctttttgtagagacaaggttgtgttttggtgcccaggctggtctccaactcctcagctcaagggacccgcccccactcagcctcccaaagtgctaggattgcaggcatgagccaatgtgcccagcctattttgttttttctgatgtgttactctactgcatagtaggacaccctgtcacactttatttatgtttttgatttttgttttgtttygttttgcttttttccccgagatggagtcttgctctgttgcccagagctggagtgcaatagcgcgatcttgactcactgcaacctccacctcccgggttcaagcagttctcctgcctcagcctcccaagtagctgggattacaggcatgcaccaccatgcctggctcatttttgtatttttagtagagacggggtttcaccatgctggcctggctggtctcaaactcctgacctcatggtccacccgccttggtctcccaaagtgctgggattacaggcatgagccaccgcgcccagcccactttatttatatttaacatctttgttattggtattttaagtggtttttgtttttgttttctgacattatgtgaaatggaagcaagacagaactagactgctagataatagcaccatctgttctggcttcatttccttgacaccatagcattgtagtcagtacagggtttagcactctatcgcccaggctggagtgcaatggcacgatcttggcttactgcaacctccgccttcaggtttcacgcgattcttgtgcctcagcctcctgggtagctgggaccacaggcatgtgctaccatacctggctaatttttgtatttttgggtagagttggggtttcaccatgttggccaggctagacctcttacttcttgattgtactgtctccatttggaactatttttaaaatctgtagcagtcttttgctatttaggacttacattgaggtaaaattcatgtaacaaaagtttgtccattttaaccattaaaaatgtacagttcagtsctcagtaccttcgtgaaacttaaacaggattcagtgaaagcagtgcttagagagaaatttctagctgtaaatgcctgcattataaaagatctccgttaactgccttttttgtgttagagtaatcttttcttttcttttctttttttttttttttttttgagacaaagtcccactgtgtcatctaggctggagtgcagtggcacaatctcgactcactgcaactcccacctcctgggttcaagtaattctcgtgcctcagcctcctgagaagctaggattacaggtgcccccccgccacacctagctaattttcgttttttttttttttgtgagagagagtcttgctctgttgcccaggctagagtgcagtggcgcaatctcggctcactgccagctccgcctcccgggttcacgccattctcctgcctcagcctcccaagcagctgggactacaggcgcccaccaccatgcccggctaatttttttttttgtatttttagtagagacaggatttcaccatgttagccaggatggtctcgatctcctgaccttgtgatccgcccgcctcggcctcccaaagtgctgggattacaggcgtgagccactgcgcccggccaatttttgtatttttagtagggatgaggtttcaccatgttggtcaggctgttgtcaaactcctgacctcaggtgatccacctgcctctgcctcccaaagtgttgggattacaggcatgagccactgtgccccaccgtgttaaagcaatattttcttgtgtgccattttgatttgctcttgtttctgggttttttktttttttytttttttgagagggagtctagctctgtcaccaggctggaatgcagcggcgcaatttcggctcactgcaacggcgcaattttggctcactgcaacctctgcctcccaggcttaagcggttctattgcctcagcctcccgagtagctgggactacaggcaagcaccaccatgcccagctactttttgtatttttagtagacatggggtttcaccatgttggccaggatggtctcaatctcctgacctcatgatctgcctgccttggcctcccaaagtgctgggattacaggcaggagccaccacgcccggcctacttctttcttttgctatatgtatttttaggtttttttttgttttttttttttttgagatggagtctcactctgttgcccaggctggagtgcaatggtgctgtctcgtctcactgcaacctccacctcccaggttcaaggagttctcccttggcctccctagtagctgggattacagatgcatgcctggctaattttatttttagtagagatggagtttcaccacgttggccaggctgttcttgaactcctgacctcaggtgaactgcctacctcagcctcccaaagtgcagggattacaggcctgggccaccgtgcccagccaggtattttcttagcggttactcagtggattgcaattaatatcttaattcataacaacgtagttcaattaatgccaacttagttttaatactatacaaaaattttgctcctatacagtcccatctatttttttgttgttattgacacaaaattcctgtatatgtttttctaagagacagggtcttgatctgtcactcaggctggagtgcaaaggtgagattatagtttactgtagcttcaaactccagggttcaagtgatcctctatccttagcctcctgaacagctaggaccacaggcctgtgccaccatgcctggctaatgaaaaaaatttttttttctagagacagggtcttgctatgttacagtctaggcttgtcttgaactcctggcttctcttgtactcccacatcggcctcccaaacctactcatctttttttgagacagagtcttgttctgtcacctgtcctggagtgcaatgacccagtcacagctcaagcaagcctcccacctcagccccccatttagctgggaccacaggtgtatgccactatgtccagctaaatttttgtattttttgtagagatgggttttcactatgttgcccagactgttcttgaactcctgggctcaagtgatcctcctgcctcagcctcccaaagtgatgggattacaaacgtgagccaccatgctgggcccagacctgtacatcttcatacattctgtattcttcaacatagattcataattattttatgtaatttttaaatcatacaggaaataaagagaagctacaaactaaaaataatactgacttttatatttacgtatgtagctatgagtattctttgtttcctcattcaagtaatctagggttctttcacttcagtctggaggatttccttttgtatttcttgtagggcaggtatactagcaactaactcaggttttgtttatctgagaatttcttaatttcatcttttttttttttttttttttttgacatggagtctcgctctgtcgccaggctggagtgcaatggtgcaatcttggctcactaaaacctctgcctcctggcagcctcccaagtagctgggattataggaacatgccaccatacccagctaatttttgtatttttagtagagatggggtttcaccattgttggccaggatggtctcgatctcctgacctcgtgatcctcctgccttggcctcccaaagtgttgggattacaggcgagagccaccacgcccggcaaatacagctgttatgttttccgtgtttttcccactctaccattgagtcatggtaagtttcatacatatttttaaatggcatacaaaggatgtgtggccagaactaggcaaactacacttttttcttcatgtttgtgactatgagaaactgacttagatctatttgaagtcaggtttaaaaatggcatgcttttgtgtatcctgaaatacttttggtctgccaatgacccagtatgtttctaactcaggtgacactgtttcttattacatagtgaaatggggattgctgacccctgggtcttcaagcagagaaaacttaagctgatgtgtttctgtagttggaactggacaggtctttgctactgtgttaattagatcatacaggctgaagacaatgatagaggaatgtggcaataaaacctttggtgtacatggagtcaggattttattttctgcttgaatacatgggtatcatttaagcaaaattaatattttaactgcttgccttataaagaggtaagtgagagacatgattatttgctttgaaaaagaattcttttcgtaattcatttattaatttaaatgcagtgtttgcttagtatggtataattgatatatcaaatttcaatttatgtataactttatcagaacacatctctactaccaagtgatgtgaagtgagatattcactgattccacagctccgatgtagttttcctttcatccagaatggttctggtcatttgtctccactgtcaatttacactcaggaaataacgtctaatttttataataatctaagcaagtctcctcagtaaaaaagcaactttgttgaagcaaatcttaagaataatctagaaatataatgataatggccgggcgcggtggctcacgcctgtaatcccagcacttygggaggccgaagcgggcggatcacaaggtcaagagtttgagaccagcctggccaacatagtgaaaccccgtctctactaaatacaaaaattagctgggcatggtggcgggagcctgtatcccagctactcgagaggctgagtaccttggaaacagaaggtagaggttgcagtgagctgagatggcgccactgcactccagcctgggcaaaaacagcgaaactctgtctcaaaaaaaagaaaagaaaagaaaaagaaatataatgatattgaataagagctagggtttggtaatttaagtgatctaaatcttttagaattttcagaggtaattagattttttaaaggatcatttagtttttgaaactccgaactcaactaaacactaacaggatgaaaacaggtgttgctactgtggaatgagcctagtgtcatctgtttctagttctgtaattggagggaccccactgcctggctggctccttggaggctctgtttggctcagcagctccaggcctcccaccaggcaaagggaaggagaacaggaaggacttacatgcctagtcagcctgtataatttatatagcctgttctgtgaccctctctttttactagtggagaatcccttaaaagcagccacagttgttttaggaccaatgaaaggaaatgccctttttttcatagctgcttataaacatatgtaacctattacaagaagttacataagtcagaatttaaactggtccaaattgtcgggctctgataaaagtaggaaaattgattttccagttaaatctaggtgagagtgtcattttccttctttttaaagttgcacaaaaatatcaacaagcttcacaccaactcataccaagcaacgtgttttcctcctaaatttcatttttgttgtaattttcagtttgacttcggtcttgattcttctttttctcttcccttccrgcactcaccttccccacgtagttttatagtgttgtgattggtggctagtggaggtataggatttaaattagatatgttgctatgacttcatagccatacccttggccttttccttcctgttgtgcaactgtttctgtctctctttctagctccgtctctgtctctctctggggacagaaaagttactcatttctaatatggggggaaattttctcgtttattataaatctttccctcatttgtgttttttaaaaatacacggaatgataaaaatatagctctctacgttgcaaacccagtcctccttttattcttagacatttcaatctttagtcttctttgattcagctctttttctcttctcagtgtgcaatatggtgtctatctgtacttacctactcactggcattgtccattggctccagattctacccagcctacccttgatggctctctaatctctgccacttctaaacttctggttcatatttccattggcctcatctgtatttccaattggatgtctgatgagcacctcaactacagcaattttagaattaaatttcacccattatcactgtccagaaaacacctgtttacctcctggaatcagtatattcttttacttctgccttttttcacttgccagccagctcttaatatcttaatttgtttctctttttcactgttcatatcccatcagaaaaaatatcttgtccattctacctcaaragtgtgctcttgtgatggtataaatacaatattgtgagagcactaaggaaaaaaacacttaactgtgcctttcagagtcaggaaaacttcctaaaagtggtatttaaaagtgaagtttgtgaactacttccttttcatcctgttttgatatctttacaagtttgtttttctagtctgtaagcttttaaagagcatgaatttrttatttatatgttaaatgtctcacagtatgtgagaggtgagtgcttaatgtttatgaaattgataactgtgaatgaatgtctgcagcctacctcatctagtcagctatcttgcggtgttctttcatactccttttccaaccacgctacgcttctcttattcttcaataattaagcatgcttgtcttaactctgtaccattacgcatgtaattaattycctttgcaaaatactcttatggtatctttcctccctccaattggctagtcctcctttcattttaaagattttgttcagacgagacccttctgaaacatttgtagacttcagtgaacatcataaatgtctaataaatacttactaaatgaataaaccaaggaagttatatttccctttagccttctcttactatctcctggacaaatcactaatagtctttttattccactctttttaatcaccatactaggaactcttaacacataatatgacctcagtggttacatttgaaactctgaaagtaatcaaaataataagcagccattatataatgtgggtaatgttccaccaggcattaaatggctatcttggcaggcagtacagtgtttctgaaagtcacctacagtgtttcttcctggacctccgtgatatgggtaaacacagtgtaagtttagtaatttgaataatatgctttccactcaatcactaggtgccaatgaactggctgtgcagaaagcaaaggcagaaatcaccaggctcataaaagaagagctgatccggctggtgagtgaaaaccttaaagtttcgtttgttttgttttaataagtgttttattgaaatataaatacagagaagtactcaaatcataaacatatagtttgatgaattttcacaaagtaataagcataccagtgtagtcactacccagatcaagaaataaaaaacattactaatatcccagaagtcttctctgtgtctattcttgtcactattcatctccccccaacaaaaccataccttgaattttttttcttttcttttcttttttttttttggagactgagtcttgcattgtcacccaggctggagtgcagtggcacgatctcggctcactgcaacctccgcctcctgcgttcaagygattctcctgcctcagcctcctgagtagctgggattacaggcgcacaccaccgcatctggctaatttttgtatttttagtagagatggtgtttcactgtgttggcaaggctggtctcgaactcctgacctcatgattcacctgccttggcctcccaaagtgctgggattacaggcgtgagccgtggcgcccggccctatattgtgaattttaaaatcatagattagtttttcctgtttttgaactccacataagtgtaatcatgcgtttgcaccttttgcatctagtttccttcactcaacattttgaggagatyggtccatgttattgcaygtagcaataattcattttcatggccatataatatttatatgattatacaacaattaatttatatttatatattggatttgggggctattcttatttttggtttttatgaacaacacttctgtgaacattattccatgtgcgtttggtatatattagcatgattttttccttgggtatatacctcggagtagaattgttaattataggctaggtattgctaaatagttttccaaagaggttacatcaattcacactcaatccagaagtgtagaaaattccagttgttctacatatttgccaacacatggtgttgtcagtgtctttaaacttaaacaatgacttaatttgattttggaaaaagccctttacagactgcctttcccgaggaggtagacatgtccttgtgtctttagtgccagttgcagcttataaacactccctacagtgtgtacatttcctttgaaaggaaacgttgtcttttatctaagtgtaattctgagagcttttctaaaattcccctcacagagcattcctttttttgttggggggtgggggtggttagaagtttaatgaaaagtgggttcacaaaacaagagggaaaaagtaaaacagctgttaaatcatgtgcttaatactatttcaccaaggagtggtcgaaaagaatcttgtgcccatagatgctaccaccattargttgattcaaaacatagttgttaaggaatagttgagtgaacagagaattcattagttattgaatagtttttcctttctcaatgcagtaatagtaacatttaaaattttaaataaccaatagttttataagttggcaaaggaaatgatcttaaatatttccttttgggtttgtttggttggttggttggttcgtttttttttttgttttttttgttttgctttctctgatgacatatcttttatttcctattacagcaaaattcataccaaccaacaaataaaggaagatacaaagtcttatagacatccggaaaaaagatttttacctgtgctggtctatgatgtatgtggcagttgctgtctgcagtttacaatgtattgtaaatgaagattttttaaattctatcttgctgattttttttaaatataagaaactggtacttggtaaagaaatctgtccgtaagtacccccacaatcagtcaaactatatttaaagccagcctgttttcagagtatgatgtcctttaatgtaaactcaaatatcaatattttaaatgtccggataatattctagaggtttaaaaaatggaaatatttgaactttctattgaagacaataaagtacacaagtcgttaaggggctattcactttatcctgtactttcaatgaaattgtgatcatttcctaagaaaaggtaaaattcactatcatattttgtgtccccaccttgatgttacatgactctggaacaatatgaactggatttaagaatgttataatagaagtcttacaaaatgggttgagagtttttgtttcaatttttatcatcataaatgggcaaaaagtagttggactaatttcggtttttatacaagtaaagatttaatagtataaggatttttttgcatttctttacactgagtgtaaaactctacaaagagttatagtatttactactttgaggtttccctcacaacttctggctccatacctagcccctcttttataatcttccttaaaagaaagagtgtagcctataaatactaaatatgataccttttccttctagaaagtgtttatttatatatctatacatgttgtatgtacaaatatcctactacttttaatctgatttttcttcaggattattgagtaggttgtgaattttctttcttaaaaattgtaaaacataatggtacccaagttttaaacttagatgtgcttcatcttagtgaaatttaattcacaaggaatcataaattgtgtttttgaggctgggcgcagtgactcacacctgtatcccagcaatttgggaggccgaggtgggcagatcacttgaggtcaggagttcaagactagcctggtcaacatggtgaaaccctgtctctactaaaaatacaaaaattagtcggcatggtggtgggtggctgtaatcccagctactcaggaggctgaggcagaagaatctgagccaagataacaccattgcactccagcctgggcgacagagtgagactatctcaaaaataaataaataaataaataaatagtatttttgagccttcaagatacagttcctgaatattctaatttaaattgttataattggattacctaatattcttttcaagactcctgatgtattaacttcatgttattgtcacttttcaaaaaaggaatttttttcaggagttaaataaagtcagtcttttatatccaagggtttcaaacccacagattaaaccaaccacagatcaaaaatagaaaaaaaaaaaaaaagaaaaaaagaatgtaaaattttaaaaatacagtttaacagctgtaaaagttttactataacatttacattgtgttaggtattttaagtaatttaaaggttacagtatacaggcggttaaagtatacaggaggatgtgcatcggttatatgcatatagcaagccatttcatataagaggcttgaacatccatggattttggtatagaggaggggtttaaggggtgtcctgcaatcagtccccctctcataccaaaggatgactgtatatttcttaaatgaagagactttcattctttaaatattattgacttacagtttaaaaataaataaataaaagcatactatagttgtaaaaacaaataattttaatagtatattcagtggctgaagtgatagggagtattaatcattatttcttcagtataaagttattcttcctgaaaaagtaagatatacctgggaaatattcttggatccttcacacatccacttaatttcttgaaggaagaaaacagacaaaagacatgtaacaacagaaacaaataaaccacttactgtaaaatttcagaaattgtgggctcattccctccctctagtttatttatttgctcatctttatcacctaatggtagtttgttttctttggtagagtatatggcagtcccacatcgatgataattggtgctcccttcatccaactggatcactttgagattcagttttacatcattttagcattttgtttgtatatcagttgtgatgagccactgataaaattttgttctaaaatgaaacatattactttgttagtacattttttagtgtcacactgacttttaaaatttgaatgatatatagactttgtttttttaatgcaatatgaatatttgctcatgttttctaaattccttataaaataaaattaattcgaattcaatctgcactttcttaaaattatctttcctcaatgctttttctttcttctgtttctctaattttgtttatgttggtgagagaagtattatactctctatttttatttaaaaaattctagcaacttattacccaaaatatttataattctgttccaaaaatgtcttcctgaagaaggctcttaagtcttttatgttcattgtatttagcataagagaaacataggtgaaataataggttcatttaccagttggggttttgccacagtgacactcttacaaaatggatatgtaggctgggtgcggtggctcatgcctgtaatcccagcactttgggaggctgaggcaggcagatcacctggggtcaggagctcaggaccagtctgaccaacacggagagacccagtctctactaaaaatacaaaattagccaggtgtggtggcacatgcctgtaatcccagctactcgggaggctgaggcaggcgaatcgcttgaacccgggaggcagaggttgcagtgagccaagatggcgccattgcactccagcctgggcaacaagagcgaaactccgtctcaaaaaaaaaaaaaaaaaaaaaggatatgtagaatgaaagaataatagctaagttctccctcacactttttggacactttactgtttgatatatttctttttttttttttttttttttgagacagagtcttgctctgttgccaggctggatttgcagtggcgtgatctcagcacactgcaacctctgcctcccgggttcaagccattctcctgcctcagcctcccaagtagctgggactacaggcgtgagccaccacacccagttaatttttttgtatttttagtagagacggggtttcaccatgttggccaggatggtctcgatttcttgaccttgtgatccacccaccttggcctcccaaagtgctgggattacaggcaggagccaccacgccctgccactatttgatatatttcacgtctcactggctttgttggtgtacgcaatgcacatgtgactgctaatcttttgttttgttttgtttttgagacagagtcttgctctgttgcccaggctggagtgcagtggcacaatctcagctcattgcaacctctgcctcccaggttcaagcagttctcctgcctcagcctcctgagtagctgggactacaggcacatgccacaacacctgtctaattttttgtatttttagtagagatggggtttcaccatgttagccaggatggtctcgatctcctgacctcgttatctgcccacctcggcctcccaaagcgctgggattacagggatgagcccactgcccccggcctaatctttcttttgagtcaggcagttcctatgtatagaattgggtttgtttgttttaaaggagaaccagctattgaatacttaggatttataaatcccattcagctagctgtgaaatcagcttcaaagtaacagcagaatcttaagaagcacaaactagaaaggaaaaccgccaaagttgtaactcagttgtttctgacctctttttactattggtgccatgctttgatttataaagccatcagccaaagtcctttagtgacagattagcatattgtttaaaataggaggttgtggggaaattgttgtctaaatgaagtctagtataaatagctacactttatttagtaaaatgtgccattttgctgctttatagatcatgctaagttctttttttttttttttttttttgagacaaagtcttgctcttttgcccaggctagagtgtagtggtgcagtctcggttcactgcaacctccgcctcccaggttcaagtgattgtcctgctgtggcctccgagtagctggggttacaggtgctcaccaccatgcctggtgaatttgtattttgaatttgaatacaaattttgaatttgtatttttatggtagagatggggtttcaccatgttggccaggctggtctcgaactcctgacctcaggtgatccacctgcctcggcctcccaaagcgctggaattataggcgtgagccacggcgctcggctggatcatgctaagttcttaaagcaggcaagagttctgagtgtctagcccaatgtgggccattcaaatactcttccagtcagatttgagtctagagctgtcagttcttcacattttggtacatagttttacctacgaatgggaatctactgacattttctcatgccttctgcttctggcatactgaagcttatcttttaaaaaggtacgtgtatgtatatttatgtgtgttaagtatcaggagtgagagagtaaatgtatgtagaggggtgagggagagtcttaactatttagtttgggtgtaaccatcagaaagcaaacttactgaagtgagatgcttaacttggagtatagcaatgtcttacatactggttaatgaaacatctgctctactcttaggtcagctctctggagctaaagacagctacgtttcccttaccaggtaaaaattccctgatatgttgactgttaacggatatttgaaggccttctaaaaatatatataaatttattatttttctcaggcaggggtccaagtaggaatgcaaagagaaagtgtaaaggtattcttcacaaagtccccacagtattgactttcccctttaaaagtgccttttggtttagctgctatgtgtgtgtgagtgcatactgtcaagttacatgactggtgaggaatttacttttgattatttgtcttgaacttgttctcttccaaatatggcaacaacttacaggagttcatgatttttttcaaactcaagccttaaagaagaaattctaactttgcattaaccatgttcttttgggaagaaaaaaaaatatgaagtaaaaagggaagtttaaccttttgggggaattggaactcaacattactctcacatgttaggattactttaaaagacagaatttcagaatttaaaaaactaatcatttttaatatatagaaatacctagttgcccatgttttgaatattagtctctcttcacaactttgcatactgtgtaataagggatatgtgggacgattcagtgtgaaaaacatgttctttctacagaaaaagcttttcatttgaacttggtagtgattggatttttagcagcctggcaacttcaggcacttctgtagcagctttggatgttagagtgtccttggcctttatccctgaaatcctaggaggctctcaagtgccttccagccattcccagaaaccttgaaggcaacatcttttctctgtgcctttgcctaagggagtctttctggagctgatactcccaaaagtatactgttaactttggaaaagagtcctccctatccccaaaccagccctcagcctgtgtctgtggcacaggatttggaaagcttggcagggctggatgcttgggagcttcaaagagagcataaattcctctgtaactttttattggtttaattttgctcctgaaaatgtgtctggggtcaggcacagtggctcatgcctgtaatcccagcactttgggaggccgaggagggtggatcacctgaggtcaggagtttgagaccagcctggccaacatggtgcaactctgtctctatcaaaactacaaggccaggcacggtagctcactcctgtaaccctagcactttgggaggctgaggcaggcagatcacaaggttaggagttcgagaccagcctggccaatatagtaaaacctgtctctactaaaaataaaaaaaattagccggtgtagtggcatgtgcctgtagtcccagctactcgggaggctgaggcaggagaatcacttgaacctgggaggcagaggttgcagtgagccaagattgcggcactgcacttcagcctggataacagagctaaactccatctcaaaaaaaaaaaaaattagccggcgtggtggtgtgctcctgtaatcccagctactcaggaggctgaggcatgagaactgctcgagcccaggaggcagaggttgcagtgagccaagatcacgccagtgcactccggcctggacaacagagcaagactgtcttaaaaaaaagtatatctgggggtggtaatcattctatgatacacatttaagtttgagaaatactggtaatcttcactgttgctcttggattttgactgcctgtgaactaaagctgtggtctccaaagtggggtacgtgacagtaatttattgaaaagcaggaagaggccggatgcgttggctcacacttgtaatcccaacactttgggaggccgaagtgggcagatcacttgaggtcaggagtgtcagcctggccaacatggtgaaacccagtctctactaaaaaaatacaaaaattagtagggcatggtggcatacgcctataatcccagctacttgggaggctgaggcaggagaattgcatgaatccaggaggtggaggttacagtgagcccagatcgtgccagtgcactccagcttgggtgacagagtaactccatctcaaaaagaaaagcaggaagaaaattttgaagcttctgtgtttttttttcttctttattttactttcagagacagggtcttgctctgttgcccaggctg
